United States Patent Application Publication US 2008/0039413 A1 - sequence listing, part 24

SEQ ID NO: 3233 - DNA, 236907 bp, Homo sapiens
  misc_feature (1)...(236907): n = A, C, G, or T/U
aagtgtaatctgcaccgtgtgtatttcacttcctaacacccaatcatccataaccataagagaacatcaataactcagaaagcagtaatactccaagcaatttatatgtggtactagcatacaccaaataatttatatgtagtactatatgtttttctggggaacaaactttctaatgtgtagtttagacataaatagatggagtacataaaaactaagtgatcaaaaaggtgattagaaatagaagaataattatcttgaacaaatacaaaggtccagctataaagtagataatccacaaaaagacacagaattgggaaccaggagaaactcagacccacaaaatgaagcttatcatgcagaagacagcccaagaatcctagacaattatttgattcattcaacaaatatttacagagcatctaatttacggcaggcagactttctgcgcttatgtattcataggaataaaattaataaaccaacaactctctccctttcctcttccacacccaccttatcgataatgctgttaataatgagaggatttttcaaaatgtgctgcccaatccccgtgttgaacatgagtcctgtaagaaaatacgaaacagcattaattttcctactgagattagatattaggcagtcccagagaagaaagctgcatgggtatggggaagatttctgcgccaaccagggccacgaaacgtcacgccaggactgacaaactctttataagttcatcctccagctggaaaggaagtcagcggcgacgcgcagggcctgcggccgagtcggggacccacccctgccttccgcgctcacgggagcgcgtcctgaccggcctctgccgatcaggtcttggtccgcaccccaggctaggtcctgccggaagacctgacccgaccgaccccagcttcctcgcggggatccgcacctccagcgctcttcagctcccggcgctgctcctgccgcccgcggcggcggccgatggcccccgacttgaccttcggcatctcggcagaaagcgggcccacaggcccgggacgtcaaggaggaccaaagagggctagcgtgagaaagccaccacgtggggatcgccgccacgcgccgcccgcaccactctggcccaagcgccggaggggcaagggtccgccccctcccgtacgctctgagctcctcctccagaaaaagggcggaccttggagcccactgactgccgggaattggagtcacagagggaggaaggccgaaccgcgggagcctacagatcccagaagacaccgcgctaccgaggactgcagtctggagttggagcccttgtcccaaccagggctggataagaaggtgttggtgtggtgctctcggtgttgcgaaggctgtttaagttatatgatgaggttaagcctatggatgttttagtagcctaggttctgggatcgctgaggtccaaagaagtattcacgtgcctcgctcctgttttcctgaagcttgtgggggtgggaaacccgggatttggggatgagcttgctcttttgtgggaatgcattttttgctgcttgccctggggaaaagaactgcgagaatggaattaacgtctggtttcgctagggctactggttgcttctactaagaatagaagagccgggcgcggaggctcacgcctgtaatcccagcactctgggaggcagaggcgggcggatcacaaggtcaggagatcgagaccatcctggctaacacggggaaaccccgtctctactaaaaatacaaaaaattagccgggcgtggtggtgggcgcctgtagtctcagctacttgggagactgaggcaggagagtggcgtgaacccaggaggcggaggttgcagtgagccgagatcgcgctactgcactccagcctgggcggcagagcgagactccgtctcaaaaaaaaaaaaaaaaaaaaaggaatagaagaataattatcttaaacagatacaaagctccagctacaaagtagataatccacaaaaagacagaattgagaaccaggagaaactcagacccacagaatgaagcttatcgtgcagaagacagcccgtgaatcctagaaaattatttgattcatttaacaaataattcaacaaattccttttgtgcctcatcattcactccgtaaacatttattgagctccaactgtgtatcaaacactgctagggattctaagtaagaaacttatttcaaagtgtattatattgacagagatggacagaaactccaaaacgctgtaaatacgataacgtattggtcgttgtgacaggacagtgtacctgactataaactccgtgtgtaccagggccataatatccacatctgttttgccagccagtgtaatggctcttttaaatttttctgtgtgtattctgtttggttgaagaaatagcttcttcctgtcattactaaagctaactctcttttgagcaattcattgtgtacattcccaaaccttggtcttaggcccttctttctttgatgtagttctaagtcagaaaaaaaatctcgtataccctagtagcatcttcaagtatatgtttcatttcatcaatcattgttattccacaattctaaagagtacactgtgctaggcacttccaaatgttaataggatggacatggcctggagaggtggctcatgcctgtaatcccagcactttgagaggccaaggcgagcggatcacttgagctgagaagtttgagatcaacctgggcaacaaagtgagaccccgtctctacaaaaaatacaaaaattagccaggcgtggtggtgcaggcctgtagtctcagctactcgggaagctgaggtgggagcctcacttgagcccgagaatttgtagtgagccaagattgcaccaacctgggcgacagcatgataccctgtttaaaaaaaaaaaattaacatgacacaaaaccctgtgtgtgatttgttattgttgttgttgttgggttttttggttttgtttttttgagacggtctcactctgtcacccaggctggagtgcagcggcatgatctcagctcactgcaacctccgcctgccgggctcaagcgatgctctcacctcagcctcccgagtagctgagacgacagacatgaaccatcttgtccagctaatttttgtaatttttgtagaggcggggtctcactttgttccccaggctgatctcaaacttctcagctcaagtgatctgcctgctttggcctctaggttgcatttcttctgtgaaataaaaggcaagtttttctgtagagaaggagctgtggaggtggtaggacaaggggcatgagtgcggagaaggtttgaagatcctttatgcgcaatgggagaggaagattagagggaactcaagaagacatggcatgtcttccagctaaatgtggagcccagtatctccaatgtgtactgctgtgtaaccacagcctggagacaagagcagagaaggcaaaattgttcttttgattcatcaatgaatgaccactattgctccctagaatagcattgtaggcctttcaaattaagttcctatttaccttacttatttacttcccaacgttatcaagttcctttttcttccttaaacatctttatacctcggctttgtgagtgctcttccctttgcattctcgaccttcccctggctaacttttgtttgctgttaaagacacaactcatatatataatataaatatatatatttaaatataaatataaacatatataaatataaatatatatatatatatattttaagatagagccttgctctgtcacccaggctgcagtgcagtgccatgatcttggctcactgcaacctcagcctcccagattcaagctattctcatgcctcagcctctcaagtagctgggattgcaggcgtgcaccaccaccacgctggctaattttttttttttttttgtatttttagtagagatgggttttcaccatgttgcccatgctggtcttgaactggcctcaagtggtctgcccgccttgccctcccaaagtgcagggattacaggcatgagttaccgtgcctggcttcaaatgttatatttttaaaatagtggcccaggctgggttgcagtgaggcagacgttgcagtgagtcgagtttgctccactgcactccagcctaggtgacagaataagactccgtctcaaagaaagaaagaaaagagggagggagggagcgaaggaaggaaaggaagaaggaaggaaggaaaggaagaaggaaggaagaaggaaggaaggaaggaaggaaggaaggaaggaaggaaggaaggaatcctgaatactataaacaagattcttctatgaatgtattctttagaatgatctaaatatgtggctgggcatggtgactcacgcctataatcccagcactttgggaggccaaggcgggtggatcatttgaggtcaggagttcgaaaccagcctggccaacatagtgaaaccctgtctctactaaaaatacaaacattagctgggtatggtggtgtgcacctgtaatcccagctactctggaggctgaggcaggaggcagaggttgcggtgagctgagattgcgccactgcactccagtctgggcaacagagtgagaccctgtctcaaaaacaaaaacaaacaaacaaaaaagaatgatctaaatatttttagataatcataaagactatgttagattaatacaattatttaaagaagatgattatggtctctgtttaataccagcataggtgtaaaccttgtcagtgaatattacataattgatacctctcaaaaacatttgtcagataaatgtttccacatcattaccattgttaaaagagaaactaaggcacagtaaaatcttaaaatgtttatttgagcagacagtgattcatgaatcagtttgggactctgttaaaggcacaccaaagaaaggcttttatagggtgaatgtggaagcatggcaaataaaatacactgagttgggttttggtttgcttctgtaggaacccagggtgctggagcagcctcagtctaatggcctctctattaattattttaacatcataaaataatgtatatcatgttgcaaaataaagcttttagaaggtttccaaatacaataaaaaccaaattattagggtacatagaattctatttgtgggttagagtctatttttatttttactatttatttatttttgagatagggtcctgctctgttgcctaggctggagtgcagtggcacaatcatggctcactgcaacctccctgtccaggcctcaagcgatcctcccacctcagcctccagagtagctgagaccacaggttcatgctaccatgcccagcttatcttagtattttttgtagagatggcattttgcctaggttgatcttgaactcttgaccttaagtgatcctcccacctcagcctacagaagtgctgagatcagaggtgtgagctaccacacctggctagaatctatttttatattgtatatttatacttatgtattttttattttaaacaatattttatagtataaataaataaaaatattttattttataaagtggtgcatgctcctaatcccagcttcattaaggagactgagatgggaggaacacttgagcccaggagtttgagaccagccagagcaacatagccagagaccctgtctctaaaagcaaaaaagaaaaaaaaagcccttttccaagttattacacactctgaataattaatattgaaaactgttggccgggcgcggtggctcacgcctgtaatcccagcactttgggaggccgaggcggggcggatcacgagatcagcagaacggcgtgaacccggaaggcggagcttgcagtgagctgagatcgggccactgcactccagcctgggcgacagagcgagactccgtctcaaaaaaaaaaaaaaaaaagaaagaaaactgctacagaaactttcaccttgtgaatgcgtaagggtttactaaatcctgcctattccattgttcttataaaaatagagccatagacattttagtttatacctgaaaaatattttcagtactttgaattggttctctagtatagatttccaggcatggaattatttactcaaactgcgtgaacattttagtctttgaatataaattgacaaattattttctttttttattttttgagacggagtcttgctctgttgcccaggctggagtgcagtggcacaatctctgctcactgcaacctctgcctcccaggactgatttacataatcagtccttatggaaataataaacttgtttcaagtttattataaacaaaaatgaatctaggaattatgttaatttataagcatctaatgagctgtattataatgtagagttatccaagactcaattttatgcaagttaaaataataaatgaagggtagcaaattagagagcctataacttttgagcatatattctattgctgcttcagcaaagtaccacaaacctaattagtggcttaaaacaagatacatttattaatttagagttctggaggttagaagtctaaaattgttttcatgtctgagtttcttctggaggctgtagaagagaatcagtttccatgacttttccagcttctataggctttctgcattccttggctcatggccctggcatccctctgacatctattatactggcatattttctttgtcttggacactccagcgtccctcttataaagacccctctgattacattggacctagaggataatccagcataatcttcccatagtaagattatcctggataatttaatcacattggcaaaatcccttttgctctgtaaagtaacatattcacaggttttggggattaggacatggacatcttttattctacctaccaggaaacatagatctaaatttgtttagaaatggagaacctcgagcctcacctcagactaaatgaatcatgaactgtattttaacaagatccctatgtgattctatgaacacttaaaatttgagaagtactatctttgttttttatttttttttgagacagagttttgctctgttgcccccaggctggagtgcaatggtgcagtctcggctcactgcaacctctgcctcccgggttcaaaccattctcctgcctcagccttccgagcagctaggattacaggcatgtgccaccacgcccagctaatttttgtattttgggtagagacggagtttctccatgttgatcaggctggcctcgaactcccgacctcaggtgatccgcctgcctcagcctcccaaagtgctgggattacaggtgtgagccacctctccaagcctgagaagtactatctttcaataaaatcagaagatacagttaagcaaaaagaaaataaagcatggtcacaatacccatccaactagtgataaaccctcctagcattttggcatttatttatttccaaaagtgggacattctgaacataatgttttgcaaccctcttttttcacaatgcattgtgcatgtgtaaacatgtcaacaaatacacttcaagataattttattttgtttaattaattaattaatatatatttttttgagacagagtctccctctgccgcccaggctggagtgcagtggcacgatctcggctcactgcaacctctgcctcctgggttccagcaattctcctgcctcagcctcccgagtagctgggattacaggtgcctgccacaaagcccagctaaatttctgtatttttagtagagatagggtttcaccatgttggccaggctggtctcgctctcctgacctccagcaatccacatgccccggcctcccaaagtgctggaattacaggcatgagacactgcgcccggcctatttattttttcttgagatggagtctcgctctgtcgcttaggctggagtgcagtggtgcgaactcggctcactgcaacctccgcctcccggcctcaagcgattcttctgtctcagtctcctgagtagctgggattacaagcgcatgccaccacgccaggctaatttttgtagtttcagtagagacagggtttcaccatgttggccaagctggtcttgaactcctgacctcaggtgacctgtccgtcttggtctcccaaagtgctgtgattacaggtgtgagccactgtgcccgacctcaacataattttaaatggtcaatttgtattttattatgtatggatgtattgtgatttaatcatttgtgtcattggtggttgtttaggtaattttatctttttactttaaaaaacagcccttgtgtgatcgacattcttggaatgcagagcttggttcaaatcctaacatggccttttactagctgtttgacgttaggtgggctacttgacttctctgtgcttcagtttcttcatctgtgaagtggacataaagaaaatacctacctcataagggttgttctgaggattaaaatagataattcccataaagatcttaaaactgtacctggaatattctaaattagcaataaaggttttctattattaatatttttgaacactctatttccttacaacttcttttactattattattattattttgagacggagttttgctcttattgcccaggctggagtgcaatggcgcgatctcgcctcactgcaacctttgcccccagggttcaagcgattctcctacctcagcctcccgagtagctgggattacaggggtgcaccatcatgcccagctaattttttatatttttagtagagatggggtttctccttgttggtcaagctggtctcgaactcctgacctaaggtgatctgcccgcctcggcctcccaaagtgctgggattacaggcgtgagccactgtgcctggccttactattattatttttaagaaatatatagttggtgtgtatttttaattaatttatttattttgagacggagtctatttatttatttatttatttatttgtttatttattttgagacggagtctcgctctgttgcccaggctggagtgcagtggagcaatcttggctcactgcaacctctgcctccagggttcaagcgattcccctgcctcagcctcctgagtagctgggattacaggcgcccgccaccgcgccaggctaattactgtatttttagtagagacagggtttcatcatgttggccaggctggtctcgaacttcggacttcgtggtccggccgcctcagcctcccaaagtgccgggattacaggtgtgagctactgtgcccaccccttattatttttgaaatgggtgtgtgtgtgtgtgtgtgtgtgtgtgtgtgtgaactctctatatgtcccaggttggcttcgaattcctgggctcaagtgatcctcctgcctccatatctggagtagctgggactacaggcgcgcgccactgcgcctgagtaagttctctttttaaggataagaaaatttaggtgactatgctagcttttagcagaggcaagcagaactggatttatgtccttttacatttttccactcttgctattactcaggagtaagcgccaagcaatttgggtaacttaaaaaataaatatttgcgggagggagggtggactgatgggagtaagattctttaaataactcttctctgctgtgacggatccgctattgatatctagaatataaagcgtgaaatggttctgattgaagcttcaatcaacgcaggaaacaattgagctccctgggagtcggagaaaccagacctatggtttccatggtgacagatccggctagtccggactcctggctctttatactgcgcaagcgcactgcgcaagcgcacacaactgatttggataccccgcgccttttggttcaaagacaaagcccctccttccccttcccgccgttcgcctatcgccttctctctctgccggtcgcatgcgcgctggtctcctgtgacgtagttttcgcgcgtccgcgtcgtttggagctgcgacgccaaacatggcgtgttcctagaagccgctttcggcatcagtaggcggcggcgtggggtctggcagcgtggggagagggaccaaccgacgccacttcgtgttgggaagtgggagcgggagggccgggcaattcccgaccgaaccaaacggtgaggccccggcccgagagccaccgagcgcgcgggagtggaagggagtgggttgggcacccgagtcccgagaggcgagggaggaaagtggggctaccaggagatgagggataacggtagcgaggcaagggcggcctgcagacttggctgtttgcgcaaccttaggaacccggggaactgggggctggccgaggcagcccgggagtgggcagcatggtagtggagcaatcagggtgcggggtgggagggaccgtatgctaggctgagcagaggcgagtgtacccatcgtgaccgcggttgcggacctgggtgatgcatttgcccttgggggataggtggtgcaaattttgagataaagtggttatctcgagtataagaccgttgtgcattgttactgcgcacgcgaccttgttgctaatagcaatagtgtgatagctttaaacattagacccttacatgcttttaatgaaaaagtgaaggtagttgtccgtttatagagaggagcttcatggagaggtatggccgccaattctcaagctcagcgactcctgtagatttatatttgggggtatttgtgattcagcaaaactacttttgcttattacgtgtgtcattttttctttattattttgtgacatgttggtgaatgagagaagtactatctgaaagtgatttgactaaatagcaaggactggtaaattacctactagtgccaaggttgcagttgacatacctcctcccctccataatttaaacgagctcagttgtagcgcggtagtgcccttcagatttcggttattcttcagaaggaagaatagtttgtagccataatgcttttccccctcctgggataggaattttcttcctccattttcatgttatttcaaacttctctgttcagtagaggagcttcagattaagggcagggtgactcttctataggagacatccattgcatgacacatattacatctttcatcactgaggaaaatttcggtgaaagtagaaacattttcccttttggttatgatgggactggtattttctctgtttctgcagtaacctagcacagggtatagtagaaacaattaattatagtagtggcttgtggccatatattatagtctcagggtaggagggtggtctccgccctagttgaacttctaaggccaaagagaattttcaccacaaacacatttggctgtggtaatgttagaggttttaaacaaatatgtaaagattatctgatcattaatagaacaatttttagattttgtgatgtttgaatatatttgcatttggaatcaaaccagaatgcagcatgatccttgtaggcatgtggctattaaaatacactgaagatttttccagaaacaaaatttttttttctcagcaataaaaatattcaaattttgggtaaggtaatgtttgattatttggattttgacctttgtgttatatatttgtacctgtgtgtgtgtatgtatgtaacctcacttctaatttagtgttattgatggtaatattttttcctttctttatcagcttcaaatagggactgttaatttcagagcgtttaaggaatggcaaaacacatttagtgctggtgtgagtctgtagtgtgtttggtttgctgactatcagacttattacagataagtccacagttataagctttgtagagcttaagttgcatcagtgttctttacccttgctactcaaattgtggtatatagcatcacctgggagtttattagaaatgcatgatctcaggctcaatccagagctgctgaatcaaaatctgcaattttaacaagttatctagatgaaaggaatgttcaataaatcttgagatgcactactttggttggtaacagttgaagaacactgaggtaatgcacaaaccggtataaaaatttatagcatcatttattttaatctgaggtgatcttatgctgattatccagtctgatgaaactgaggcccagaaaggtaagtgccttgcataaggtcacacatacctagatttataacccagattccaactcattccagtgcttttcttttgctggttactgtcagagcttgttatattaaaaacggactaaaattcatgaatgacaattaggtgttcattcaataacaaacgtctattgggtactgtacaggcagcctaacaatcctgtgtgtccctgctaactgctcctgtttatcatggtggctattaacccaccacctttcctctttattttttttgaggcggggtctcactgtcacctaggctggagtgcagtggcgtgatctctgctcactgcatcttccgcctcccgggttcaagcggttctcctgcctcagcctccagagtagctaggattacaggtgcctgccaccaagcctggctaatttttgtatttttagtagacagggtttcaccattttggccagactggtcttgaactcctgacctccctgaactccacccaccttggcctcccaaagtgctgggattacaggagtgagcccggccccgtctttactttttttttttttttttttttgagatggagttctgctctttttgcccaggctggagtgcagtggcgcgatctcaattcactgcaacctccgcctcctgggttcaagtgattctcctgcctcagcctcctgagtagctgggattaccggcatgcaccgccatgcccagctaattttgtatttttagtagagacggggtttctccatgtttgtcaggctggtctcgaactctcgacctcaggtgatccccctgcctcagcctcccaaagtgctgggattacaggcttgagccaccacgcccggccccctctttactctttactggataaagttcccttctgcttcatagaggaaatgaaatacattgagtgggaacttcattgctttctgttctgtttcacctgcaaacatgaagacctctatctgtccatctctaatgatattctgagttttttctccttacgggcaatatttccttcatgtgtttgctagggccgccacaacaaaataccttatattgggtagcttaaacaagagaattttttttctcacagttctggagagtggaagtctaagatcaaggtgcagataagattggtttcctgtaagacctccatccttggcttgcagatggccaccttcttgctgccttttctcgtggtcatcctgtgtgtacatgcacctctgctgtatctttctgttttctttttttttcttttctttttttttttttttttgagacggagcctcgctcttgtctcccaggctggagtgcagtggcccgctctcaggtcactgcaacctccgccttcccggttcaagcgattctcctgcctcagcctcctgagtagttgggattacaggcgctcaccaccacgcccggctaatttttatatttttagtagagacgggtttcaccatgttgtccaggctggtctcaaactcctgacctcaggtgatctgcccgcctcagcctcccaaagtgctgggattacaggcgtgagccactgcactggcctgctgtttctttttcttataatggcatcagttatattggtttagggccctaccctaacaacctcatcttatcttaatcaccttaaaaactttatctccaaatactgagggttcgggggttagggcttcaacatgaatttttaaggaacacagttcaatccataacattcagttactcctttttcaactagtactaacttaacaaggatttaagcatacccaagtctcttattatcttttttttttttattttttttttttgagacagagtactcactctgtttctcaggcttgagtgcagtggtgctatcttggctcactgcaacttctgcctcccaggctcaagcgatccctccacctcagcctctctggtggctgggaccacaggtgaggcgcaggccaccatgcttggctaatttttgaatttttttttgtagagatggggttttgccacattgcccaggcttgtctcaaactcctgggttcaagcgatccactggccttggcctcctgaagtgtattggaattatatgggtgagccaccgtgcctggcctcaaatcaagtcttatctgaaatatacgctccttaccttagattcttagattcctcttcagctttatctataattatttttcttagttttttttttttctcctttttttaagagacaaggtctcttgttacctaggctggcctcaaacttcagggctcaagtgatcctgccacttcaatctcatgagtagctggtactacttgtgtgtgccaccatgcccagcttatttcctttaagtttcttgaaagaattctctatattcattttcttcacctccttattggttaattttttttttttttttttttttttttttggtattttgaaggctgacagtccatagcagtcactgaatttgatgtagtggtgatcaccattgatatctttgttgctaaatctaatggaatctgtttaatcatttgccattttaactacttgttcgttcttgaaattttcttcttatacttctgggacaccatattttccttatttccttcttaggttttagccagtcttttgttggttatttttctcttttctctgaccactttagatgtttgactctgaggcactaccctgctctcttctgaaaaccttcagataaaaatccaaactacgtagtttaggaaataaggacttcaatgcacactcttcatgaatggtctcatttgtgacttcaactattgcctctattttgatgactcccaaatctggctttttagcacaggtctctcttcaacgctgacatatgtagttgtcttaaaatacttgacattcatgtcaaaaacgttgtgtatttcaaccttcctgacattgttttcctcctatgagccatgcaggcaccaatcagttggaaaagcccaaaatcttaattctttccccttattaacttatgtgtaacccctcctccaactctccaactatctaattattttatttccaactctccaactagccattatttatttatttatttctgagacagaatttcactcgtagcccaggctaaagtgcaatggtgcaatctcgtctcaccgcaacctctgcctcccaagttcgagtgattctcctgctgcagctttccgagtagctgggattacaggcatgcactaccatgcccacgcctgcctagtttttttttttttttctttgagagagagtttcactcttattgaccaagctggagtgcagtggcaccatctcggctcactgcgacctccgccttctgggttcaagtgattcttctgcctcagcctcctgagtagctgggattacagacgtgcgccaccatgcctggctaattttgtatttttagtagagtatgttggtcaggctgatctcaaactcctgacctcaggtgatccacctgcctcggccttctaaagtattgggattacaggcatgagccactgcacccagccaacacatatcatatagtttaaaatgtaagtgtttccagtacagtaagctattaacagtatagtgctatgaacagcattcatatagttaatagcattatgcagaaaaattaaggatatcgggaacatagagattcttggttgaggagtgagcccttttagattggcagttagtggagacctctttaaatagaggacaacttgagcagaatggaatgctgtcaaagagcaagacatgcttttatctagagaccagagctttccagccagagggaacaaattgtacaagggataagatacattttatacatatttcactaaagatgttcacgtattgtctccaagtctctgttaatatagataactaggtcatgcagacaacctagtcctttgtctccttattcttatatgcctgtgcaggggtttctgtgattatagcaccaggtgtgaaactgctgggtcatagaagatacagtcacgagttgcttaaggctgggatacatcctgagaaatgggtcgttaggcaattttgttgttctatgaacatcatatgaacaaacctagatggtacagcctattatacacttgggctatgtggtatatagcttattgtatctaggctataagcctgtacagcatgttactgcactgaatactgtaagcagttgtcacaaaatggtaagtatttgtgtgtttaaacatgtctaaacttagaaaggtactgtaaaaatacagtgtagaagtaaaaaatggtacatctgtatagggcacttacctcgaatggagcttggaggactggaaattggtttggatgaatcagtgagtgagtggtgagtgaaagtgaaggcctagggcattattgtacacttaggctaaaataaatttattaagaaatttttttcttcaataatcttagcttattgtaacttttagtttataaactttttgtctctgttgcagtaacacttagcttaaaacacaaatacattgtgtagttctacgttgtttaaaacagacgcaaacacacacattaactcaggtacacacaaggtcaggatcatcaatatctctgtcttccacctccacatcttgtctcactggaaggtcttcgggggcaataacattcatggagctgtcatcttctatgatagcaatgacttcttctgaattatctcctgaaggacctgtctgaggctgttttacagttaacttttttttttaataggagtagtacattgtaaaattatgataagaagtatagtagtggggcttggtggctcacttctgtaatcccagggtttagggaagctgaggtgggaggattgcttgaggtctggggtttgaaatcagccagggcaacatagccagaccccatctctacaaaaagtaaaaaaattagcatggcatgatggctcatccctgtagtcccaagtctcaactattcaggaggctgaggtggaatgactgcttgagcccaagagttcaacgttgtagtgaattatgatgccggcattgctctctacctcaggtgacagagatcgtaactcttaaaaaaagtaggctgggcgtggtggctcacgcctgtaatcttagcacttcgggaggccaaggcgggtggatcacggggtcaggagattgagaccagcctggccaacatggtgataccctgtttctactaaaaaaatacaaaaattagccaggcgtggtggcacacacctgtaatcccagctacttgggaggctgaggcaggagaattgcttgaacccgggcgatggaggtttcagtgagccaagatcgtaccactgcactccagcctgggcaacaagagtgaagctccgtctcaaaaaaaaaaaaaaaaaaagtataatgtagtaaatgcataaaccagtaacatagttgcttattatcactttcaagtgttatgtactgtacctaattgtatgtgctctgcttttatacaaatggcagtgcagtaggttagtttacaccagcatcaccactaacgtgtgagtaatgtgatttactacgacttaggatggctatgatgtcactatgtgataggaattttaaagctccattaaaatcttacgggatcactgtcgtatatatgtggtccatatctgactgaaactttttttttttttttttgagacagggtctcactctgtcacccaggctggagtgcagtggcacgatcgtggctcactgcagccttgacctcctgggctcaggtgattctcccatctcagcctcctgagtagctgggactacaggtgtgccccaccatgcccagctaactttttgtttttttagtagtgatggggtttctccatgttgcccaggctggtcttgaactcctgcactctaagtgatccacccgcctcagccttccaaagtgttggattacaggcgtgagccgccatttttatgtggtgtgtgaccctctgtgtgtcctggtcatagaatacacaaaatatatactcaatttcattagagacagctagatagctctccaaagttgtattaatagatattcccagtagcagtgtttaagagtttctgtttccatgcattcttgccagcattgaatatttttggactttgtaatttttgctagtctgatcataaagtagtttttcactgtttggattttaaatccctgataaccagtgagatagcatctcttctgatattaattaaacatttagctcttcttttctatatattttctgcttacaccctttgttcacttttcttatatatttgtcttgttgattcacaagggttccttgtatattctgtataatacacctttgttttagttatgtattaataacatttcttctcttaatcttcaccttgttaaccttgtgtagggtatcttcaatgactccatcaatttcagtcttcagttctgatgtagtataattcattaggcagataggctgtgaacttgatgtatttttgttctttctcaagtctaaagctaaaaattcccagttaatttcacttgagatattaatggacagcactgaacaaaagtaaaagtgtttaatctttcgggagtactgggtggggacaggagacttacatttaaagttctagaaatgtcactaatgagcctgtgaccttagagaagtcagtttatctccttatcttttggccacagtgtcttggtcagtaaaacaaaatacttaaactgtgtagagaactgatatgggtggctccaaggtgataggaaaattatatttatttacttgttaacttatatggactcacaactgagagaaaaattattttaatgataaaatgtagaatagtgattaactgtgggattattacttggcatacagcacatgcatgtttgaacaaatgggtttttataaatacaatgacaggctgagctctttatagcaagaatgagattcttataagatacagctttatagacagtgatgtcttcaaccagtaaatggaaactaccaatcgaagatgtctatatttggagagaggactgatgatctcttacactcagcaaaaagttttgcctaactgctagttataaattatagtctgttaaatttaatctaggctgtgttgttatctctattcagtgccttaatcaaaatcagttttatagcttttccttcctattttttttcatatccaagaaggaactttatttatttattttttgagatggaatcttgcttgttgcccaggctggagtgcagtgacaccatcttggctcactgcaacctccacctcctgggttcaagcagttctcctgcctcagcctccctagtagctgggattataggtgcccaccaccatgctcagctaatttttgtgtttttagtagaaatggggtttcaccatgttggccaggctggtctcaaactcctgacctcaggtgatctgcctgcctcggcctccaaaagtgctgggattacaggtgtgagccactgcccagccagagaaggacctttaaaagcaataagcataactgctgttccttagtgggttttgtacagacatgtatttttgtttttcagctaaggagacaccagagggtgatggttgacagtagttggtacctcacagctgggcactgatcaggtagggggtgtcaatattgtttaggataatgtataacttttcttattagggggagattagtcacggggaactcttgtatataccaaacaggcaagagacttattgcagtttatcagtgccattttactaaaaactcccggtgagacagaaatactcaagtttttcggacaggtcttcctctcacaggtctgcctcccctgtctattgtcttcttacatactttatacttcacccatttattatttgtttcccatttatttgtctccccactataaaatatgcttcacaagtcttggatttttttttgtctttttagttaatcgatgtatctcaagtgcctagactagtgtctggcatttgcaggtgttcagtatatatttattgaattaataaatatggaaaagcctaatgataaagcaagaaaatatcagaaaggggattggagagcgcaggattagaaaaaagggtgttagatattcccagtgaaaagtattattaaattttgttggcttgatatgctccatttcagtataggaagatactgaatggactgttcatacattcattcatttttttcagccattcagcacactatttactcttgcagtgttttttgtagatatttctgtctttactctgataaaatttgtattccatattgttgttcttggacctctgtctcttaccttttctgtcttctgtctgagaaatcataatttctgttactgtttagttgatcatacatttactgaacatccttcacactgtgctaggtaatggcatttatagatgagtaaaacatcattctttcctttaaacagttcatgatttggagatgagatagaagtaaacaaggaagtaagtacagcaatagaagtgtgtactatgcagaacagtagcatggaggaaggagcgctttactgtctacagcagttaaagatttcctcaggaggtgatgtctaccatgaacagcaactttagtgatctctgtgtccgttagcggccattttaaaaagcatacataaaagtagacagaattttatgatgaacccccatctagccatcatccagctttaacaattatcaacttcatttcgtcttacctcccacgtacttctctagttacattgatagaagatctagaagcttggtcagattcaggtttgtttgtttgtttttttggcaagcagcccttaagattttggtttctcaaaataataaacttcatttctttaagttttctaatatactcacttttctattttgattattgtagaactcttccccggtcttcacagaaattaatttctttcttgtctttggcatattgtatttctctagtttgcttttgactctgggcagtttaacagtttgcttgtatttcctatccatgattccccagtgatatattttctgcctcttgttcttctctttgtagacttgggctatagatcatgattttttttctgagacatggtctcactctgttgcccagactggagtgcagtggtgtgaatatggctcactgcagcctcaacctcctgggctcaagtcatcctcccacctcagctttttttttttttgttttttgagatggagtcttgctctgtcgctcaggctggagtgcagtggcgcaatccgagctcactgcaagctccgcctcccgggttcacgccattctcctgcctcagcctcccgagtagctgggactacaggtgcccgccaccacgcccggctaattttttgtatttttggtagagacggggtttcaccatgttagccaagatggtctcgatcttgtgacctcgtgatccgcccgccggggcctcccaaagtgctgggattacgggtgtgagccatcgcgcctggctcagcttctttttgagaagaagtctctctctgttgcccaggctggagtgcaatggcgtgatcttggctcactgcaacctctgcctcctgccacctcagcttcttgagtagctgggaccataggtgcatgccaccacacctggctaaggttttttttttttttttaatttttattttttgtagagatggggtcttgccatgttgcccggactgccaggctggtgttgaactcctaggctcaagcagttctcctgcttctgcctcccaaattggtgggattacagacgtgagccaccacacccaatctgaatatttgttcttatcttaaatgtggaattattgtagtgaatcagtaggtgattttattcctttactcctgtcactcttgtctgttcttgttccatggtttctcagtctcctttatgctagacattgcctttattattatatttttaaaaattacttcatatttaccttgagtagaactcaaaaacacattcatgtctttacctcaaattttcttttggtagagtgatgcaatatctaactatagaagtagaagcagtgctgtaaggaagttcttaggtgtcatattttgcctcaaggtgaggtttttgtttttgttttgaatctcatctttctcgcattgcattactctctaggctcccattcatttctttctctcaggagctcagcattctttgctctatcctcctaaaccctgtaatccctgttacatttccagatggttgtcttgctcagatggtcattgagaattctaaagttcctcgcttcctccaaccctccttggggggaaaggaacatactctttggaatgtggtacttcttaccatcaggtggcactgcagactattcaatttattttattttattttttcaagacggagttttgctcttgttgcccaggctgaagtacaatggtgcaatctcggctcactgcaacctccgcctcctgggttcaggcgattctcctgcctcagcctcccgagtagctgggattacaggcgagcgccaccatgcctggctaatttttgcatttttagtagagacagggtttcaccatgttgttcaggctggtctcaaactcctgacctcaggtgatccacccgccccggcctcctaaagtgctgggattataggcgtgagccaccacgcctggccaattcaaattatttttacagctttaggaatgatagaaacaatagtacattatccggtaaagaaagaagcaagttgatgtgggaactggtatggagaagacttagaaatgaaagtaaagatacgattgctaacaaatacaaatgtattttccttttatgtgatacaagtgtacacaatatatagaagtgtatataataggtggagcctaatggaaagtaaataatacattagactgttttggttagtttgatttttccaagactgtttaagtattttaaactatcgtctttataaacaccaaatagtaagaacattaagtacctaatagacatgactatttggagctatactgctatttgagaataaacaaaacataaaacccctgctgtttgattataagactcagagtcccctgggtgaggagaattgactcttggtaaacactgccttcacaaatccagataatatgacaaaattgttgcttaccggctggtcgtggtggctcacgtctgtaatcccagcactttgggaggccaaggcgggtggatcacctgaggtcaggagttcaagaccagcctacccaacatggtgaaacccagtttctactaaaaacacaaaaattagctgggcatggtggcgggtacctgtaatcccagctacttgggaggctgaggcaggagatttgcttgaacccgggaggtggagcttgcagtgagctcagattgtgccatagtcttccagcctgggcaacaagagtgagactctgtctcaaaacagacaaacaaacaaactattgcttacctacttgtgctactgaagactaggtttgtaaacttcctctcctgaaatttcatgagagtgcagttattgactacattacctacttgatatgtgcttaacaagagaaatacgtaatgatttgcagctgtttgagaagttgggctgtttttggagaaaggaagagaaataaagcaaatatctaattcctatggaaatttaagcagatgtaaaatgaaaactcttggccttaaaaaatgtattttttcattattaaagtgtgttgactataagaatgataacccctggagctttcttaacacaactattgtttataatttgatgtgtttactgcttgtctttttgtaggtgtttttattttgtatagtattatatatatattttatattttaatttttatttttttatatatatttctctagttacaaaacagactaagagagaatatttttaagttatgattggtttaggcaggtttaaacttgtagttcaaaatgcacttcttttttctttctgtttttttttttttttttttttttgatacggagttttgctcttgatgcccaggctggagtgcaatggcgcgatctcggctcactgcaatttctgcctcctgggttcaagcgattctcctgccttagcctcccgagtagctgggattacaggcgcccgccaccacacctggctcatttttttgtatttttagtagagacagagttccaccacattgaccaggctggtctcgagctccttacctcaggtgatccacctgcctcggcatcccaaagtgctgggattacacacgtgagccaccgtgccctccagatgcatttctaacaagcaggagtttgcaggttttttgaaaactccaagcagaagtttgtaggtcctttgaaactcttgagtagatttgatgttttaggagtagggaagagaaagcaagcaaatagcttctctccttgatgtcacatatattttgttgtgcattttttcctcccaaacaaaccagtttttgacagtctgcatgaagtgtcatagggcaggtgtccccagccctcaggccatggaccagtatcagtcagtccgtggcctgctaggaactgggccacactgcaggaggtgagcagtgggtggagagtgagcattactacctgaggtccacctcctgtcagatcagcagcagcattagatcctcataaaagcacaaaccctgttgtgaactgcacatgcaaaggatctaggttgcatactccttatgagaatctcactaatgcctgatgatctgtggtggaacagtttcatccagaaaccatccccccctgccctttacccctcttccactgccctgccccatctgtggaaaaattgtcttccatgaaaccagtccctggtaccaaaaaggttgggggctggtgtcatagggaatacatcagtagccctggtggttcttttagctgaaggtatttgggaaatatatggaagcatctttagtcaatctgtttgaggtattaataacgtatagtgtgcagggacagatatgctaaacaacctgtaatgcatgcacagaaaagaattttcttgtccaaactgccagacttctgctgagaaactgaaatgaatccagatgttgcagtactcatttgaatccagatgttgtagtacacactagtatctttggaaccttcttgtcttatgccagaagtcttacattctttcaccttgctttaatttcttgatctttttggccctgagttaacatcaattgttgttgaaaccgtagacactttttttttttaaagagacatggtgtcattatgttaccgaggctgatcttgaactcctgagctcaagtgatccttccatcttggcctcctaaagtgctgagattcaggtgtgagccaccatgcctggcctatataagtcacattttatttatttatttttttgaggcggagtctcactgtgtcgcccaggctggagtgccgtggtgcgatctcagctcactgcaacctccgcctcccgggttcatgggattctcctgtctcagcatcctgagtagctaggattacagatgcacgccactacacctggctaatttttgtatttttagtagagacggagtttcaccatgttggtcaggctggtcttgaactcctgacgtcgtgatccacccacctcagcctcccaaagtgctgggattacaagcgtgagcccccgcgcctggctataagtcacattaaaaaaagattgaaaacattttttttttagagacagggtctcactttgtcgcctgggctagagtgcagtggcacagtcttagctcactgcaagtcagactcctgggctcctccacactcagcctcctgagtagctagctgggactacaggtgtgtgccactactcctggctaaactttttgttttttattttttgtagagttgaggtctcactatgcttccctggctggcctcgaactcctggactgaagctgtcctcctgcctaaacctcccaaagtgccgagattacgcttgcgccactgcacatggccatctcttgtggattttgacatttacataatcaaagcacttaaaaaaaccagctttattaagctataatttacagtccgtgtaattcacgcactgaaaagggtatacaattcagtagtttttagtatattcacagagttgtgcaaccatcattacagtcagttttagaacattttcatcgttccaaatagcagttgctccacatttccccccaattccccagcctagggaaccacttaatctacttctttgtgttataaatttgcctgttcttcatatttcatataaatgggaatcatgcagcttgtggttttatgtgactggcttcttctgcttagtgtgatgttttcaaggctcattcatgttttagtatgttacaggatttcattcctttttaggtgaaataatacttcattgtatggaaataccacattttattttatttattttaatttaatttaattttcgtttttgagacagagtctcactgtgtggcccaggctggagtgcagtggcgtgatcttggctcactgcaacctccgcctcctgggttccagtgattctcatgccttagcctcccgagtaacgaattacaggcgcacaccaccatgcccgtctgattttcgtgtgtgtgtgtgtgtgtgtgtgtgtgtgtgtgtgtgtgtgtgtatgtgtttatttttgagacagagtctcgctctgtcgtccagactggagtgcagtggtgcgatcttggctcactgcaacctctgcctcccgggttcaagcgattctcctgcctcagcctcccgagtagctgggactataggcatgtgccaccacacccagctaattttttgtatttttagtagagttggggtttcaccgtgtcagccaggctggtctcgatctcctgaccttgtgatcctcctgcctcagcctcccgaagtactgggattacaggaatgagccactgcgcctggcctgatttttatatttttagtagagatgggttttcaccatgttggccaagctggtctcgaactctggacctcgggatctgcccaccttggcctcccaaagtgctgggattataggcgtgagctgctgcacctggctgaaatacgcattttatttacccattcatcacatgatggatatttgagttgtcagtttttggctattatgaataatgttgcagtgaatatctgtatacgagtttttgtatggacatattcatttctcttgactgtatgtccaaaggtagaattgctatgttatatgttattctgtgtttaacattttaaggaactgccagacttttccaaagtcgccgttttacatttgcaccagcaatgcatgagggttgcagtttctccttactgatgcctcattatcttcttttaaaaagctggacaccattgatcggatcattatctttttgattatagcagtagtagtgggccttgacctccagggctcaagcagtcctctcacctcagcctcccaagtagctgggaccacaggcgtgtgccatcacacctgactaactttttctatttttggtagagatgggttttcgccatgttacccaggctggtcttgaactcctgagctcaggcaaactgcccgcctcagcctcccaacatgctgggattacaggtgagagccgccatgccaggccccttaatctcagaaagtagtttagcagtgtatttaatttaatttaatttaattacttaattttttttttttttttgagacagagccttgttctgtcgccaggctggagtgcagtggcgcaatcttggctgactgcaacctctgcctcctgggttcacacgattcccctgcctcagcctcccgagtagctgggattacaggcgtgcaccatcacgtctggctaattttttgaattttagtagaaatggggtttcaccatgttggccaggctgttcttgaactcctgacctcaggtgatcctcccgcctcagcctccaaaaatgctattacaggtgtgagccacgtgagccaccgtgcctggccttattttattttttgagacagagtctcctctgtcacccaggctgcagtgcagtggtgcactctcctcactgcaacctccgcctcctggattcaagtgattcttgtgcctcaacctcctgagtagctgggactacaggcatgtgctacggtacgcctggctaattttttatatttttagtagagatggggtttgctgtgttggccaggctggtcttgaactcctggccccaggtgatccgcccacctcgacctcccaaagtgctggcattacaggtgtgagctaccacatctgggccttacagtgtattttaaaactcttcattttccttcctttcccaccaggcacttctgtgcacagtactcacttatctaattgtgcgcttgcttagaaattccaggggcaattttttgttgtttgtttgtttgagacaaagtcttgctctgtcacccaggttggagtgcagtggggtgatctcagctcactgtagcctctacctcctgagttcaagcgatttttccaggggctaattttaaaacaaatcaggcatagagattcagctgtggaatcctcctgcttaggaggagttacagatagtctacccccaccaggctaaagtcaagatgatgccagctgtaccaccggcttactcaagatagccattgaaacaaggcatgcagactaggcacagtggctcacacctgtattcccagcactttgggaggctgaggtaggcgaattacttgaggccaggagtttgagaccagcctggtcatcatggtgaaacccagctctattaaaaatataaaagttagccaggcttggtggtgcccgcctataatcccagctacttaggaggctgaggcacaagaatcgcttgagcccaggaggcagaagttgcagtgagctgagattgcatcactgcactccagcctgggtgacagagcaagactcacatacatacatacatacatacatacatacatacatacatacggcatgcagacctgtaccctgctgcaccactcccgtatgttttttataccaagtttttcttcttaaaccccttcactcagcccgaaaaaactgaaatggttcctttgaggcttgagctgggctattttcccatttactaacacttaagtaaaagctgctttccttttaccacaccgtactttgactgctgagtggcaaacggccaaacttgagttgggtactttatttatcctggtgtggtacctctgctctttgagcaagctgttgtggacgtgatagaggctcactattctttgcctgctgccctgtggtagagcttctgccgcaggagtggtgcctggatggaagaagagagccctagacctctagctgtgtttgcctggtacagaatttctgcagcatatagctggggtgtatgagaaatactggctggctggctacccattctggggagaaaccgtagcccttggctgggagttagggtgagagagagccctgtgttcttggctgttatgtccctggagtagagcttcctcacattgtggggtagggctgggtttgtggctcaaaagccacagattcttactgttccttccaagatttagtaatatttgtcacatagatgtttctgtatttgctgtatgcggttaagacattttccagagactttgagctttttataattttcaccagttagggttgtatccctgaggagagggtctgtggagctacttatgtcatcattccagaaatattctttctcttctaattcttttaaactggaagttaggcccagtcttgattagattaatgttgaccgtttttgatgtttcagaggcgaggctgtgggctgcgtatttcatcatatcaggaggcacttaaggtcaagttgtgttgttgttgttgataactgaatttactctgttggttaagctggcgactgacgatggatttctttattttaaagatttgtttcttcattacaattagcaagtaatctgtggagtgatacttggacacattgggaacattctgttccccaacaactgttctttcatttaatggttttagcatgggttatttacccatgcctgaataaattatttcactgtgggaacctttttattttggaacactcttcttcggtttttactctaattttggcacctttttgtttttttttttttttttaaagtcaatctacttaaagtgttggcatttagtagacttgctggggttattgtatgtgtgaaatgccctaaaactaatgacaaacacagataatacaaatattctgaagaacattgttatgtatggctgaaactgaagtcactgcaggtctgataaatctgttagtagcaggtaaagatgctgagttttcttttgtttacttgtttcttttaaggagaatttttgtttccaactgtaggcacgttcgtatattggttctgtgtgggagatatactctgggcgccaactggtatggtagaaacgtacttttcacaatttgttttaacaataagagtagcttcctctgcctctcaccccagtagcccacagattttgggtagacaacagagactcttctgattcttatcctaacaactactgcagtgtctggcacaaaataggtgccccaaaaatgtatgaactgagctcttccccgccagactggatgggcttcttaggagcaaggatcaaagcaaggggaggacctggatggggcagatactggaaggaggcagggatgggaaactctagcagattccactagaacaggaaaaatggtgagggtaaggattgctttgctgtgtgcatttatgttctctgcacaatctttgctctaggggaaaattgctttgagggttggcagtagtcagtgatttttttaggaatagcccaaagcaaggctgtgacttttatctttatttctttggtggagggggtgggatgaggatgagttctggtagagcttttttcctttcatatgttgatagcaatatatttatgttcttcctatcctgcgtctatttttatacctatatgaaaagcctagacaccttattttgccccatttgttcctgcccttttctccaacttcattttccgccactttccccttttctcactaagtgtcagtcatgttggccttcttcagtttgtttctaatcgcaaggccttttttctagttgttttccccgtctgaagctctgccttctgatccttgcatgggtttctcttgtcattcacgtctctcataaatgtcacttctcagaagccttcactgaatacccagtctaaagtgacacactcagttgcagtcagtctttttttttgtttgtttgttttgagacagggtttctctgttgcccaggctggagtgcagtggcgtgatcacagctcactgtatcctggacctccctgggctcaggtgatcctcccaccttagcctccttagtagctgggactacaagtgcacaccacacctgggtaatttttgtattttctgtagagacgggattttgctctgttgcccaggtgggtcttgaagtcctgggctcaggcgatctgtctgcctcagcctcccaaagtgctgggattaacaggtgtgagccaccacacctggccatgagatgtgctttaagtgtaaaatatacacaggattttgaagatttagtattaaaagtaaaatatctcagtatatttaaaaaatattggttacatgttgcaatgataacattttggatgtattgagtcaaatacactattaggcctggtgcagtggcttacacctgtaatgccagaacttcaggaggccgaggcaggcggatcatttgaggtcaggagtttgagaccatcctggccaatatggtgaaacccagtctctactaaaaatacaaaaattagctgggcgtggtggctcgcgcctgtagtcgcagctacttgggaggctaaggcaggagaatcacttgaacccgggaggcagaggttgccatgagctgagattgcaccactgcactgtagcctaggcaacagagtgagacgctgtctcaaaaaaaaaatatatatgtatatgtgtatatatatatgtatatatatgtatatatatgtatatatatgtatatatatgtatatatatgtatatatgtatatatatgtatatatatgtatatatatgtgtatatatgtatatatatgtatatatatgtatatatatatatatatcagagcagctgtagtaaaatatatatattaggattaatttttacatacttctttttactacttaacgtggctgctagaaaatgtaaaattaggccagatgccatggctcatgcctgtaatcccagcacttggggagggattgcttgagcctagaagtttgagaccagcctgggcaacaaagcgagaccttgtctctacaaaaaaaaaaaaataaaaaaaaattagctgggcccggtggtgcatgtctgtgttcccagctacttaggaggctgaggtggaaagatcacttgagatcgcggctgccgtgagcagtgatcacgtcactgtgttacagcctgggtgacagaaatttaaaatcttaatctgggctgcgcatggtggctcgcgcctgtaatcccagcactttgggtggccaaggacctggcaggcagaggttgcagtgagccgagatcgtgccactgcactccagcctgggcaacagagcaagactctgtctcaaaaaaaaaaaaatctcaatctggccgggcatggtggctcatgcctgtaatcccagcactttgggaggctgaggcaggcggatcacctggggtcaggagtttgagaccagcctggccaacgtggtgaaaccccgtctctactaaaaatacaaaaattagctgggcttggtggtgtgcgcctgtaatcccaaatactggggaggctgaggcaggagaatcgcttgaacccgggaggtggagtgagttgagattgtgctgttgcactcgagcctgggtgacagagtgagactctgtctcaaaaaataaatcaaaatcaaatcaaatcttaatccaactctatcagtaacttggtatttttcagattctagttattaggccctttttaagatggtacaatgaaatttttgtgtttttgattagccctgctttacttacataggttttgaaatggttgattttccctaaaaggtaatctaggtcagatttcttgttgaatcaacatttggaatcttgccatttcactgcaatttaattgtaattattttaacaaaggaattcatttgctttggctatattctttataggctaataactttcagacttttactgtctggaacattcttcggtcacagagatagccactgtcactaagctgtatcaatacagtacaacgctattccctgtcacccctgcactgagaacttcgacttattttctgtcaatatttttagctttcaattttaatccttatattttgtacgtgtatattgtgaataactatacatacttgctaagtatagaattgtatatacaattttgggggtgattagaaacagaatcccggagaattcaacaaaatcaagaaattgtgtgtttgttgaatggcttcagctacatggtataggattagatgacccagcccttaagatcctttctgacttaggttttagatttttgtttaataggtcagtttggcttttttccccatagcatttcattttgtatgtttcttaaaatgatttggagatgcaccattggtggcacgtaagatgatgttggagagtactttactaacaagtcaaagcaattcttttgcagttttcttttcttccttctgattttgtcaaggataaagttaggtgttacttactgtatggtttaatacttttataacacttattaatctcctttttaaaacgaagacagaagacattatgcttagtcttgggcacgtaatggtacttactcagaatttagaaactttgaagtttgtgtgtgtatctcccctccctcaatttattatcttctatttatggaacaatgaaagagagtttcctttaggaataaattgatttaagcaaaaataatttgattatgaattttaaggatgagtatggggtatacttagaaaagatagaaaggcagaacatgaaggattagatgaatgggagtaattcagaacatgaaagctttttgtctccatttattttactgttaattttttattacttgtaatacatattcaagtatgttaacttatcattgccaggtttccatggatctcaatagtgccagcactgttgttcttcaggtgttaacacaggccaccagtcaggatactgctgtgttaaaaccagctgaggagcagttgaagcagtgggagacacagccaggtttctattcagtgttgctggtaagttgttctaaaattgtttgcttttctttttaataaaatgagacaacattaatttgttttaaaaccctagttttattggtagtttagtgaaatagattcaaatgtttggctgctgatgcctttgccattatcttattactttatgacttcttaagggtgttaaataaatatttattgataaatataaaaataagctaggtatatgtagcatctgctcagaaggcaaaactgtgatgattttcagttttagtacgttaaaagtgtctactatcaggactctaggtagcactctttcatattttgtctttatccctaccccaggtaatttatgttgtcatagttgttcaggtctccacattgcagcatcaatgtcaggtgtaccgtgtatttcactttaaaatgttttcttttctcatctaaaaatttcattctcttgacacagctgatgttttcttggatataatgggaaatggtataattaattaacaatatgtgctttaaattaacctttattggagttcaaagtttttgactaattaatcaaaattattttctcaatgccagaatgaaagaagtctttttgtgttgaacactttccttatacttttcttctgagaaattgagaactctgattagtgtttgaggtttagcttctggtcagggcaacaaagctccccgttgggttaaaaactgactcagtatttgtgaccaggtcatagaatcagagcaaaattgtttattatatcttgcaaaataaaataaatgatagcagttgtcatatatattttaacttgttggctaaaaaagtttgagttgtttgttaaattgaagaagatattgttcatgacagtaagggaaattgtttaaagtcagacttgttatcctgaatataacaaaaaagatggctgtttggctcagtaacagaatcgtaaaaaaaaaaagattgattttaaaagatactaaagaaaacatcttattctttatgtaatcttagcatcatgtttgtaaattttaggcatagtataaatctttagaaaatctcttgagtagggccgggtgcagtggctcactcctgtaatcccagcactttgggaggccaaggcgggtggatcacctgaggtcaggagtttgagaccagcctgactgacatgctgaaaccccatctctactgaaaatacaaaattagccaggtgtggtggcgcacgcctgtagtcgcagctattcatgaggctgaggcaggagaatcgcttgaactcaggaggcggaggttgcagtgagctgagatcgtgccattgtactccagtctgggcaacaagaacgaaactccatctcaaaaaaaaaagggggggagcagcggggccaggtgtggtggcttatgcctgtcatcccagcactttgggaggccaaggcgggcgaatcacgtgaccaggagattgagaccatcctgactaacacggtgaaatcccgtctctactaaaaatacaaaaaattagccaggcatggtggcgggcgcctgtagtcccagctacttgggaggctgaagcaggagaatggtgtgaacccaggaagcagagcttgcagtgagtggagattgcaccactgcattccaacctgggcgacagagtaagactccatctcaaaaaaaaaaaaaaaaaaatctcttgagtatctttactctccttacgcttatttaaatgaatatgctctataattagtcttgtgctttttctggccaaaatataaaacactttcagaatttcttattttaattactgctggaccttaaaaaccaataggcattgcttaactgttgtctttttatgtattaataactataccttattaataatactaactgcgtaggtttttttttttttttttttttttgagacgtctcgctctgtcgcacaggctggagtgcagtggggtgatctaggctcactgcaagctccgcctcccaggttcatgccattctcgtgcctcagcctcctgagtagctgggactacaggtgcccgccaccacgcctggctaatttttttgtatttttagtagagatggggtttcaccgtgttagccaggatggtctcaatctcttggccttgtgatccgcccgccttggcctcccaaagtgctgggattacaggcgtgagcgactgcgcctggcccagtcttttttttttttttaagtagagacagggtcttgctttgttggctggtgtcaaactcctgggctcaaatgatcctcccaccttggcctccgaatgtctttatttttattacctgtaattttcttcttagagggatataacatttcttttagatggaacagattatatttacagtagattaaaaagctgctgtgttttagtcttcctttttcccctatactcgctatctaggtacatttgatcttacctagctgtccattctagtcaggagactcctgtatttgtatacatgatctcaggcttatgttctagtcctgtttttcagagtacttataggacatttctacttggattgacatctgcagcttgacttttcttatttttgtaagtgtatttgagatagactgagtgagatccaccaacttccacaatattcccacattacttccattcgttcactcatttgctcaatagaaagttaggaagtttctgctttgccaggcactgtgctagattctaggcgtaagacaagactcaatgtagtatagaaggtggacatgtaaagtgtgaagatcaaatgtgattaatgtggtaaaagaagtgcatgttttgtaatggagacccaaaagagggacttgcacccagttgccagtggttcgaaggaataaatgtgagttacacaactatatttgtaatcttttttctttttttttgtatttagacatgattttctaaaattggctgtatagtgtacgtcccctttttttttttttttttttatctgaggtggagtctcgctgtgttgcccaggctggagtgcagtggtgtgatctcagctcactgcaacttctgcctcctgggttcaagcgattctcctgcctccgcctcctgagtagctgggattacaggcgcccccccaccatgcctagctaattttttgtatttttagtagagacagggtttcaccatgttggccaggctggtctctaactcctgacctcaaataatctgcccacctcggcctcccaaagtgctgggattacaggcgtgagccactgcgcccagcctgcattcctttttaaaaaatacttggctgatcacagtggctcacccctgtaatcctagcactttgggaggccagggcaggtggatcacctgaggtcaggcgttcaagacccacctggccaacatggtgaaagcccgtctttgctaaaaacacaaaaattagccgggagtggtggtgcatgcctgtaatcccagctattcgggaggttgaggaaggagaatcgcttgaacccgggaggtggaggttgcagtgagccaagatcgcgccactgcactccagtcagtgcaacgggagtgagactccatctcaaaaaaaaaaacttacaaatgtttttctatagcaaaggacatacttccacatcatttttggctttggggttttcctatacaaggtttaagaggtcacctttgggaatttgagttgtttttggtctgagacatagtataattatagtcattattattatttggattaacataatgcatactttttttgagtaatggttaatgttgagttgagattattcacatcacatgtagctttatctctcttgttttttgagacagagtttcactcttgttgcccaggatggagtgcaatggtgcgatctcagctcacaacatcctctcccctcccgggttcaagtgattctcctgcctcagcctcccaagtagctgggattacaggcatgcgcaaccatgcctggctaattttgtatttttatagaaacgggatttctccatgttggtcaggctggtcttgaacctttgacctcaggtgatttgtccccctcggcctcccaaagtgctgggattacaggcatgagccactgtgcctggccttttttttttttttttttttttttttttttttttatgggacagagttttgctcttgttgcccaggctggagtgcagtggtgcgatctctgctcactgcaacctccgcctcctgggttcaagcaattctcctgcctcagcctactagcagctgggattatagatgtgcaccaccacacccagctaattttttgtatttttagtagagatggggtttcatcatgttggccaggctggtctcgaactcctgacctcatggtggtccacctgcctcggcctcccagagtgcagggattacaggcatgaaccaccatgcccggccgctttatatctcttaaaaatgttctgctatcaaactttttttttttttgagacagagtctcactctgtcaccaggttggagcacagtggcgcgatctcggcttactgcaacctccaccttcctggttgaagctattctcctgcctcagcctcccgagtagctggtattacaggcatgcgccaccatgcccagctaatttttgtatttttagtagagatggggtttcaccatgttggccaggatagtctcgatctcctgacctcgtgattcgcctgcctcgacctcccaaagtgctgggattacaggcgtgagctaccgcgcccagctttatcaaacttatttacaaggataattgttttgataaggagggtactatgaaatagttttatttcatagcatgtattaaccccggggccttgactccttagaatctttgaatctatgctgtagtgggcctactttttctaatttggaagttatatattttattgaatatgtatgggcttatggtattcatttgaaaaataattaggtttgcttgtttctgaatttaatttttttactaggggaattttcaaacacaccttaaagcagaatagtacaatgactctacatgtgtgttactcagctttgaacagttaacatacaactgagcaggtgtacttcttatatgaattgtagaactatatatacttcataaatatcgatatgatatatgtagtgatagaatataaacaaatttaattaaaagatctgtccaggctgggtgtggtggctcatgcctgtaatcccagcactttgggaggccaaggcgaatggatcacctgaggtcaggaggtcgagaccagcctggccagcatggtgaaaccctgtctctacaaaaaaaaaatacaaaaaattagctgggcttggtggcaggcacctgtaaccccagctacttgggaggctgaggcaggagaatctcttgaacctgggaggcggaggttgcagtgagccgaaatcgtgtcattgcactccagcctgggcgacgagagtgaaactgtctcaaaaacaaaacaaaacaaaacaaaacaaaacaaaacaaagatctgtccatactttattgtgggtacattaattatactttttacttattccatgctaattctaatattatgttttttatttatagaatattttcaccaaccacactttggatataaatgtaaggtggcttgctgtactgtattttaaacatggaattgatcgctactggagacgtgtagcacctcagtaagttccatcacttcccctattccttgagtataatccttcccaaattcaggaaggtgtaagaatacttgtttatgtaaaaggatgtgttagcgcttacttctgcagcacatatactaaaattggagcaatacagagacgattagcatggtctctgtgcaaggatgatgtggagatttgtgaagtgtttgatatttaaaaaaaatgcaaaaaaagtgtttactactgaataagtgttctatttaggtaatgacaaatcaacagctatattattgttttcttcatggttttccatttgagtgtgtgtgtgtgtgtgtgtgtgtgtgtgtgtgtgtgcgtgtgtgcgtgtgcgtgtgatgttggccctctgcttgcaaggatcatgctgagtcagtcatgttgaacaaaagccctctgttttagtcgtacccacttaaaaggctgaggcaggaggattgcttgagcacaggagtttgagatcatcctgggcgacatggagagaccccatctcaagaaaaaagaaagagaaatataaggttaggatttggaagaaaaaaaaagccattcagaaggaaatcccaggtcaactctgaaccagctaggtgttaatttctgagtcttatgcattctttctctatggtgggaatggagtagtatacatttgtaatcacattagtattcagttataactgctatgtacgtggttaacagatttagtagttaattttacatgttatataatcaatgcaaaatcattgtagacatgaccctgggatttgtttgatagaaaatatggtagtgaattttgcttaagaagtaacataatctgtgttttccagtagatggcactatagctctctaaattcttaaaagccgtaagaccttttttctcagtctgaatacttcaaaatgcatataaaacatgtccttgaataatattggaaacaacaagaatattttcaggctgcacttgggatactatattacggtttaaagcagacatgtctttttcttttttttttttttttgagacggagtctcgctctgttgcccaggctggagtgcaatggcatgatctcggcctactgcaagctctgcctcacgggttcaggccattctgcctcagcctcccgagtagctgggactacaggtgcttgccatcttgccccgctgattttttgtgtttttagtagagccagggtttcactgtgttagccaggatggtctcgatctcctgacctggtgatccgcccgccttggcctcccaaagtgctgggattgcaggtgtgagccactgtgcccggccggagtaattttttacataggattaattcataattttggagagaaatatggtaagtagtgatgagaaaatgtgcattatttgtttataggcaatggcccagcagcacttttctactgctttgtccaattgaattttacgtgtctgctaaaattcattttgttttagtggttatataaaggatacaattataaatgcttgtcttggctgggcacggtggctcacacctgtaatcccagcactttgggaggtcgaggatcacctggggtcaggagttcgagaccagcctgcccaacatggcgaaaccccacctcttctaaaaatacaaaaattagccaggtgtggtggcggatgcctgtaatcccagttgctggggagggtgacacaggagaatcacttgaacctgggaggtagaggttgccgtgagccaagaacgtgccactgcactccagcctgggcgacacagtgagactatgtctcaaaagagagagagagagacatatatatatgtatatatatataaacatacatataaatatatatataaatgattgttttgaagggaaagtaaattattaaatatttcatgttgtacttttacataatgaattagaacctagaatttagcttaaatttaaaaagttatgagataatttatacaatattaggtagttaaatcccaagctgtctcttttagtatatattgaaataaaagctggaaaggagaggatgctggagcacgagtggcagtttagtaattgaacttataaacttaagactttttaaaaagatgcttgtttctgtacttatcagtttcattttatatagatcctactcttaaccattttcacagaatgagaattaactaacaagcttgttaccattaccatatacattgcagtgtatctgggtcctaattaattaaatactgtccaatttctgcttgacatatagtttgaattcatctaatgataacatgcataaaattaaaggtggaatgttaattattattagagaattgttaaagatgtgaattttcttcaggttaatggcttgtttctttaatatgtatacaatccctgacttatggttgtttgatttgatgattttttttttacttcactatgatgcgaaaacaatatatatgtattcagtagaaactgtacttcaagtgcccatacaaccattctatttttcactttcaatacagtatttttcattttcagtacagtgttcaataaattaacatgagatatttattactttattataaaataggctttgtgttggatgcttttgcccagcagtaggcaaatgtaagtgttctgagcatgtttgaggtaagttaggctaagataatgatgttcagtaggttagatatattaaataaatttttgacttacaacattttgtatttactgtgggtttttcaggtggtaaccccatcgtaagtcagtatcatctgtattttttttgcataatctattttgatagatagtcattgtacacttttattgtagttagagttatgcaaactgctaaacctggctccttggcataaaagaaaagttcaattacaagtttaaagcaaaatattgtaggagaacacattatgtcaggggtttgatagtagaagggaactattaaagttggaaagtatagcatagtcataaaaggattagagagatcatttttaatgacctgaatgtttatcttaatcttgttttctcatttgtttattaactttgagtaagtcattaaggttttaaaatactttctttgaagtgtaatgtataacagactttaaaacagtacacaaatgaagggtgtagtttgaatgtttataatgcaaagacacctgtgtaactgccagttggaactagatagaacacttatagcactccagaaacttttacacacatgtgcattttattactatttatagtcacatgtgtgttcaactttagtagatattgttaattaattttctaggctggttgtacgaggttgcacttccacagcaacatacgagtgtttgtatttgctctgcattcttatcagcacttggtctgatctttcattttagtcattctggtgagcttagtaattttagtttgcattttctttatgaatgatgagtactttttaatgtacttattggtcattgggatatcctctattgtgaagggtctgttatttgcacatttaaaaaaattgggttatcttattgatttatgagacttttattttggatacgagtcctttgtcaaatatacgtattacaaatatcttctcctaggccaggtgcagtggctcatgcctgtaatcccagcaccttgggaggccgaggcgggcaggtcgcctgaggtcaggagttcgagaccagcctggccaacatgatgacactccatctctactaaaaatacaaaaactagctggacatggtagtgtaagcctgtactcccagctactgaacaggctgaggcaggagaatctcgaacctgggaggcagaggttgcagtgagctgagatcatgccactgtactccagcctgggcaacagagcgagactctgactgcaaaaaaaaaaaaaatcaactttgtgacttgcctttcactttcttcatgatgtcttttgatgaacagaagcccttaattttaatgaagtttaatttaattacctttctatgattatttcttttggttcataattatatatatatatttttttttaagaagacagggttttgttctgttgcccaggctagagtgcagtgatgcaatcatagctcagtgtaacctctaactcctgggctcaagcagcccttctgcctcagcctcctgagtagctgtgactacatgtgtgtgccgccagtggctaatttttaaattttttttgtagagatggggtcttgctatgttgcccaggctagtcttgaactcctgactgcaagtgaccctcccaccttggccttccaaaatgctgggatttacaggcgtgagccagtgcccccagcctatttatgaaatttttgctcaacctgtggtcatgaaaatactctgttttctactgaaagctttgttttccttttctattttaggtgtatgatctttctggaatttattcttgtacaaggtgcttatgtgaagtagggacgtgttctttctccattgcattatgattgtacccttgtttttttattcttttttttttttgagacagggtcttgctctgtcacccaggctggagtgcagtggtgccatcatggctcactgcaacctcgacttctcaggctccagtgatcctcccactgcagcctctggagtagctgggaccacaggtgcgtgccaccatgcctggctaatttttgtattttttggtagagacagggtttcgccatgttgatcagactggtctcgaactcctgagctcaagcagtccaactctcttggcctcccaaagtgctggtattacagtcaccacgcccagctaaattttgtatttttagtagagacagggttttgccatgttgtccaggctggtattgaactcctggcctcaagtgatcttcctgcctcggcctcccagagtgcagggattacaggcgtgagctactgtgtccagcctcacactttgttttctgtgtgtcttgttatttgtccccttttttttctttcttgctttactttggattacagtagtttcttcttatctgcaggtgataggttccaagactcccagtggatgcctgaaactgcagatagtcctgagtcctttatttagtatgttttttttttcagtctgataacaagatagctactagatgtctagtgggcaggtagcatgtacagcatgggtgtgcttgacaaaggaataattcatgtcccaggccagacagggcaggacagcatgagatttcatcatgctattcaggatgctacgctattcaaaacctgtgaattttccattccattcattgaatctgcttcattgatggtagattactgaaaccatggaaagtaagggaggacaactatattcaagacattttttattactcaattttactctaaaatgtttagtatgttttcattacttaagtgattataacatggacccttgatattcttgtattagtactttactttttttaagaaaactttgttttgttttgtttttagagacagggtcttgctccgttgcccaggctggaatgcagtggcacaatcataactcactgcagcctcgaactgctgggctcaagaaatcctcctgtctcagcctcctgagtacctcagactacaggtgtatgccaccatgttctgctaatgttttttagttctacttttttgtagagatgggatcttgctatgttgcccaggcttatcttgaactcctggccccaagcagtccttctatctcagcctcccaaaggattgggattacaggcatgagccacgacggctggccctttactttttctagttaatgccagaaccttgtagtaatacgttaattctgtgtaatccctcttgtctttaatgctattgttgttgtgtgctttaatttaatttaattaatttaattctgatacccagaatgaaaaaccttaaaatgaggcattaaaatttaatgtacgtttactatttaaaaaaatatttaagagacaaggacttgttctgttgctcaggctggagtgcagtggtgcaatcatagctcactgcagccttgacctcttgggctcataggatccttctgcattggcctccccaaagtgctggtattacaggcctgagccactgtgcctggccttaattttaaaattaacaacacattcatacgtatgtattcaacatgtatacagtcttatacagtagtgttctcctttcctgtccagtagctttctattttcctttctcatacgcagtcaaaattattagtattgtgtttattcttttcggagatgtttaaaatgaaagatttaagctagttgatttctgataagtcacccatcccagatattccctgattctgaatctcttgccccatagaataatctcacacagattttatgaaagaagccaatggagtggcaatatttacttgtatagatttttttttagctgtgtttttttttttcgtaggcaactatttttacatcaataaaagtgaacatcaaatatattaattacctggatttgtcttatttcctcttgcttactgtgtggtgcttcccatttattcaattgtgaaggaattttatgcttccgacttatctgatgtgccagtgtacaagtaatagaaataatcttattcatttaccagaaccaattagggacagttgtttagaaaactttttattgttaaagttcacagtagtgccaatatacaagtaatggaaataatcctttttatttacaaaaaccaatcagagacacatgtttgaaaggctttttattaaaatttacagtaatgcttacctacatttattattaggtggcattcttttgcataatcaatactttttttttttacagtgctctctcagaggaggagaaaactactctgcgtgcagggctcatcaccaacttcaatgaaccaataaaccaggttagtgagaaatgaatgctaatttttctttttatttgtactgcttttccaaactaattttatattctggcattaaaatgaaaaataaaaatatcactattacactattttcatttgtgatgtttttatctatttttaaattttgagatctatttgtagcgttgaatagttttgattagatttggttattatttaaagcccagaagtcattttaaggtatatttgtatgcttttcagctttctcattttatgagcctgtatttaaagcaaatctctctatatagtcacgtgatgcctaatgttattttggacaacagtggactgcatgtataatcgtggtcccatagggttataatggaactgaaaagttctcacccattgacatcatagctgtcctaatattgtagtgcaatgaatatattactcattagtttgtggtgatgttggtgtaaacaaacctattgcactgctgctagtctcacaaaagtatagcatatacaactattacacattctgtgatattcacacaaccacagaattgcccagtgacacatttctcagaacatatctctgttgttaagtgatacatggttatatttgtagtcttactgcacaagaattaattttaatgattataatttttagattaacttccccaccatttaaaaaaaaaaaaaacaactcagaatggcttcaggtttttttctattggttgcatccatcacattttcaattcctactattctgtggcagctagatagtaaattatgtacagctttatctttttttttatattgaggtcttctaagaataaaataagttttacttataggtacaataattcttaagttttttcaagataatacttggttatgcttgattttttaaattgagctattaaagcacaatttggcagtatttctaatacaattttattttgacctgtttaaatgatctctgttctttgctctttcttgacaaaggagctgaagcataatggagaaaaacggagttacctttaatggggcaggaggtgattagggaggggtttgtgttactgagcagtgaacaactgcctaattgttctttcagctagcatttgggaaacactgatatgtagaaatatcattatttaaatgcccaatatttggcgtttctttctacttttaggtcaggattcctaaactttgtggtcacaggatctcgttatactgctaaaattgaagaccttaaagagttatatctgttgatatttactgtattataaattaaaactgagaaacttaaaaatattcgtgtaaaaaataaaatactcatcaacatagcagttttggaaatgagcaatagtagctatttccaaaacaataaaaattagtgagaaaggtggcattggcttgcatttttagggtctggctatttaagggaagacatctaggttttcatatctgcttcttcatttactctgttgtgatacatggtggacattatatgaagaaaacctcgtttcacactgacagataattgggtaaaggaggacctcataggtcccagaaagggtcctagctctaccaggggtccatgggccacactttgagaaccactgtttaagcagtcattcagtgaaatcgtattcatttttgtcaagtgtataattaacaaggtgatttgtcaccgtgaatgcattccttatctattgccttgattccatttgtttaattttttcctttcagattgcaactcagattgcagtgctcattgcaaaagttgctagattggattgtcccagacagtggcctgaactaattcccactcttatagagtctgttaaagtccaggatgatcttcgacagcacagagcattacttaccttctatcatgttaccaagacactggcatctaaacgacttgctgctgatagaaaactattttatgatgtaagtgatttcacatagttaaatttgattatgaaaattgtgcggccgggcgtggtggcttatgcctgtaatctcagcactttgggaggccgaggcgggtggatcacgaggtcaggcctggccaatatggtgaaaccccatctctactaaaaactacaaaaattagccgggcgtggtggcacacgcctgtggttccagctactcaggaggctgaagcagaacgatcacttgaacccaggaggtggaggttgcaatgagccgtgattgtgtcactgcactccagcctgggcgacagggcgagactccgtctcaaaaaaaataaaataaaataaaaaaagaaaattgtgctacttgtaaaaaaaaatgactatagttttacttctgttgatgttttttgaaagacttaattctttctcattttaagctgggcagtgatatgaataaaaagatcacttagttgccagtgaggaggattggttgttggatacactctgaaggcaaggaggtcagtttgaggcaaaggaagtagttcggatgagatgataggtctcttgaatgaagctgtagtaaagggaacaattaggtgggcatagagttgacatttaggaggagaattgatacgtctgggtaactgaaggatgtagggcagatataggaaggagtttgacgtaagtagggagtgacagccttttatcaggttttttgcaccttttttttggttttgggttcgtgtgtgtgtgtgtgtgtgtgtgtatgttttgagacagggttttgttctgtttttggtggggtgtgtgtgtgtgtgtgtgtgtgtgtgtgtgtgtgcacgcattttgagacggggttttgttctgtcacccagggtgtagtacagtggcatgatcatagctcactacagccttgacctccttggctcaaaccatcctcctacctcagcctcacgagtagctaggactacaggtacatgccaccatgcccagatggttttttaattttttttagagatgaagtctcactatgttacccatgctttaaagtgtttttaacagtgttctttgttaccttctgtaattgtagagaaattaaaggtatataattttaagtcttattatacggtcacatgatagggctcaagaaactatttcaggtctgttctgaatcatgctgccctccaaaaaagaagagggtgacatggtgttttgtagttttgtagaaagatttttcttctttctttttcttctctaaatgtactttaaatattgctcatgcctttccctaaattagcaggcttttccttgggagcttccagagttccttttacttttgaacttagcatgtggtcttaagcagcttttcctagacctccttctgacttttgctctggtctctacttcaccatccatgattagagatgcttcattcttaaagaaagagatagcctagtcctataatgtggaaaggagtcagtgaagaatatgaagcatgtggaagagaagggatgtaatggaaggagccaagtgaagagagagttctagaagaaaatacttgtcctagtctttttatgttgcctttattctttcacaaagaattggccaactttttgttctgaggactcaattttgtcttgggctcacagtgtagagcctcttgtttgagtatggactagggaagggggtgggaaaagcagtgtataaccttgagctgtcttccatgtcaaaaacattcgttttcaatctgttatacacagactgagaggtttctgaaccacacctttggaatcctcactttgaggattatggcttggcaatttgcatttttaacaagctccccatagaatttttatatacaccaaagtttacgtcacaccacattgtgtccttttcatttttaactcaatgggtttaaatagccagtcttggctgggtgcggtggctcatgcctgtaatcccagcactttgggaggctgaggcgagtggatcatgaggtcaggagatcgagaccatcctggctaatggtgaaaccctatctctactaaaaatacaaaaaaaaaatagccgggcgtggtggcacgcgcctgtagtcccagctactcaggaggctgaggcaggagaatgacgtgaacctaggaggtggagcttgcagtgagccgagattgcaccactgcactccagcctgggtgacagagcgagactccatctcaaataaaaaataaataaataaatagccagtcttatgttcatcctaggatattgtatgtaagagaaattatttttgatagtctaaggttgtttttcaaatccttttcacttttgcttgatttctagcgaggactaaggaaatggaccgttcactcactcaagtctttctgtgaaattgtctttccttttcctctgttttgtcctcacctcaaacccttcacttctaggacttacttttttgttggggagagtctcaaaatcaattgtctagaagattcttggttacagttaactgttattaaaggctaccagtctatagaagttttaattcctatttcaactttatcaaagttcactctctaatatgttgccttacaggtatactttatatttagtcgaggcaatctccacagattgtacagataatcagggccttaagctggatagcttgtgtgagttagcttcttgcttgtttttttttgtagtatgaggctagttcttctccatatagaaagaagtatatgcttaattagcatcttgtagttactttcagtgtagtagttaccacattgtgctgacttgtaattgtcgacttatttttctcagattcactacagtgtagcttttattgctgtcatcctactgcatggtctgaaagagtacacataatgattgatgctcaataactgttaagtgaatgaacaatagaacaggagacttattcttattagatgcctgctggatttcagagtgatatagggcaaaacttcaaaaagcaggatttttgagagattagtcagagctagagatacctggaaaaaattcagattagcactttttattttggaatggagcagctgaacctggagatagggactaaagtagggactaggaagggtatcctgtctaatgcggttgaggtacaagatgtgtagttaattgaaggtagcatttgtgggaagacatcattataaagagcaattttgctggttaatacagctgtgcctattattttggtaatctgaagcatggaaaatcttccttttaataataaaggaagatgcaaagatggtcctcaagtaccaaattagtttcctacataaaaaaatgtaagggctgggctcacgcctgtagtcccagcactgggaggccgtggtgggcagatcacctgaggttgggagttcgagaccagcctgggcaacatggtgaaaccctgtctgtactaaaaatacaaaaaaaattagctgggcatggtggcgcacgcctgtaatcccagctactcaggaggctgaggcaggagaatcagttgaacccaggaggcggaggctgcagtgaaccgagattgcgccactatactccagcctagacgacagagagagagtgtctcaaaagaagaaaaaaatattaagctcatggttgagctggttgctatagcaaagtgtagtgcacagggtacacttaaaattgctacctgcggctcagtgtgcctcaacaattgttataacctttcctcctctgtgttaaaataagttcttttgaggggtgacaaattacgaaatcagcagttgagagcaaattgttttgcagtaacaaaattgagcttgatttgacacaaaaaggaattcttttttttttttgagagagagagaggtgctgtcttggctcactacaacctttgcttcctagcttcaagcaattcttgttccttagcctcctgagtagctaggattacagacatgcgccaccatgcccagctaatttttgtatttttagtagagatagggtttcgtcatgttgcccaggttggcctcaaactcctagcctcaagcgatccacctgtctcagcctcccaaagtgctgggattacaggcgtgtaccactgtgcctggccaggaattcattttcttttttttgagaaggggtctcgctttgttgcccagactggagtgcaggtgcacgaccttggctcactgtaacctccacctcccaggttcagcacctcctagtagctgggtttacaggtgcacgtcaccatgcctggctaatttttgtgtttttggtagagatggggttttgccatgttggccaggctggtctccaactcctgacctcaggtgatccactctcccataatgctgggatcacaggcgtgagccaccatgctcggccaggaattcattttctgtaaaacagtatgcctttacatataaacctaaatataataaaatggacattaaccactgttaaaatccaaagtcactaaaaataaggaaatttaaggtacagggagcaattgtaatgaagttggaagtatgttaaagtaaataatgtccccaaatcacgatgtgtaacacacaaaagtatatgctgcatagtgcagtggcacaaacataggtgtctacaaccttgacctcctaggctcaagcaatcctctcacctcagcctcccaagtagctgggaccacaggcacgtacgacgatgcccggcctggatattagggattaatcttaaatttttacttctgtcttaacagtcactcaacagttattgaatgctgactgtgtacaagagatatgtacaatattgtgggagacagaagacagaattagtagtctcttgacagttcatgtggaagaacgcaacccccctatttagtaagctattaaaatctgatgtggggccgggtgcggtggctcacgcctgtaatcctggcactttaggaggctgaggcgggtggatcatgaggtcaggagttcaagaccagcctggccaacatggtgaaaccccgtctgtactaaaaatacaaaaattagccgggtgcctgtaatcccacctactcgggagcctgaggcaggacaattgcttcaacctgggaggcggaggttgcagtgagccgagatcacgccactgcactgtagcctgggcaacagagcaagactctgtctctggggtgggggggaaaatatctgccatggaagaaaacaaaactatattgcattgttattatggtcatggctaaaacttagctgaattttaaaagctgaaaggtttatgatgaataatgttctcattaggctgggcatggtgactcatgcctgtaatcccagcactttggaaagctgaggtgggaggatccttggggccaggagtttgagactagtctaggcaacatagtgagatcctacctctacaaaaaataaaaaaattaggcatggtggtgtatgtatgtcattctggttacttgggaggctgaggcggcaggatcacttaagcctaggagtttgaggctgtagtgatatatgattgtactagccttgaagactgagttagaccatgtgtctaaaacataataataatagtgtttctgctaaacaacacatgaattatttggatggtaagggtaaaagaatgctgtgtggcaaggtgaagtcaagttacaatacttcagaaggtcatcgtgatgaattactatattttctacacaaaggagaactgcatagctgctttgagatgggttggttagtgtaagatagatcactcaccctcatagcagagacttgcagacttactccttgtcagcttaagacttcatgatgtggtccttaggggaaatttccaaataattgaaattatgaatgctaaatttgagaatgccaaggcgccacttccatggtgtagctccagcctgtaagatatttacagtgctgtaaaatttatttaaaagataaatgccggccgggcgcggtggctcacgcctgtaatcccagccctttgggaggccgaggagggcggatcacgaggtcaggagatcgagaccatcctggctaacacggtgaaaccctgtctctactaaaaatacaaaaattagctgggcgtggtggtgggcgcctgtagtcccagctactcgggaggctgaggcaggagaatggcgtgaatcggggaggcggagcttgcagtgagctgagatcgcgccactgcactccagcctgggcgacagagcgagactctgtctcaaaaaaaaaaaaaaaaaaagataaatgcctttgtgagcaagtcatcaaataggtttaatagatcttattttcacttttgttttgttgattttaattgtacattaaatgccatgttgattctgtttcttatctcttgctctgtgtaattttatagtggctttttttccccctggggattgagtcttgctgtgtcacccaggctggagtgcagtggtgcaatctcagctcactgcaacttctacctgccaggtttaagtgattgtcctgcctcagcctcctgagtagctgggattacaggtgcatgccgctatgcccggctaatttttgtacttttagtagggacagggttttgccacattggccaggctggtctcaaacttctgacctcaaatgatctgcccgccttgacctcccgaagtgttaggattacaggcatgagccactgcgccccgcctatattggctttttaagtgcattatttaaagagtgactctcttaaagggtcatttgtgctgtgaacctgtggggatttgagcctgtgcatgtgtgtgtctaggcttatattagtatcaaggtgaaaaagaactttttggtgggaagttactttagtggaggagactcaaggtgacagacttggttcaaaagaaaagagctgtgcgctgaacagaagagattttgaatatagcatggtgcgtactcttcctgtattgattcataaagcctcttgtctgagtcctagttaagggcctggaataagaatgaaaattccaaaactatcccccaagtatctaaaagttgcttttgaaacagtgctgatttataccttacccatccatctatttatctgacaaatatttggattcttactctatgcaatcacttcacgggatgcctgagatagagctgtggaaaggtaagggcccacccagggagtagagtagttttactcttttttttttgttcctcctccttactgagttgatattttggatacatgagaacagtgtgtaggcattaagtggctgaagagaggcgtaaggctgttgctaggataagagacttagggaactgaaagatgggccacagtgtccctcctgggcctgagctatatcactggcaggtttgaaaacaaaatgaaaattagattttactttaaaaagcatgtaagtaacaaatgctataggtctttaggaatgtccttcattgacattccttcattgacatttttgagactgtctcaaaaataaataaataaataaataaataaatattagttgagagacatcagcagtttggctggaaattgcttttgagatagatcttgtacctactaaagcttctggcttgatacattttggtaatttaatatatatttatgtcataggtaagtggaagcgaatttatacttaagcctttttttttttgagacggagtcttgctctgttacccaggctggagtgcagtggcgcaatcttggttcactgcaatctctgcctcccgggttcaagcagttcttctgcctcagcctcccaagtagctgggactacaggcgtgtgccaccatgcctggttaattttgtatttttagtagaggcaggggtttcaccatattggccaggctggtcacgaactcctgagcttatggtctgccagccttggcctcccaaagtgctgggattacaggcctgagccacctcacctggcctacttaagccttattaacaaaaaaacggattattactaaaataacctttttagttattgttaagaatacaggtgtttttaaaattgaaaatacattttaaaaacatggaaaagtaaagaaaaatattaactgccatgtaactattacctagatctaatagtcaacattttgctgtttttgctttctgactttttttgagctattttaaaggaatttaaatatttttttaactaaattcttcaacatttatctgtgaaaagatagatttattttttaagtatttaacttttatcatcctgaagaagtaaaaagtaatttaatatcatttaatacttttatccagttttctagattgttctcaaacacatttttacaagtggcttgagccagaaaaatgaataaggtgcatttgacatgtctttacaaatcttttaattttgaatagtattgacttcctccctctcccccttaaaaatgccattgacttgttaaaaaaaaactagattagttgtcttgtaggatgctctgcctcctacatttgttgattaatataccttgctgattaggttcaggctaagcagattttggcatctatagcgaatattttttgtctcagtattcgtgatgaattatttaatacatgaactttgatgtaaaacttttttggtgctaatgtttcttaagggaaaattatgaagacaacaattctgaggctaaaaaagtttaagaatatttgaaatgctaaaatacttagtgtgtaatggttagcttttgatactttggagtcaaggctttgggcttctcagttacagccactaaacagtcagtaggtggcactgtttcttctggtttagaaatagaaaatgttaagtatttgggggtttcatgaactagtacctaacatgtttcattaaacagtttatttgcatattgtctcactgaatattccttcccccctccacatttttagaatcacatgtagaaaaaaatatttttatttctcctacttggttgctttattacttactcttttccagctgagccttctgtaagcatgtatcagttggtgttttctggagcagataggaggtatacagggcttgtgaatatattagttggcaatggttacttcctgtggtttcttctttattcctgttgtttcttctttctttatctctctccctgcttttactgaaaggtaaagggctgaaaggtgttaaagaaaaacttttcaaacacttgtaaaggatgataagacagactttattcagatgggactactgcagtggggttttgcagtaggggagagaaattgtgctcaactctgaatacaaggaaaagtgggaatttattgccaaggagcagggatggaaagggtgggaggttggggggatggggggttgagaggatggaaaattactaaaaagaatcatcagggatgagagggggttcctggccaaactgacctaataggattcttgccgaaagcaacctgatgagatattgatgatatcaatgtcaaggataggggattctggctaaaccaacatagcaagatttcttgctaaaattgggtgacgcaaagaacagacattttggaagtccaaaagtagaagcctagttaggacaaagattcagaaaagcctcactaaagtttggttaaggagaggctgtttgtcgaaagatagtgccgttgcttcttcattccagccatttgtgtagagacctttcgtaggctagctagagagtcttgaattagaactttaagagatgcctgatgtccttgactattaggtttttgtttttaaatttccatactattgtttctttttaaatttctgtctcaaatgctatatgccttcatttagcaatacctgctgtgtgccaggcatcttatgtgcttttcgtatctgtagtccttaaagtacaggttaagtacttcttatctgcaatgcttgggaacagaaatgtttcagatttttttcagattttgtaatatttacattatacttacgttgaacatctcaaatgtgaaaatctgaaaattgaaacactctagtgagcatttcccttgagcatcgtgctggtactcaaagttaaggattttgaagcaaatacttcgggttttcagatttgagatattttagcctgtagttctctcatattaagtattactttctagggacagaaagagggaagaattaattaatagatcgagatctaactttgccattaatatctataaatcttacttatttttgtgagaagtagagatgaaaatttcaaaattgaaagttgcttaaggtgaaatagagtggaattactgaattactgaactttctaacacatttttagagtcaaatgataaatagaaaaggagatgattttatggaacagaatagaatttttttttaatgactttgagtccaccatgtttaaatgcttccttttattcagtcttgtcacagtaacaacctttggtatagtattcagagatgttctttggtactttttattctttgttttgtaggtgagtggggaggattttatgttgaatatgtctactgtgatttgcattgtgtgtatgcaagtggtagaattctgcaaagagatattctggtaacagaagcaatgcctgaaaaaaaaaaaagaacagttttgcccctttgctaccattattaaaaaaaatactgtttttattttttacagacagggttttgtctcccaagctagagttcaatggtacactcatagctcactgcaacctcaagctcctgggctcaagcaatcctcctgtctcagcctcctgagtagctgggattacaggcatgagccactatgcccggccactataaaatacttcagaaaaatctgacacaatttcaaaatatgtggttatgtagggtggcaaattctcccttaatgttttctttcttgagcctgtgcctgttttatttggctgactcttttttttttctttttcaagcttaatcttacttttaattgaggaactaggggatagttactgtcaccatccttttttttttttcagtgagtctggcatgtagtggtagtggggggtattgagaattagataaaaggtctatggctcttacgactagtgaatgggactagttctaatttacacacatatattacttatatgtatatgaatatatgtgtatatataagaaaaacattcaatttatttttagagacagtgtctcactcttgtcctggctggagtgctgtggtgtgatcatagctcactgcagccctgaactcctgggttcaaatgatcctcccacctcagccttgcaagtagccgagattacaggcatgtgccaccatgtccagctaatttgttaagaaacattttgtagaaaaagggtctcactttgttgcctaggtgggtcttcaactccttacctcaagtgatcctcttgccttagcctcccaaagtgctaggattacagttgtgagataccatgcccagggtgtactttatattttgatatcaaaaggtttaaacagggccaggcatggtagcttatgcctgtaatcccagcactttgggaggctgaggcaggaggatcacttgagcccaggagtttgagaccaggctgggcaacacagtgagatcctatctctacaaaaaataaaaataaatatataaattaacctggtgtggtgcatccctgtagtcccagctactcaggaggttgaggtgaggggattgcttgagcccaggagattgaggctgcagtgagccgtgattgcgccactgcactctagcctgggcaacagagtgagactctttgtctcaaaaaaaaaaaaaagtttaaacagaacttagttataccaaaaatgtttatctcttttatacagtgcagttaattgttagttattgtattaagagacattagagcatagaagataatatatactgatatactgaacataccttttacttctgtatttttttttttttttaatgacagagtctcgctctgttacgcaggctggagagcagtggggtgatctcagctcagtgcaacctccacctcctgggttcaagcatttctcctgccttagcttcccgagtagctgggattacaggcacgtgccaccacgcccagctaatttttgtatttgtaatagagacggcgtttcgctgtgttggccaggctggtctcgaactcctgacctcaggtgatccacctgcctcggtcccccagagtgctgggattacaggcgtgagccaccgcatctggtctatgtgtttgtttttggtggtttttttttttttttttttttttttgagatgcagtcttgctctgtcgccaggctggagtgcagtggcgagatctctgctcactgcaacttctgcctcccggattctcccgcctcagcctcccgagtagctgggactacagacgtgtaccaccatgcccaactaatttttgtgtttttagtagagacagtgtttcacgatgttggccaggatggtctcgatcttttgaccttgtgatcctcctgccttggcctcccaaagtgctgggattacaggtgtgagccactgtgcccagctggttattttttattgttgttgttttcttcgtttttttttgtttgtttttgaggcagggtctcactttgtcacccagattggagtgcagtggtgtgatctcggctcactgcagcctcccttcctgggctcaaggcatcctggcatcctcccgccatagctccccaagtagctggaagtataggcgcaccccaccatgcctggttaattttttttgtactttttatagagaccgtgtttcgccatgttgcacaggctggtctcctgaccccaggtgatcatctgcctctgcctcccaaagcactgacattacaggcatgagccatcgcgcctggtctgagcataccttttaaatgagttcaagtgacttcagataatggcgacacaaaaaatttcaatataaagtccttttaaacaattttaatctatacagacattaatgttaacaggtagttttaaggagatgcaaagaaaagctataaaattactcaaaatgtcgttttgttgtaagcaagatatcggtttaaagtataatagttttttggtcttatttgaaatttggatatggcaccctttgagtttttgttttcttacaaaaagacacagtacaaaacggatctacaaattatagccaaggctatagatttcatttttggggagttgaaatatttgctacaataagaaattttactgtagtttaaaatttaattttaggtgttttgtagaattcttacctcttctgcgtctaaatccttctgttcgtattctttcactttcttctgacaaaatattttaatgatgtatgtgttgggaaagcttagggtgttgtatattacacagtaagtacaataaaatttaggatgatagatattttttcaattctggatatgtatttcagtcttttattttccaaaaggacttactaagaaaaatacgaattcattttatggtttactgaagttataagtaaagcatgcaagtttgttgaaataaagcttttttcccactttttaaatattatttcccttctatcagagtgaatgtttgcttctctgctataatactacttcatgggaaaatgtcactttcaaactctttttatgatacagtggtttgtgttgtaacactatgaattgagagaatgatcactaaagtattttggctgtaataaaacattaggattcaacagtttgattttactctttgaaatattgcatatatacttgagaatatgctaaagtagcttaatgagtagtcattgtacctgttgtgaagtatacacacaagatgaggaagggccaaggcatccctgactgatttagtttgtaaagatacagtgaaccacttttagattcaggcagttcattatttaatttggatagagaaaggaagcacctacaggtgccagcttcctgtgggccttgtctcatacaccagaaagaatggcacagaaacaataggagatagatgactctaatgtgacttgtgggatgcctaattgctgagaagccaattctagaccatatagctcagtagttttatattctgcggtgtgttttaaggggagtagggcagaaaaccttatacctcttcagaacctgagaggtgatgagaaactgtctcatgatagcctaatggtgcagataaagagacgagtaggagatggtcttgtaagtttcttacaagccttctatcctcttgtgttctgggaggatcacaggatgttttgccaagactcagattaactgaggttcaagcctttgctaagcttgtgtgttctgtgtggatacatgcaaagttgccctgggggatatggtgaagccgttttaatggcacattaaaaatacttaaactaacaaatggaaatttgattttttcatagaaacatgattttaacaggattgcagctctggtttctgatgcctgttctataaatagcatttaattagtcaacatgagatgcttatatcttgagtaagaaaaagcattccgaagtatgctgatgataactagtcataaatacttttatctaattttaatttaaagtaaatagccatgtagactcagctggattgctccgagaactcctggaaaaaattgaagatgtcactggaagatgttctgcctcaaagtgtgaggcagagattaactacattcttaatgtgagggtcaggtttttaaatatcagcacactttagtaaagcaactgagaaaccatgtggtttgtatgttcctggcattaaatgtgcaaaagccatatgcgtagaactggcagaacacggaaggctttctcctttgtatatcttcatatattgatttatctgacatactcagtgacagtccataaatcattgttttaaactgagattgcaacctattagtggagataaaaagaataaaaatagaatatataagactgcaatgcaggcatttgatgaggtattaatattgttttaagaaactagtattttaggggtgtgtctgtgtgtgtttagcagccagtgtaagctgtatgtgttactgtgcattgtggctaaaaaagtatgaaacattgccacaaatattctttgactatttcagatctctcagaaaatgtgtgcttagttgtaaaactaaaatatattactttgtagttctaatgtattactgaaatgtataatacactatgaataaatttgttgccttttctttgcagttagcttctggaatttataattttgcctgctctctgtggaatcaccacacagacacattcctgcaagaagtttcttctggcaatgaagctgcaattttgagttcactagaacgaacactgctatcattgaaaggtactattaagcttgatatgttcatttttgaaatgagatacctcagaacagtcaccaaatagttcctttagacgggttttctgttcccagtttcactggaaaaataagaggtttatttctccctgaaagataagggcttatttatagttttgtggcagtagctcttcctctaccccttctgatttttgaaagcacatataataagttgaagtggatagttagattcacattattgcggcctcatggctctgaatatatttttttcaaatgcttctagtttttgtttctactttatttttctcattctggacccctacacttatccttgtcatgccaactttcctaaaattttttctccaggctggaatgagcactgtctttcatccctcctttccctggaaaggcaagcctccatctttcatcttagtgcctcaggctcacttggatttcagaaggtgctttataggatgccatcttggcctgtgtcttggtatatgttgcttgcaggcattcccttagcataaatctccatctcactttccttgagctgtttatcttgatgaatgtattcctaggttccttttcttctaaaatatactcatttgtcttattctcttacttttctagtccctctcttctttctgttctggttgctaagacttttttagttctttttgtttgtttgttttttgtttttttggacagacagggtcttgctctgtctcccaggttgaagtgcagtggcataatcatagctcactacaaccttgaactcctgggctcaagtgatcctctcactgcagcttcctgagtaactgggactacaggcacatgccactgcaccaggctgatttttacatctttctggtcttgaactcctagctttaagtgatcctcctgccttgacctcccaaagtgataggattacagggatgagcactgtgcctggcctagtttgtttttcttagtttgatctcaggcagcatcagtttctctcttactctcagtttgcattctttttagttttacctataagttcttttatcgtactcattctggtaccttggaatcccatcagtcttggcatcgccttaatacatcacttactttcaccagacaatggatgcacaaatcccaaactgtcagcacattttgtgaaacctgtgaagaaatgtttgaatgattttaaaggactgttgaaaaataaaatccattgtagaagtagttataaaagtgagtggagatggttttgttaacattcttgaggaagaaattacagacattggagagaaatgtttgctcagaaagaattacagaaactgatataaggctgtgtatacaaagctgtgtgtatagtagtatatttaatgattaagaaattttcaagatttcttttgattatagggttttcttaccttattgatttcaaagcctaactcctgacgaaaaagatgtagctttactatatctttgcctgccttaagctttttaatacctcaccatctgaaggtcttagattcacattaactttttagagatatcctgccctggaaaattttgttctgtaactatacatttctgttctgaaatgaagaaatactccaaactacaatttttgttttgtgtaatctctatctgaatttacacttacgtgcatttagtatcttttagacatggatgcattcattatttcattcgacaaatctatagatccttggcactggggagacagacttaataaaatgatcccacaaatatatttaaagtgacacctgtgacagaggctttatgatattatgataactgataatatgatcagaaaaatttccctgagaaagtgatctttgagctgtaatcttaaaggataagtggaagttaactaggtgatgaagggagaaggaaaggatcctctcaggtattgtggctcaaggtcttgtggtgagaaagcatatccagaataagggattcaatttgaattctgttttctccttacgaaaacgaggaaaacttactgcatcgttatgatgcagcaacttctgagttgcatatgatgatttcaaactgaaggtcttatagacagctacattctaaacttaattttaatacattgctttagacttacaaaccgaaggtctagtagacagctacattctaaacctaaatttaatccattgcctttagacctcataaacactatttaaggtataattctttagtactgtaatagcaatccttatttaatgaacttttaattttgtctcttacactgtcaccatccttattgttgctaaataattgctatattttacatataccatggaatccatcaataaccctataaagtaggatttgttaaccgcattttacagatgaggaaactgagatgagaaatgttgcccaaagtagtattacaactgtagacaatagatcaaggatttaaatctagctctgccttcaaatctgttatcctgcttatctctctgtgtacactagtttgtcagtgttactcatgaaatgtcacagttgagcagtgtagttgattccaaatttggaaatagggtttaatttttatatcgtttttaggagataattgtatttccattaatatagccgaaaactgaatgaaggtttttggttaccgttgagtcatagcttaaagtttgtgaaatagaaatgactttctcaatttcagttactgcaggtaagaagtactaacaattatataaattacactaaattttggaatccagttttagaaacatgagtagtaacaataagtcagaagaacactgcatttgtgagttagaagaactagactttagttccatttttcccactaatttcccagccaaatgaccaggagttaactttccaacccagattaacctccaagcttgattaagttttgcaattctgaatctttcttgtgattgtaattttagtaggataaaataagattcaagtaaagcttgcttttgcttttcagtgctgcgtaagttaactgttaatggatttgtggaacctcataagaatatggaggtgatggtaagtgatcgaagaaatttgctgtgactttgggaaagtggtattttcctgaatgtttgaaagagtgctctttttatttggcattcaattagaagagtttttattaagtgaccatctagttttttaccattctgacttttagacttctggtctgttttcactacatcaaagtggctgttgtgtgaaggagaggaaataggcctaggatatttctcaaggatgccatggtacattgagagtgttaatttgaatttaaattaaaatgaactcctgtgaatttgaatgctattataacattaccaggtacattgtaaatagttttttatatacttaatattttcctttgtttttatgtatttaaaataaatttgtttttttctgtctgatcattacattaatacatgctgttcacaatcaattaaaaaaataaatatataagagaaaaaccttgtcaataaatcgatcataagttgtgatatatattcattgtctgtagatagccatcttctttttttttttttttttttttttttttttgagacagagtctcgctctgtcacccaggctggagtgcagtggtgcagtcttgggtctctgcaacctctgcctcctgggttcaagcagttctcctgcctcagcctcccaagtcactgggattacaggcatgcaccaccacgcccagctaatttttgtatttttagtagagacgaagttttaccatttctgccaggctggtcttgaactcctggcctcaagtgatctgccctttttggcttccgaaagtgctgggattacaggcttggccgtgcttggcctagttgcatttcttttttttttttttaaaataaatgaaatggcattttattatacttagatttgtgttagaattcacagtaagtttagctcaggtaaaacattgctttttgtaagtcgctttgggggttgctcaggagttgaggaaaaaacaaatctaattgggtctttgggtctcccctactagatttgaccagagccattaaaaaaaatagtattttttgtatattgaggtttgattgaagtaattgttctattgttaaatgagtttaaaacccataatatacatcatcataatgtgatggttatttcattttatgaaaattgacatgcttttttttaagttaaaaatttcaggaaaagaaactaaaaaatcattcataatcttactcttcagagatactgctaaagtttataaatatccttgaagacattttatgcatattattctggatagaccttctcactcaatttgatacaaatgggatcatatttacatgtcgtttccttactttttaaaaacaaactcagcatattacatatatttttccattgtcagttatattgttacatgttatttttaaaatgattgtatggtacattcatatgattagtgtcagtagactaattttttaaaaaagagatattaatataggattcttataatgtacttacacaattgtctgttgacggacatacaggttctcagtttttcatttttgataaaagatatggactgatcatttgggtaactgttatgtggttttctaatctctttaggataaattcctagaattgaaaatgttgggttaagcatatgcccctccacagtattgatacatattaccaaattgctgaaagataatgtcaagcctcgatttaaatccagatacatttcgattgccatgctgccaaaaaagattttcgagaaaccaacttgacaactccttttcaattccctaactagaatgtataaattccatgaagggaggggctttgttttattcgctgtgactcggagcttggaacagtcttttctgtatagtaaatgctcaatagttgtttgtttaatgaataaatcctttatggtagaagcaatatgtcaaagtctcaggaattatatgcaatattactctcattatattaaccagaatattatgtttatctttttttaagtgaaaatgaattgatttgatttatattcctataaggtgaaatagtagtttgcactggctgtcatcgatattttgtgagctttggctttcccttgagagttttctggttgcataaatcacatgtcaacctttactcagttataaatgccttattgtagcaattaagtacatcagtcaattagaggataaaatcttaacaaattaaagacaacgtttcaaataatataaaaatcttttttttttttttttttgagacagtctcactctgtcgcgcaggctggagtgcaatggcgtgatctcggctcactgcaacctctgcctcccaaggtcaagcgattctcctgcctcagcctcttgagtagctggggttacaggtgcctgccaccatgcccagctaagtttttgtatttttggtagagacggggtttcacaatgttggccaggctggtctcgaactcctgacctcagttgatccacccgcctcggcctcccaaagttctgggattacaggcgtgagccaccacacttggcttaaaaatcttaaaaataacagagagcttaaaagatgctaaagaaaagatatatgacagtggtgagattctgggccctgaaggcaggcacagtgataatgatggcttttaaaatcgatggcctttataattttctactttctttggagaataggactattggacccttttataaagttaacagacttatgggatcttggtgacctaattcttttataattgaaaccttttgctgtttcattgttctgttgttacttttcattatcaattattgtcaactatgctttaaaaagacagaaatagtatgaaaatggaagatgatgcagtagtgaagttgtcatcctgaagttttcttctttttttaaattgtgttgccaattaatttaacccaattaaattgtgttaattgtatttcatcacgtttccagaaggtataaaggaagactggaaacattgattttactctgcttttagcttttatttaacagttgagaattcagaattttacattttctgcttgaaatgacagagagaaggaaggaaattgacagaggaagaggtttactagttttttgatgagtcagtggatggatattgagagtctgagagcagtactcttgactctaatgttaacaatgaaattgtctaaggaaaatctcagacactaagtcttcagataatggtatcctagttgaattttctcaaactcaagaattgatcaatgaacaatatatttgatagagaggaattgtggcattctagagttaattattttccaggaaagccatcatcatccagtatttcatgacaaatgagactacctcatttgctaattgagtgtgtgacatcttttatgatgtttatacaccaacatttattgatacaaagatgtcttctatgcttaaattcttattaaaatttttaagtttttttcactatttctttatatttattcctgttaattattcaaaacatatcttagaatatgttttcaaaaaaagggtccattagacctagctggtatatgttgatgcctatctaatactagtatctgaggaccaatgtgtcatatacttgaagttaagaactgtggtgtaaataattggtaccatgtgttcattttttgaatacttattattgccaaacgatgtttcaggattctggataaagcagtaaacagagcaaagttctggctctcaaggagcttatattctaatgggaggagccacataataaatggacaagtgcagtatttcaagggatttaaagcctgtgaagaaaaattaaagcagtaaggagaatagagagtgtttagtgaaacaggatgcttagaaagtaattttttattcattgcaaagtgatttatgtaactaaatgagatattgaagggatgaaatactatagttattttcctgtggacgacttgtttataatagtgaactgttttttgcttaactaattttaacttatttttcttcggctaatttttttaagtgatgtgatagatttgttttggtatccctgaaaaagatacaaggtaaatgtttataacaataaattgagatatttaaaataatattcttttctagggttttttacatggaatatttgaacgtctaaaacagtttctggaatgcagtaagtactttcgttgcagtcctttttactgtagaatttttattcattagtagcttattcattcattaatagctaggattaatgagggattaatagatgcttattcattaatagcttctgttgcacacttataaatctagagaaagtgtcttgtccaattgctccctgagtgagcacttgatagctgcagagatcctatatgtagctaaaatgagtattttgtatcaactttctgaagttagaagcttagcttttgcctcatatacagaagtccctccttggactacgaaccaagacctacagcggatgcctgaaaccacagatagtaccaaaccctttgtgtactatgcttttttgagctagtatccaaaatggctactaagtgattaacaggcaggtagtgtatatagctggtatttgctggacaaagggaggattctcgtctggggcaggacggagtgggtcagcttgagatttatctccatactcagaatggtgcacaattgaaaacttaagaattgtttatttctggaattttatatttaatatttttggattgtgattgactgcaggcacctgatactgaggaaagcaaaactaagaggggactactgtactggtaatgagtgtagaggaatttgccttgttgccaggctggtctcaaactcctgggctaaagcgatccgcccacctttgtctcccaaagtgttggaattgcagatatgagccaccttgtctggccaaaatagatttaaaaaaaaagatttccctgaggccaggcgtggtgactcaacgcctgtaaccccagcactttgggaggccgaggcgagtgagtcgcttgagcccaggagttggagaccagcctgggcaacatgacgaaaccctgtctctacaaaaaatattaaaaagttagccaggcatgatggtgtgtgcctgtagtcccagttactcaggacggattgattgagcctgagaggttgaggctgcagtgagcagtgatctcatcactacacttcaacctgggtgacagaacaaaccccatctcaagaaaaaaaaattctattttgtgttcattcctctttctgtatttctactgcagctacccctttccaggcagatgtccacaacagtcatatgtttaacaaatattgtctatagactatatgccaaatcctgtttagacttcttgtagactcttttcgcttttagtatttgttgcatatcactgtgatataactttctgtaactggcagtttgattttgtaaatcccttgttcattaacctccactggcttatctttagcatcctttgttattcactaccccatgtgagagactatagcatttatatttgtgttgtattttactggtggtctgtttgttatcttcttcttccatgtgattgtaagcacctttatttggacatacacatgtgtgcacacacaagtgtgtgtttgtgtgtttggggatttgctctcctgagaagatatcttagtctactcacttttaaggagctactgattgttttatgttagtcagtttcaatttagtaaaacattgttgagcctgtgggcagacactgtcctgggtactatgcatgcaaagatgaataagaatgttcatattgtgtagttactatgttttctaaaaatagtcatttttctctggccatccttgtgggcgtagcagaaggaagaataaaagcccttccaggagagaataagacaaattaacaaacagaatatgaagagtattattagagagcagattagctgatgagctggtggacattgttctgaatgtacaaaaaaaaatcgccagggaaattatcagaataaatttgtcagaagatataggaaaaatgataatgagtgtgttactccttgactactttattttacacatgtatgttgcttgaaaaatacttcaactgtgacatttagtttttaaatgttatccatgattcattgctaaaacgactattcttttactataaaagtgagttcagttcatatattagggttaattttatataatatggcacagagggctactgtgtctgttactcagtgtaaatcttggtattgctttttaaataatgaattcataatgcaaaatatgcaaaaataaaaccagcaatattatttttgtaaaaattttgatgttgtcttggttgtgaacttattaacttctaatatttgaaatgtatttttaacaggtagaagtataggtacagataatgtgtgtagagatagactggaaaagaccatcattctttttactaaagtggtaagttttttaaaaacttgttttctcaaatataatacacatattcagatttacaaaggaaaatgatatttttataaccatacattttcactttagtgtaaggaaacctatgttctgactccttataggaaagctaaaaattgcttttatatgtactttagaatgcatataataattaaatttacataccatgtgtcatagtgtaagtcaccttggtacatgaaaaataaattctaataaatattagagtatttgattcctctaaagctcattattctttgacccactggagaaagtggagataaagaagatagcagtgcagttcagctagaagtagatcaaatgtagcagacaggaagtcagtatattcagaatgaccatcagactatcttcgtccatactaagcatcttttgagtggaattatagggggtgcgctgtggtaggcagtgtgtataattacattttataaaacattaacttttaatgatattttggtcttgaaggattgggagaagtgcaaataattgggttacagcagttagaaagacctagcttggggactgcttgcactaaaataggtacttgaagacaggtgggaacaactaaatctgtaatctatttccctttttaattaaagattcaataatagggtaggggttgcttattccctgggaggggagtaaaggagcagaaatgagctgttttttatctttgtgttttaggtagtaattacctttagtttcagttgtcttcgtttctcttgttccaagtagcctcaacaacagaagttcacctaatcttccaagatacattataaaattgactaagattctctgtttaaaaaaacacaaagcaaagtaaaacaggatgatgtgcttagtcaaagaggactatacagtatatatcactgacacttgcctgcggctctgctgcctcacagtccctactcactatatcagttacataagtaaaatttaaaaagcattatttagatgatctgttttagaaaacacatttatttagctgtgagatttttcagttctttcaactctttcttaaggtaatgacatggatagatggtatctgtaatttattctacttaacatgttggaagcaatttcatttatgaaattcatatttatgatctctaagactttattaaagctttttaaattagaacatttcaaaatagaataaagttactataaatagaattgagtaactttgagtcttcatgacatcatcactcagcaacaattatcaacatatggccacagtcagtcttactttgtctgtgtgctgctttcccctcccacccttgctggttattttaaatcgaatcccagatattatctagtattacctgtaaatatttgagtgcgtgtctttaagtggtagggttgttttgttttgtgtgtgtgtattttctgagatggggtctgactctgtcacccacgctggagtgcagtggtgtgatcttgactcactgcagcctctgccttgtgggctcaagtgatccttccacctcagcctcctaagtagctgggaccagaggcacatgccaccacgcccagctaaatttttgtatttttggtagagatagggttttgccatgttgcccaggctggtctcgaacttctgggctcaagtgatccacccactgccacctcccaaagtgctgggattacaggcgtgagccaccacacctggcctgttttattttttttaaataggatcttaacacaattttatatttaaaaaatactgatagcttcttaatatcatttaaatatctagtcagattttagatttctctgattgtgtcatgaatttttctagtttgtttgaatcaggattcaacttgcatcagctccctttccatctgttccaaagttatttccttgctgttatttcttgaggtaacaggtaattttctgtactttttcatgttttgaatttgattgcttgtgtcgccacatgctttttgttaacatgttctttagtcttcacacttctcctcccatatttcttataagttggtagttagatgtagaggtttagtcactttcaggcttttttgtgggggatagggcagggatggcaagaatacattataagtattgttctgtattgtatgacgtgcacacatgcaatgtgacacacaatgtctggttgtctctttttctcttttttaaattatactttaagttctagggtacatgtgcacaatgtgcagatttgttacatatgtataattgtgccatgttgattggctgcaccaattaacttgttatttgcattaggtatttctcctaatgctatccctcccccattccaccaccccacggcaggccccggtgtgtgatgttccccaccatgtgtccaagtgttctcattgttcgattcccacctatgagtgagaatgtgcggtgtttggttttccgtccttgcgatagtatgctcagaatgatggtttccagcttcatccatgtccctacaaaaggacgtgaactcatccttttttatggctgcatagtattgcatggtgtatatgtgccacattttcttaatccagtctatcgttgatggacatttgggttggttccaagtctttgctattgtgaatagcgccacaataaacatacgtgtgcctgtgtctttatagtagcatgatttataatcctttgggtatataaccagtaatgggatggctgggtcaaatggtatttctagttctagatccttgaggaatcgccacactgtcttccacaatggttgaaccagtttacagtcccaccaacagtgtaaaagcattcctatttctccacatcctctccagcacctgttgtttcctgactttttaatggtcgccattctaactggtgtgagatggtatctcattgtggttttgatttgcatctctctgatagccagtgatgatgagcattttttcatgtgtctgctggctgcataaatgtcttcttttgagaagcgtctgttcatgtcctttgcccactttttgatagggttgtttgattttttcttgtgattttgtttaacttctttgtagattctggatattagccctttgtcagatgagtagattgcaaaaattttctcccattctgtaggttgcctattcactctcatggtagttttcttttgctgtacagaagctctttagtttaattagatcccatttgtcaattttggcttttgttgccattgcttttagtgttttagtcatgaagtctttgcccatacctatgtcctgaatggtactgcctaggttttcttctagggtttttatggttttaggtctaacatttaagtctttaatccatcttgaattaatttttgtataaggtgtaaggaagggatccagtttcagctttctacatatggctagctagttttcccagcaccatttattcaataggaatcctttcgccatttcttgtttttgtcaggtttgtcaaagatcagatggttgtagatgtgtggtgttatttctgagagccctattctgttccgttggtctatatctctgttttcgtaccagtaccatgctgttttggttactgtagccttgtagtatagtttgaagtcaggtagcatgatgcctccagctttgttcttttggcttaggactgtctcggcaatgcgggcttttttttggttccaaatgaactttaaagtagtttttttccaattctgtgaagaaagtcattggtagcttgatggagatggcattgaatctatcaattaccttggacagtatggccattttcacgatattgattcttcctatccacgagcatggaatgttcttctatttgtttgtgtcctcttattttgttgagcagtggtttgtagttcttcttgaagaagtccttcacatgccttgtaagttggattcctaggtattttattctctttgtagcagttgtgaatgggagttcacttatgatttggctgtttgtctattactgatgtataggaatgcttgtgatttttgcacattaattttgtattctgagactttgctgaagttgcttatcagcttaaggagattttgggctgagatgatggggttttctaaatgtacaatcatgtcatctgcaaacagggacaatttgacttcctctttcatttttttttttttttttttttttttttggagacagagtcttgctctgtcgcccaggttggagtgcagtggcgtgatcttgggtcactgcaagctctgcttcctgggttcacgccattctcctgcctcagcctcctgagtagctgggactacaggcacccgccaccatgcccggctaatttttttttgtatttttagtagagacagggtttcaccgtgttagccaggatggtctcgatctcctgatcttgtgatccacccgccttggcctcccaaagtgctgggattacaggcatgagccaccgcgcctggccgacttcctcttttcctaattgaataccatttatttctttctcttgcctgattgccctggccggaacttccaacactatgttgaataggagtggtgagagagggtatccctgtcttgtgccagttttcaaagggaatgcttccagtttttgcccattcagtatgatattggttgtgagtttgtcataaatagctctttttattttgagatatgtcccatcaatacctagtttattgagagtttttaggatgaagggctgttgaattttgtcgaaggccttttctgcatctattgagataatcatgtggtttttatctttgggtctgtttatgtgatggattacgttcattgatttgcgtatgttgaaccagccttgcatcccaggaatgaagcccacttgatcatggcagataagctttttgatgtgcttctggattcggtttgtttgccagtattttattgaggattttcgcattgatgttcatcagggatattggtctaaatccctgattgttcatcagggatattggtctctttttttgttgtatctctgcgaggctttggtatcaggatgatgctggcctcataaaaggatttagggaggattccctctttttctattgattggaatagtttcagaaggaatggtaccagctcctctttgtacctctgatagaattcggctgtgaatctgtttggtctgggactttttttgattggtaagctattgattattgcctcaatttcagagcctgttactggtctcttcagagattcagcttctaactggtttagtcttgggagggtgtatgtgtccaggaatttatccatttcttgtagattttctagtttatatgcttagaagtgtttacagtgttctctgatgttggtttgtatttctgtgggattggtggtgatactccttatcattttttattgtgtctgtttgattcttctcttttcttctttattagtcttgctagtggtctgtcacttttgttgatcttttcaaaaaaccagctcctggattcattgattttttgaagggtttttttgtgtctctgtctccttcagttctgctctgatcttagttacttcttgccttctgctagctttggaatgtgtttgctcttccttctctagttcttttaattgtaatgtaagggtgttgattttagatctttcctgctttctcttgtggacatttagtgctataaatttccctctacacactgctttaaatgtgtcccagagactctggtacattgtgtctttgttctcattggtttctttttctgtggctaagattgatgagtgatctatcaaatttcctcagcagcttttctcttattttaacagctgttgatcatcatttgcctagatccattatttgatcaggagttacacaatgatggcattctaattctgttattccttttgcatttattagctgaaattcttctataaagaagacatctccctccttagctatttgataacattaaaatataattcatatgggaaagggaagataatatttaaattctttaccttagtctattacttttaaaggtctattgtatatttaagcgttttgtatcatattcacccattgttataaaattaagtatgaattgagtctgttttggtttctgtattgaaaataatagaaagttcttattatcagatataatctaacataatcctcattatatgatgtgcctcaagaagagttatgataatgtaaaactgagtgaacatagactccacactaaggttcaaactgctaaatgattattagtaaagttataattggagtgattatattccaatatgaatttggggaaaatacattttaatttttatttatttatttttctacagcttttggacttcttggatcagcatcctttttcatttactcctctaattcagagatcactggaattttctgtaagctatgtttttacagaagttggtgaaggcgttacatttgaacgattcattgtccaatgtatgaatcttattaagatgattgtcaaaaattatgcttataagccatccaaaaattttgaaggtaattcctttattggcagtttaaaagaattattttaatcttaagtgtgatataattgctataattacaaactttttaaaaaatgtcattttagtctgaaaaataaattgttgctgggacatgaaaaagatataaggattataggctttagtatgtttatactagcttttaaaaacaacatagtgcatttaataagccattttttgtagcacaaattggttgaagcttagggactttaagaattaggtactatagtcatcactgcagctcatattgtagggtgtattcatttgaacaaataaaagctttctctgactttatataaagtgtgattgtttctagacaggttaaattgttgtattatttggaattcattcatatgcgtgtgtgccaagatgaatgaagaagtcttggtggtgggggagagagaaacacatgcacacaccccccacaccctctacattatgaggaagttatttcagtatgccgtgatggtattgcatggtaatatataagctgtaatgccagaggcaagattgatgtgagtgtgttgtaaggaaagagtatctttgagatttgtttataataaaaatgaaaatttatacacaagtgtatcttcttccctgagagtgtattttttatttatttaagttacataatccaatgtagctacaatgtttggctatacaattaacttggaaatttcatttttctagatagcagccctgaaactcttgaagcccataagattaagatggcattcttcacatatcctactttgacagagatatgtagaagattagtctctcattatttcctattaactgaagaagaactgacaatgtgggaagaagacccagaaggctttagtaagaattaattttttagtgttagaatgacttttctcccctttctataaatatctgtttgagtgataggtataatattgtattttcatacagcacttttgatctggaaatcttggtgttttaaaattaacttactctttcgttgttatccattagaacaaattgagaagcagaaaatgaatgacttatgcaaatatgttgtagaattttgtccaggaaaagacctttttagtttttggattcctttacaaatatatcatgtagtttcaaacaaaaatataaaattaactctctcttaccctgtcagtttctattttgtgattcattccatgttattttttatttgtagaaattcttgcaaagaaatttggaggtttttgatgaatagttttttttttttttttggacaggacatctttatatctgtttgaattttagtactagatagataagtagaataagtctgttgggacccttgctatagaaaatcaaggaatcatgtgtctaataaagtacttacttgtatgtgaattacttaagctatggtgggacataggctagattttagcctcccttttctctttggttgtgtgcccttgtgtagttacacgtttcctaatattttaagagtgcccaaaagtttttgtaatacttatcttcgccatgcttttggtttttaaaagtaattttagttttaatacaggattgtactgtacaacatgtcttttcttgtttttttttttgctttttttgaaacatcttttttcaatttgctttctttatatagtacatacaacattgtaacataaagtgttgagtccctaaatttttaagagccctgaagtatttttctttaaattcaagaaatttatggagagtgtgagtaatcattgtacctagtgaaacatgattactgtattgaaatgaaatgattctcagaattctagtgatattggatcaggtgatagcagataccctggaaatgacaactactttgagcttttttccataaagaatttttatcgaaaatgagaatgcttatggatatagtaagcacttaatagacgactgtgagatacacaactgtgatctgtagcatatagtaacaaaatctgtgtaaggcctgtgttcccaaggatttgctcttaatgttatgtttaaaagagttcacaaaaatattatactgatgttattaaaatctttgttttctaaaccaagatgttgaaaatgtcattattacatatttttaattgcagcagtggaagaaacaggaggagattcttggaaatatagtttgagggtaagtattaattgcaagaaaaattgataggggaaagcttaatctttctaaagctcttagtagagaatgacactctattaaagattccagacatttgctgggcatggtggctcacactttaatcctagcactttgggaagccaaggtgggaggatcgcttgaggccagaaattcaagaccggcctggtaaacatagtgagaccctgtctctgcaaaaagtaaaaaaaggaaaaaaaaattagaccagagtggtggcgcatacctgtagtcccaactcttcaggaatctgaggcaggaggattgtttgagcccaggaggttgaggctgccgtgtgccatgatgatgccactgcgttctagcctggattacaaagcaaaacccgtctcttaaaaaaaaaaaaaaaaaaattaaagattcccaacattaagtcagacagataagaaactgtttataagaaactaagaactatattcatattaaattatgacgtttaatctgagttttttttcttttttctttttctttttttttttttttgagacagaatctcactctgttgcccaggctggagtgcactggtgcatctcggctcactgcaagctccgccccctgggttcatgccattctcctgcctcagcctcccgagtagctgggaatacaggcgcccgccaccacgcccagctaattttttgtttatttagtagagacggggtttcatcttgttagccaggttggtctcgatctcctgacctcgtgagccacccgcctcggcctccctaagtgctgggattacaggcgtgagccactgtgcctggccttttcttttgtttaacttggggtcggaaaacaaattttttcttcatcttttagtacattgcttgggaaataattgtcattacacaaatagaaaatgtttgtcaaactgaaagctgccattcttaagctagaattttttccttctatatatttcattagtaaagtttcttttggtatgttatttctcttaccacttcatgtgattctcagagactagcccattgctttcagttataggatacttttacaacgcatttattaatatgacaaatgttttgccgttaccagatgtgatgtttgagctcttctttttaagatttgcacttacataatttacataattagctatttgtcttctaaaaatgttatctttaatgtttttagattcataaacatacagttgttaaccagagagattactggtgattttaaaactttaaaaaatttcattcctttaatttttaaaagtttcttttatggagaagtttaaacatattaaaaaatagaataatataatgagcccttcatgataagctagtttattagttatcaactcatggctactttagcttcctgtaaacatctcccagtgttgatggttatctgagatgacacatcctctgaccatatttcagtgtgtatatttataatgttccttttaaaacaccacacaataccttaaaaatttaattaaaaaatttaaatattgtgaacgatctagtgattaaattcctttttaaaatttaaataaaaaattattttaaaaaattttttgtgggtacatagtaggtgtacatatttatggggtacatgagatgttttgataccagcatgcaatgtgaaatgattcagtacttttaagaaccaaacaaatcatttttttaaatgtagctaatgctaatttctgttaccgcttgtgtttgttaagagaaaggctactttatttggcaaattggagttcctgtttttgcttattatatcattgctaagaaaatacataatagctactcgggaggctgaagcaggggaatcgcttgaacctgggaggtggaggttgcagtgagccgaaatcacaccactgcactccagcctggtgacagagtgagactgtgtctcaaaaaaaaaagaatcttgggtagtcagccatttatagtactgagctataaatgagtggctacagaatgctttttaaatttaaggtatgattaatttaaaatgtacactttgcttgccatagttttaagtttttgaatgcgtaatgacaaataattgaaatgaaatcaactttcttttattaattataattcgattttgttttcctttgtgttggttataaaaaaatggtaaccttacttttttttttttaacaaatcaaaagttggaaacattttcaaagttttagaattttaagattaagtatttgctttattaaagaattagtcaatatagtatgcaactgttttgatgagaaatttgtatttttccctctccagccatgcactgaagtattatttatagatatattccatgaatataatcagactcttactcctgtacttctagaaatgatgcaaacacttcaaggtaaggcatattttgtgattaactttgagttaatctctttaacgtttagttaagaaatagtctgagtgcctacaatgcatactgtactgtttcctgggtcatataataaatatgaatttgagaaaaacaattttaaaacttattatcttccaagggggtggcatttgagataggccttgaattatagtttggacgatgataaattttcctgtagtaaatacaatagaagcaaaagcaaaacagtagtcatactgcttgcagaaagtctatctggagcgtgttgtgagaaatagtgagaaaaggttaaaatagtgttagcctctcttagaatggtggcagtgggaatggaaataattgattatggatttgagagaaaatgatgatgtaaatttttgacacttggtcattacactttgtacacaagtaactaattatctgcctattaactaacattgatttatgatttctgtcttttctgctagactgtaagtcctaggggcattgatcacgtctgttttgtttatattttattcccagtgctgggcatattcagtaactattgttacttgattgacttttagcaaccgattgaatgtgctaggcaaggaaaagtgatcaaagatgatcctaaacttttgagccttaatgacaaggaaacagttacctcattagaagtggtaggagatagagatatactttcggagtgcatgtatgtaaggagccttgggaaaagaaaagaggatcttaaggacagaacctgagattttcacctatagggatatgagtaaataaaagccttgtaaaaatgccaggtgtagtggtgtatcctagagaagagcatgttgtcagaatgagtgttggccaggcatggtgactcacgcctgtaattccagcactttgggaggctgaggtgggcagatcacttgagcccaggagtcccagaccagcctggacaacatggcaaaaacctgtcgctacaaaaattaggaaaattagctgggcctggtggttagtacctgtagtcctagctattcagaaggctgaggttggaggatcatttgagcgcaggaggatgaggctgcagtgaactgagaaaacctcactccactgtactccagcctgggtgacaaagcaagaccttgtctcaaaaaaaataattttgtggtatatagcacattagcattttgtggtgtatattttctagaatattgcttgtcataacatttttcaaatatgctataatggtttttaatcctgtgttctctaatgataatcataaaacttagactttccctttgtacttgtgtccatttttgacaccatgaaatgtgttatacttaattgaattgggaaactaacaaattgtgtttaaatataaattttttaaaaaactagttttatttgcttttactgatacctatttatatatatattttttaggacccacaaatgtggaagatatgaatgcactgttaatcaaagatgctggtatgttaaacttaagtgatttagaagcatttatttattcagtagatggagagtctgttttgtggtagattttgtgctgagggtgttgagatacaagagtaactaaaatacaggaacaatctgattggggagataaccaagtaaacagataatgtattataataatactatacaggatagttaatgctaaagtaggtgatgatcaccagatagtttggtgtgtctaaggaaagattcccaaagaagtgtaatggaagaacacaaggataagtaggagttacacgtgtgaggaggtggtggtggaaagagggtgttgcattccagggagatggagcaataagtacaaagacttgaaggaaagaggaggaagcacagttagaatttgaattgtgactattttggtttaactggaacattggggttaaaggttgagttgaggctggagagagttaagtagggaccagatcataaaatattacatccattttagaagcaggcattattttataatttttatagttggacttaaatattttagaatgaattgaattatctgtttgaaagtagtaaggaatatttaggaaaaacatgaagtaaaatagtgtttctaaaataaattatttcttctacttaaattatttctacttaaataatttccctgattagcatattgtgtgtttcctttaattaacatatgtttcatacactcatttgcagatctgatatctgaaacctttaattttttttcttaaattttcttctcagtgtataatgctgttggattagctgcttatgagctctttgacagtgttgattttgatcagtggtttaaaaaccagcttcttccagaattacaagtcattcacaataggcaagtataaaattttatatttattatacacttactttaccttatttattttattaatgaagacaggaaggcattaaaatggcttacaatttaaaaaatgcaatcgtataagttaggtaatgtcttatgtggaaaggaataagaattttgacatctaggaagtatttgatatatcaggtagtttgcaggagaaaaggaggactttatgcaaagatgagggaggatggaggtctctgagttcaagaaactatgcctaagaaaaagacagttcgaaacttagcaggatgtatgcctagtgtcagaagtagcctaatcaaagtaacatctgtgaaagatgaatgtcttgggatcacataatgcatactgcaagtctctggggagacggtagagtaggatatagagacatcatggcaaaaatatttgaataccctttctaagttctaattgaggtacctaattaaatagtacagattcatattacatttagtaatatgaattatgaaatgaattaatttagtacatttaatagcacatttgcccaattctattttttttgaaatagtctcattttgtcacccagcctggagtgcagtggtgcaatctcagctcactgcaacctccacctcccaggtccaagcgattcttgtgcctcagtctcctgagtagcagggattacaggcgcatgccaccacacctggccagcccaattcttacgttttatatacatttaagcacttgtctacttaaattttaggtattgaatgcataaaatgaaaggaaaaacctctttcatagtttataaaattatttcttagtttaaaattggagaatttgaaaaaattctaaggggcttttttcttaatttgaaggatacacttctactgattcacttcagtatacctggggcctatcagaatacttagcatatagtcatagatagttaatatttgttgactaaactaatgaatgcataggtcacatttagagccacagaatttgtagagctggagatactctaaaagtaattcttaacagtaagtagctgtttatctcttcagttattcaatcatttattcagttaacatatatttttaacacttggaatttgccatgtcctataggcggtgttaaataaaatagactctgacttagtctcagggagctagtgagcctttgatggagagaaagctttcattggcgaaacaaatgtgcagtttagttgtccttaaaccctagaggctatttagtgtaagaccttcactgtccagtgcagaagctccctacgtgtagctattgagcacttgaaatgtgcttagtgcaactgaggcaacaactttccaattttaattaatttaaatttaaaatttaaagccatgtaaaatatttattgattacatgttgaaatgatattttggatatattgggatatgtaaaaatattaataagtttttttttttttttttgagatggagtcttgctctgttgcccaggctgtagtgcagtggcgcgatctcgactcactgcaagctctgcctcccgggttcatgccgttctcctgcctcagcctccccagtagctgggactacaggtgcccgccaccatgcccggctaatttttttgtatttttttttagtagagacgaggtttcactgtgttagccaggatgatctcgatctcctgacctcgtgatctgcccgccttggcctcccaaagaataagattttgtttcttttctcttataatgtgggtactaaaaaattaaaataacatatgtggcctgcattatatttctaatggacaaagctgatgtagaccagtgtttctcaaactttaatgtacatatgagtcacctggtaatcttgttaaagtttaggttttgacttagtaggtctgggaaaaatcaagcaatgcacacattaaatagcaaagtgatctatacttttacttctgtttggatgtgtctatgagtttggaattttacctttctgagtttcatattctttatctggaacagagtctaatatggtcttagtcccaaaattgatggttctttggtgcttttacctcactctacacaagttgttacttctgcctctgtcacttggttcaaacagtttctgtcccttgaaatgacatttttccaccctttggctccaatattgtttatctcaaagacttgctcagattccatctgtctctgcccatttcttctcttccttttctaaagtcctagtacactactttgtgtttttaaattcctttaggtgtgttataaacttcttgggggcagggaatacttacatacttttttttgtaactttatttatgttatttaatttttgagatggggtctcactttgtcacccaggctagagtgcagtgccatgatgttggcccactgcaatctctgcttcctgggctcaagtgatcctcccacctctgcctcctgagcagctgggaccacgatgtgtgccaccatgcccagctatttttgtgtagttttggtagggttttatcatattggccaggctggtctcaaactcctgagctcaagccatctgcccacctcagcctcccaaatgctgggattacaggtgtaagccactgcacccggcccagtttttgcaactttaatgagcagttttttcctgtgtgcttgatcatcttttaaaattgcagttttttgggaaaaaaaaaagtgtttcatttatacccagaaatatttatcatcttgccactaaaatttacataatatcaaaaaggtacttcatgagtgaaattcttggacacaaatgttttgaactgcatgatttttctccttacctgaactttgatttcttttagcgaagatgatgagagaaagaaagaaatgtatatatgtgctactgtaaatgttttgccagtgttaatatatgttattttggtaatctgagtcacattctgttattgtgtacctcttacaaaattagcttagttgaaatcacaaaatttatatgaaagttttatataagcctagaagtttcttacattgttctgaaaataatcttcatagtattaacagaattggagtagaaaattacatacaggagcttctttattattatttttggggacctttccagttttagagtttggggcattgccactgtttttggttacttgagctaaaaccaaatggatttggtttttatgaaacatacctacattgcggttctttaagataaaagagtcaggattacaacatatatgcctaggaatttttaagtactaaaagttttaataatatttatttagatcaagacttcattgttaatattttgtactgtggtacatttagaagtaggctttaagcttttttttttttttgacagagccttgatctgttgcctaggctggagtgcagtggcacaatcttggcttattgccaacctctgtctcttgggtttcaagggattctcatgcctcagacttccaagaagctgggaccacaggtgcatgccaccacgccctgctaatttttgtatttttagtagagatggggtttcaccatgttgcccagattggtcttcaactcctggcctcaagtgatttgccctccttggcattccaaagtgctgcgattataagcatgagccagcacacctgcttttaagcttttatattaaaaatgcagattgcattcttactacattttagatttaaatgataaattatactaaaagaaatagacctcttaaaatatttaacattttaatttcatgattttttcctgtttaggtataagccattgcgacgcagggtgatttggctcatcggtcagtggatttctgtgaaattcaagtctgacttaagacccatgctttatgaagcaatctgtaacttgcttcaagatcaagatttagtggtatgtttcttaagtgccttaaaagagttagtttttaaagtttcatctgtgcaaatcatcaagttcacaacagtttatgtcttttctttatgatgtttatggcctttcactgcactagttattccttggtgagcagtttgatttgagggtagaaaatcttttgattcttgtttgcccttcccattactagtcattgaaaaaaaaattaagctctactattataaagtaatttataatttcttagaaaaaaaggcagttttaaaaaatccctttatagcttacatattctttttaaaaatcaggatagactttggcattgaaatagcatcataatttatttcatctttactgttgattctttgtccctcattttgagaattttttttaagcctttggaattattgggctcttttaaggaatttttctttctttatggtattcatatattattgttgattttgttactgagaacttgatagtaagctcttcattgctttttcccccttcaaagcagtaggtttgctgctttattataaaattactgaaatagtagtagtaattttacaggcgtatgattttaagaagtttaaattgtaaagaatagttttctttcttttttcctactggtgctttactgtatgcctgggtgaatatattagtgacttaatatacatgttcgctgtcttttcctgattttcaatttgttttaggtaaaattaagtgattttttttttctcccctgagttgtgctaagatcttttttaatcatttctcagtctccctccctttacccccccaaattttatttttagtttgaacccacctggtttttgcctgtcagcagaggtttggactgtacttcccttttttacatatgctgacataaagaaagctacatgtagtgttcactaaaggaaagcttaaataggtgaatttgttacagaaacacaatacattccaaaggcaaatagaactgatctttggattttctacctaagtattatctgctttgtgtaaataatttgagaatttaagtaccattctgtaattattaaatactataagcatgggaagttacaagagagccttgtggtattttactgggtttacattcttagaaatttattaatataacttagctacttctaaaatttctatttgctaaaattaattttcttctgtaataactttagaataaagcataagatttaaatttttgctttcctagttggaaatatttgcccttctgtcaaagagaagatattaaatgatttatggatgtgttacaaaagggttaaatttcaattaagttttctttgggaaatagagaaattgcttggagtttttcttttttctgttttgttttgggagactgagtctctcttttttgcctcggttgcagtgcagtgatactatcacggctcattgtagcctcaatgtcctgggcttagctgatcctcccacctcagcctcccaggtatctgggactatatgcaccacaacgcctggctgatttttctattttttgtagagatggtatgttgccacattgcccaggctggtcttgaacacctggactcaaacgattcacccacctcagcctcccaaagtgttgggattataggcgtgagccactgcactgggccccgaaattgcttgggtcttagacttgttttataatgagtctattaaaaaaggaaagagaaaaatgaattatttcagccagcaccttaaaaacagaacattaattctaccagatatcaacaagtgtaactggagagaaagggattcatggccagataagtttggaagactctgaaataaatattcaaatgggcctcttagttaggcaactggtcagagtctttaaaaatgtgcatttgtggcatgcgtggtgactcacgcctataatcccagcactttgggaggccaaggtgggctgatcacgaggtcaggagtttgagaccagcctggccagcacgatgaaaccccatctctactaaaaatacaaaaattagctgggcatggtggcatgcgcctgtagtcccagttacttgggaggccgaggcaggagaatcgcttgaacctgggaggcaaaggttgcagtgagccgagattgccccactgcactccagcctgagcgacagagagactgtgtctcaaaaaaaaaaagaaaaaaaaaaagaagtacgtttgcattatgactagcccacatgactaatacattaatattcatagaatatactttgaggaaatgttgctttaggttcagcctttgccctttatatcttctggtggctacatctcacgtttacatgttttgcatatgttttatactgtaactattattttgcaataaattgttaagaagattgttcagtaaggcacccagttagtggttagtgttgtaaaccttggcctttttaaaaagtacatttaaaatcaagaatgtataagtcatactgctttaattttcagcctttgagaaatgctagctaatataatgtggggagatatcttatacatgcatacctatacacaatagtgtacaaccatatagagacatgtatgtatatatatgcaaacatgcatttatatatataaacatatacacaaacacacattgtgtatgtatgtgtatacatatgtgtcacacaattaagtcaaattgctacactgaggaaaacttaacaatatttcaaataaaccaaaaaatatgtcactctgcattatatttccctagatcagacagtaattttatattgtcacacggctatcagaggtaagagacattctctgcccagcggcctctgatgttataaaatttgtgaagtcctatactaactggagaagttgtttcctccagttgctgcactgcttctgctgtgtcacaagtatgtagatcctgatgaatcgaattcctctctggctttcagaatctgcattctctttcctaagggctgctgttaaggaatcgggatacatttgatactgattaactaccgttgtccatgtgctattcttttgttattagaaggagactggctgtgacggagtagaagtagctgtcaatttttttttctttttttggctgctccgtagaaagagcagggctaccccataggcaagaattttgtcaataaaaaattcagcagctaacagaagaagcacttgtgtgctcatcactcagttacccatattttcatttgtaatattttccacatatatttcaaatattttatttaagaaatgaaatattacaaatgcagttgaattcctctttctctttccagtctcattctattgtctttgttaagcagaggttttacattttaatagatttattgattactttttttttgagacaaggtctcactttgttgcccaggctagactgctatggtgaggtcacgactcactgcagcctcaacacccgagggctcaggcaattgtcccacatcagcctctcgagttgctaggactataggagtgtaccactatgcctggctaattttttgattttttgtatagacgaggtctcactgtgttggccaggctggtctagaactctgggctcaagctgtcttcccaccttggcctcccaaagtgttaggattataggcattggcccctcggcctggaaagaaatcctttttcttcactcttggttttttattctgcctcgaatttatttttgagtgtgatgtaagtaaggttctatctttcttttttaaaaaataaggatggcaatactacagtgattcactgaataatacgtagttttctttgtggtccatacggctgtctctgtcatatcccatgtttacatgtggacctgtttctggaatttgtgccgtttcactggcctacttgtgtatctctacttgaatattgttttttttttttgttgttgttgttgtttcttaaacaacagctttatagtaagccttcacacctggtaggaaatgcattcttatagctttcaatacccacaaatttttcatagtttatggaagattaaatactgttttcattagccattttttttttgcatgtggtccagtgtttgtacttactgttaattgaccacctttttaaacttattgttaacagactacctcttttggagcatatcggtagttccttgtgccataatttgagaactactgacctggattctatacaatagaccaaaacaccttctaaaaagtatcttttacattctcccttcctttcccctttataatatattagttagtagatagagtgcttatgacaacttctaggttttagaacattatttctacactgtaaactagaattgctaaactgtagtttagaggaaccttcttttcccaggactacagatgattctttaaccagaatctttgtttataaactgggcttctttaggctgtagggtttctgaactaattatatctttaagtttcagaaattcaaaggaagtttttaggacgtcttggctgggcacggtggctcacgcctgtaatcccagcactttgagaggccaaagtgggtggatcacctgagcctggccaacatggggaaaccccatctccactaaagatacaaaaattagctgggcatggtggcgggcacctgtagtcccagctactcaggaggttgaggcaggagaattgcttgaatctggcaggtggaggttgcagtgagccgagatcaaaccaccatactccagcctgagcaacagagcaagatttcatcttaaaagaaaaaagaaatttttagaaagttttacttagattatttaaccttcagtaaaacaagcagtaaattactagaaattcagcattagtataatctttcacttttgtgaaagcctatgtaagatataaactgtggtataatcagaaagcgtgtagtttgagggtgtggtgtggttgcttgtgaagcaaagaaatggccgtcttcatgggcacgttgactaccaaccagcatagacatatagtcatgtgctgtttcatgacgggtatattccgagaaatgcgtccttaggcgatttcctcattgtggggacatcatagagtgtgcttttacacaatctgagatagtagaggctatctaggctgtgggtacaaaccagtgtagcatgttactgtactaaatactttaggcagttgtaacatgatggtaagtatttgtgtgtctaaacagaaaaggtacagtaagaatataatataaaagataaaaaacgttacacctctatagggcgcttaacttgaatagcgcttgcaggcttggatgttgctctgggtgaggcagtcaatgagtgattagtgaatgtgaaagcctagaaaatcactgtataccactgtagacttcataatcattgtacacttaggctacactaaatatattgggaaatattctttcttcaacaataaattaaccacatcttactctaacttttttttttttttttttttttttgagacggagtctcgctttgtcgcccaggctggagtgcagaggcgcaatctcggctcactgcaagctctgcctcctgtaacttctttagtttaaaaattttttaaagttcttgactcctttgtaatagcacttagcttaaaatacacatacattgtatatttgtgcaaaaatattttcttttgttatatccttattctgtaagctttttttattttacagttttttccacttctagtaatttttcttaaaatctaaatcaaagacacaaacacattagcctaggcctacgcagggttaggatcatcaatatcattgtcttgcacctccacatcttgtcccactagaaggtcttctggggcgttaacacacatgcagctgtcatctcctatgataacaatgccttcttctgagctgggtgtggtagctcacgcctataatccaagcactttggaaggccaaggcgggcaaattgcttgagcccaggaattcaataccagtttgggcaacatgatgaaaccctgtctccacaaaaaatacaaaaattagccagacatggtggcatgtgcctatagtcccagctactcgggaggctgaggtgggattgcttgagcctaagaggtcaaggctgctgtgagccatgatcatgccactgcagttccagcctgggtgacagagtgagactctttcaaaaaaagaaacaacaacaaaaaatgccttctcctgtcatacctactgaaggacctgcctgaggcagttttacagttaactttttttttaattggtagaggagtatattctaaagtaacaataaagaagtatagtgtagcatatacataagccagtaacgtagttgcttattttcattattaagtattatatactactgaacataattgtatgtactatacttttgttttataaagagacagggtcttgctgtgtcacccaggctggagtacagtggcgtgatcatagcttactgcagccttgaattcctgggctcaagttatcctcccacctcaacttcccaattacctgggattacaagtgcatgttaccaggccttcctaattctttgatttttttgtagagtgggatctctctatgttgcccaggctgctctcaaactttgagcctcaagcaattctccctttgtggcctcccaaagtactgggattataggtgtgagcaactgcaccaggccatgtctgtgctgtacttttatactactggctgtgcagtagatttctttacaccagcatcaccgcaaatgcataggtaatgtgatgtgttttgacagccatgacatcactatgtgatgggaattttcaactcagttataatcttatgagactacgtttgtaaatgtgatctgttgttgactaatacattattatgtgatgcataattgtattgaattttctaaaatggaaagttactaggtggagtttaatgaagtactttcagtggtatggagaagactgtagcatagcctgtatttactgtgggaagtacagctgggatctgggcagaggtattacaggtgctttgaaactcttctgtctttccactcttgtgcgttttatgggtctttcagttttgtcaatttttcttttgtacactctctaatttttttttctatttacctatcctttgtatctcaaaaacactgctacagatcttgatctctcaactagtctgtgttttgaacgatcccagaatgaattctgaattcaattatactcatcaaatataaattctgaaggaaatataaaataatctgtgtttgagacatcaaaatattagacctatctaaaaccaagaagaaaggaaaccttagtctactaagtttcctacagtcagttttgagtttataattgatatgtctattaattatacatgaaaatgaccttgagaatttttttcttgaaaggagatgaatttatttatttatttttattttatctctggtccttgattcaggaggagatgaatacatcaaagatgctttctatccttttaggaaacttattcatataacatttcagaaggatgataccagattgtataattcagtgtactaatgtataggataatgtcatttatgttagtatttcttatgcctagcgtggagtcaagtcttagaaaatgcttattgaaagaattaggaatagggataggaaagaacccaagaatgaggatggctttttaaataattgaattatgaaatcataattttatttctccttagcatattattattttgtgtctgccttatttacattttcctggtggtcttaagtccctgagatactgccatttctttctggccccaacaccatgctcactgttttagtctgtggactgccttcactgctatgggcaagatgtaaaagtggtcaggcattaggctagtccaaatccacctaagtgtcttgataagatgcattcgttgtgacatctgcacagaagtttctggctctgcttacctttgtagcagtatttggaagtactgttgacctgcattttcttctcattcatttccctgtttctctcatgctttgggggatctgtccaatgtttcttatgtcttgacggcacttactctcccaatttggaattgcctgttatcttttcctgaattttctgaggtttcagctggggtagggtagacagactcacagtagaaatgtgttagacttttctaccagtcttctagcacactccacaagtcttcattctataaactcaagttttgatgttgtccccccattgcttgagttgctgccaaattcattccatttctttgtggtaagtacctcttatttcttttaaagctcaggaagagccgactgtttttcttatgtttatttgtcatcatttaaaatgctctttaactttccttaaaagtctgtgtttttttattttcccttgtgatctggctttctgttcttgcagtcaaactggaatgcaggcagttcatcttaattcatttcacctttttctctgcacatactactacactgacttcccctttttaggaaggaaaacattgttttattcaggtgtcttgtttcatttacttatttgcataaatgttatggctcggggttgagtgcatctctagaataaatggtcctttcgtggaggaaagtcgagagaattaagggttagtgtgctggcagtttgatttcttttcttttcttttcctttcctttcctttttccttttttcctttttcctttttccgagttggagtcttgctctgttgcccaggctggagtgcagtggcacaatcagcttactgcaaccctcgcctcccaggttcaagcgatcctggtgccccagtctcctgagtagctgagattataggtgcacgccactatgcccagctaatttttgtatttttttagtagagatggggtttcaccatgttggccagtctggtctcgaactcctggcctcaagtgatccgcctgcctccgcctcccaaagtgctgggattataggcatgagccactgtgcctagccttgatttcttgtttctttttgaggggctttcatgtcttggtctctgtgaattgttaatattgtacttgtatattcactcagtactaaatgctgggaacttaaagatgtttatgtgtagtccatgtcctcaaggggattgtcctgtgcttaatgttttcaagttagccatttttatcagtatctattaatatattaatagtatctactaatatattaatagtatctactaatatattaatagtatctactaatatattaatagtatctattaatatattaatagtatctattaatatattaatagtatctattaatagattctattaatagtttaatatctattcctctcctccccagattgtaagatctgtatgggcatggcttactcagctttttctacagcagctaacacagtgccgatgatagttcctcattgaatagtttttgatgcagtacctgaccatactgtcttttcgtgaggtcattttgtggcagatcaagtggcagcaaatttgttaaatctgttaaaaatctggaaatgttcacattgcctttagagacagtgaataaaaggaaaaagcaggtgaaaaaacatctgcactgtaggctcttagaatctgcggatttggcagtagagtatttaacatttggtgaaggtggctaattgcatctcaagacctcagaagctcctgtaaaatgttttaaacgcttactttttgaaaaatgactggaaagaaaataacagttgctatagtgtaacatctaagaaagtaatggttctcagctgggaaataaaagttttagatatattatctcacagattgaaatatagaatttagtcatgtcttgagctcatgttactttatgtggaaactatgaatatcttagcccatgccaattttagccgattaagtctgcgataacacttgaaagagaatgagattatgttgtaatatgatttgcccaggtaacatgctggtacacatggaaaatatgatttaggaggtcaggagcatatgtaaacctttctgtatttgtgaactgtgggatttagcaaatctcaaaatattttggggatatttcaaagatttactgtaattgaggttacaggtggaaatttgcttgtgttctttctcctccccacctccttccttccttgtctccttttgcacctttgacttacacatcctccaatttgtccaaccccaccctggtttcctgcttccttcttcctcaatcccatgctctccacatactttactgcaaattattttccttcctggaaggacccactggattaaaggcttattaagtaaattatgggaaactgaaaagaataggaataaatgctactttaccttttctttttattccttgctttggataaggagagtatccctttatttctgaatatttacatggtctgtgactctaataataataagagtacagaaagtgatttggaataaaattttttgtttgatattaatgatgtttagtcattctaaaataattaaaaactaatgatatactttcttttaggtccgtattgaaacagctacaactttgaagttaaatatccttctgaaaatttaaaaatacttcattgcaaagaactttaacacttttaattattatttattttgtgaaattaatttatgtatacttgttttagatacagatttattttgataaaacttatatattctcagtattccttaactgttcttcacctgttgatgattttgaatttagaacagatcagtttctaccggtaagaatatacatttccaggtattttttttaaaaaacaatttctgcttatgtctttgaatactattttatacatgaaattatctatgtgttacttattaaagttgaatttaaaagtatgctgtattggattattttggaggacataatttttatttgtaaactgttttggtaacttttattgctaacagttcacttatattctgcttacttttgtttagcaattttgtcatctgtgttgaagttggttgtcaaactttttttttcaaaattgaaaaacatctagtatcttcattttatgtgtgtctgttacttttttgctccttaggttatttctctgtgttatttgcatttgtatatctttatcctgtcctacacactagactgtaaattacttgacgagcagaataccaagttctactcatctttttactctttactcaacccccagcacctaacatggtgttttgccataactggtactcagtaagcacttgttaaacatatcagtaacattggggtgttaatatttgttcttaagaggactgggtgagaagaaagttacgtgataaaatgtacttcttttggtgagggagatagatagggaagcttgtaaagcagtgatcttgctttaataaaataatcactagacatttttggatgaaagaaatgtgttgtagaagtgtgtgctaaaatgaaccctatatctgaaagaacaaattcttgctttatgtaagtgtgatttgttaagtttctaacgtaattttcataatataagagttcacagccagacatagggtatttgtttttgatttcctaataagaactattctgccatttttagaataacaaattatatctataaaaatatatatttccatgcaatatatattaagggttacatcagatagctagtatgtgagtgcaataattaacgtctttttgccgtaatgagtaggtcttgcaaaacaaaacatttcgtgattggcaccaggcatatatggaagaacagtgacaaggcactgttaacagtttagttaacagtataaaatttaaacagacatagcgtagacaatattcctctaaacattattcagtttgtagatgagttaaattctgaaatggacacattcagcagcaatgaagaaagaaaacactttgtaaaacaatatgtaccggcagcttgaacgatttcaggttgtttaggtaatgccaagcttttggctgtttatttgacttactgctttgacattatgatttatttcttacttctgttcgtatgaatgtagaggtctttcatttctattataaaccttttttattttctttctttttacctgcagtatttggaaaccatgttcacactactttttcagttactgcagcaagttacagaatgtgacacaaagatgcatgttttgcatgtcctttcttgtgtgatcgaaagagtcaacatgcaggtaattatattgtaaaacatgaaaataaatgaggggtgggtagaatagacgtagaattcattaatatccttgactacattgtttaagagttaaaacattaattgaaatgcttctaacttatagattgtggtttcagttatgtattattcaaaattgacatattcgattttctaaaaatgagaaaattaaaatactaaaaaaaaaattggatcaacagtgtagaggtgttcatagagcagaattttacatattttagaagatccagccgatgtaaaattgagtgtgtttgagggcatagccacaagtgtccatcagcaagacttctgggaaagtctgttatttttacctgaaaaattaagtattttttgcagtctggtctgcattatatttacatttggcttaacataaaaatgaggtataaagctcttaacagttcagttattcagcttcccctgtcactctgaatctttgtggaaaattgttaatccggaaaaccacactgtaattatcgttgtgacttcctatattctagttcaccattgcatatccttgtttggaaagcactgaagcaaatctgtgatttgcattgtattaggaaagataattgatttggatttcacagacttagagtttacccttggatctgctgttagtgaattgtgacaccttgagcagatttattaattctaaagcagttgatgagaatagctattaattattgactaatgacaacatactgacatatgtgctacatgctttgcatatatttctcatttagttctcacaaaaaacttgaggtagaggagttagaatttattgtctcaaacaatttgagacttgaaggaacttttcaaagttcacgtattttaatggcactgccagtactttaagcataatgcgactcccgtggtagggttgagtcactgttaatcatttgaaacagatctgggtactggtgtctaaaagtagtaatatctgtgtgattcttagtacttggtgttcttaatacattaatcacattaattcatttgatggtgtttttttcaacaacattgagagaatttggtcacacagagttcattgcaactgttttaagaactcattttaagtccttgcctctgctatttagtttgggcaaagtctttaaccttgtgtcctcatgtataaaatggtaaagataattctgaactcacctaacttaggatttcatgagcataaaattatttcacatctccaaaatgcttcagggtactataaagttgcaataaatggtttaaaaagttgattataaaaacaagatttggctattttctgtaattttatttagaaatatatggcagatggaaatttcttagataaaacttttttttaaatagaaatgggtcttcttatctttgtctccccaaacttggaattaaaactttttctgtaaagtttgttatttttttggcttagtaaatttaaaaatgcttatgtgtttctgtctacactcatctttcggagcacaaatagcctaagcagcttacatgcctatatcatcagaaagtaacaataaggtatagttattcaatatagtttttgtttttgaaaactcaaactaaataggaaatggttaaaaaaatattttcagttgtctgattctttttttttctaccttaacctctgatcaaccctatcatttttatcattgttgcatatatcccttaactctctttaatatgccaaatttgacgtttgtccatgaggcagcaaacttttaaaaaatgttaacaaattttatcttttttgagatgaagtcttgctctcccccccgggctggagtgcagtggcgcatctcagctgactgtaccctcttctccaatctcctgggttcaagtgattcttgtcctcagcctcctgagtagtagcttggattacaggtgtgccaccatgcctggctaattttttttttttttttttttgtatttttagtagagatgtggtttcgccattttggctgggctggtctcaaactcctgggctcaagggatccacccgccttggccttccaaagtgctgggattacagatgagaaccaccgcagctggccagaattatctttttgatattaggcagcaaacattttgagccatcttacaatagtgctttcttcttcttcttctttcttcctttgtcttccttcttccttctttctttcttctttcttcttctttcttcctcccttcctcctttcctccctttctccctccctccctccctccgtctctctctctttctttctttcacaaagtgcaggtttgttacgtaggtatacatgtgccatgttgttttgctgcacccatcatgttgacagttacattaggtatttctcctaatgctatccctcccccagccccgcaccactcgcccccaacaggccccggtgtgagatgttccccgccctgtgtccatgtgttctcattgttcaactcccacctatgagtgagaacatgcggtgtttggttttctgtccttgtggtagtttgctgagaatgatggtaatgatagactggattaagaaaatgtggcacatatacaccgtggaatactatgcagccataaagaaggatgagttcatgtcctttgcagggacatggatgaagctggatacaatagtgctttctgacacatacagtttaatgttgaagtttcagtaaagtcaccatctttgtaccatactgtacaattatttgaatattgtctttactttttgataaagtagttgaaaacctacagttaacttttctagtgcagagatcttataaatatatagtcaaaataaatatgtaatcatcaggcgtggtatcaggtggtctttgggcctgtgcatttctgaagtgaaagaacaaaattaaagggactctgtgaaatataaaatactctgttgaaaattttatctaaaagatgaagtgtccttaggaacttagagtaatttttttaaccccaatgatagagccctcattaaaacatttgttagattgtcacctatttgattttcatgttttcagtgatatgaatttaagtggagctttccctatatatgagttaactcataagactataatactcaaagtgcttcccccacacctcaaattctttggtaagaacacttaacatgagatccatcctcttaacaaaattataagagtagaatacattattgttgacttttgctacaacattctatagcagaaccctaaagcttattcatcttgtttacctgaaactttatgcctgttgattagtaacttatttccccttccccttagtccctggcaaccactgttccactctttgattctatgaattagactattttagatacctcatataagtagaattggtgtatatatgcaattgtgtgtgtaataccacatgttctttatccattcatctgttgatggatatttaggctgcttccacatgttggctattgtgaatagtgctacagtaaacatggtagtgctaataatttctttgggatcctgatttcagttcttttgaatagatgcccagaaatgggattgctggatgataacgatagttctggttttcattttttttggaagctcaatgctactttccatagtggctgtaacattttacattcctagcaacagtgtacaaagataccagtttctccacaccattgccaacacttgtcttatcttttatttttgttttgtaatagccaccctgacaggcatgaggtgatatctcattgtggtttttgacttgcatttccctaatgactgcaaaaactttcttagttctatgtgatttttaaaatgttatgccaataattgaaattgtccttcccttaaaacctttgtattataatcttattcagaattttatatggacagtattttttctttcacctcttttcattgaaaaatctcaaacctccaaaaagttataaaatagatcaacacttatatatccttcacttcattagtaagtttcatcacttactaatattttaccacatttgctttctttttatctatccacatatacagattgttattgtaaaactatttgagttttagttgcagacatcatgatactctccagaatattagacctctccttcttaagagatgtatgctccatttcctacattatcataaccgtgattagactcaggaagcttaacactgatacaatactattatctaatatcaagtcagtattcagatttccttagttgccccatatagctagcctcccaccccactggaatatgtttggctctcatgtccctgctttgttatttttaatgcccagtttttttctccttccttttatatctttcacagcagtcggtgattgatttttttgtttttgttttttgagatggagtcttgctttgtcacccaagctagagtgcaatggggctctcttggcttactgcagcctacacctcccagattcaagtgattctcctgcctcagcaggagtagctgggattacgggtgcgcgccaccatgcctggctaatttttgtatttttagtagagacggggtttcaccatgttggccaggctggttttgaactcctgaccttcaagcgatctgccctccttggcctcgcaaagtgctgggattacaggcgtgaaccactgcgcctggcctctatgattgatttttgaaatactatttttatagcattaattttaatttagaacattgtatattctaatgacagccaagattggaatataaatattttatggcttttaaatgtaactgggtactttggttttattaccctatttgtaatttatagtgtatatttcttttctgcaatttctaggaaagtatcctccctctttaaaactaaaactacctcattttccttaccagtagattgtgttgtcatatgcttatttttagttgagtatgaatgagttagatactttgtaatctgtttttacttattaattggcctgcttttatgagctaactggagtgatctttgagatagaacacttagcaatattgagtacatgttccagaaataatattataatcaaattttgaaaataaggtattacatgataaatgttaaaataaggtaacacatctcttaatatttattcacttatatcttactgagatatttgtgcaaatatttaacttcttatttttctgcattccccactaacacttcaccacaggagaggggagcaaattctgtagttgtttggctacccttttagagtattttactagcagaatgaagaaactcaccctttctgggaacattttaaattttaatccagatattcaagtagatagtagtgaagctatgaaggtctagtgttatttcatccccaaggatattcttttatttttatttttttttttagattataaaaacttcctctttaatcaaggcttttaacatgaacagatttcttgaataaaatggaaagtttccagtacactgaaacataaatccacaagtcaccatacatacaacacccggcaggaaaaaacaaaaacagcaagtttacatgatccctgtaacagccatggtctcaaactcagatgcttcctccatctgccaagtgtgttctggatacagagcacatcgtggcttctggggtcacactcagcttaggctgtgggtccacagagcactcatctggctgggctatggtggaggtggctctactcaagaagcaaagcagttaccagcacattcaaacagtgtattgaacatcttttaaatatcaaagtgagaaacaagaaggcaacataataatgttatcagaaagatgttaggaagtaaggacagctgtgtaaagcttgaggctgaaaagtagcttgccagcttcatttnnnnnnnnnnnnnnnnnnnnnnnnnnnnnnnnnnnnnnnnnnnnnnnnnnnnnnnnnnnnnnnnnnnnnnnnnnnnnnnnnnnnnnnnnnnnnnnnnnnnnnnnnnnnnnnnnnnnnnnnnnnnnnnnnnnnnnnnnnnnnnnnnnnnnnnnnnnnnnnnnnnnnnnnnnnnnnnnnnnnnnnnnnnnnnnnnnnnnnnnnnnnnnnnnnnnnnnnnnnnnnnnnnnnnnnnnnnnnnnnnnnnnnnnnnnnnnnnnnnnnnnnnnnnnnnnnnnnnnnnnnnnnnnnnnnnnnnnnnnnnnnnnnnnnnnnnnnnnnnnnnnnnnnnnnnnnnnnnnnnnnnnnnnnnnnnnnnnnnnnnnnnnnnnnnnnnnnnnnnnnnnnnnnnnnnnnnnnnnnnnnnnnnnnnnnnnnnnnnnnnnnnnnnnnnnnnnnnnnnnnnnnnnnnnnnnnnnnnnnnnnnnnnnnnnnnnnnnnnnnnnnnnnnnnnnnnnnnnnnnnnnnnnnnnnnnnnnnnnnnnnnnnnnnnnnnnnnnnnnnnnnnnnnnnnnnnnnnnnnnnnnnnnnnnnnnnnnnnnnnnnnnnnnnnnnnnnnnnnnnnnnnnnnnnnnnnnnnnnnnnnnnnnnnnnnnnnnnnnnnnnnnnnnnnnnnnnnnnnnnnnnnnnnnnnnnnnnnnnnnnnnnnnnnnnnnnnnnnnnnnnnnnnnnnnnnnnnnnnnnnnnnnnnnnnnnnnnnnnnnnnnnnnnnnnnnnnnnnnnnnnnnnnnnnnnnnnnnnnnnnnnnnnnnnnnnnnnnnnnnnnnnnnnnnnnnnnnnnnnnnnnnnnnnnnnnnnnnnnnnnnnnnnnnnnnnnnnnnnnnnnnnnnnnnnnnnnnnnnnnnnnnnnnnnnnnnnnnnnnnnnnnnnnnnnnnnnnnnnnnnnnnnnnnnnnnnnnnnnnnnnnnnnnnnnnnnnnnnnnnnnnnnnnnnnnnnnnnnnnnnnnnnnnnnnnnnnnnnnnnnnnnnnnnnnnnnnnnnnnnnnnnnnnnnnnnnnnnnnnnnnnnnnnnnnnnnnnnnnnnnnnnnnnnnnnnnnnnnnnnnnnnnnnnnnnnnnnnnnnnnnnnnnnnnnnnnnnnnnnnnnnnnnnnnnnnnnnnnnnnnnnnnnnnnnnnnnnnnnnnnnnnnnnnnnnnnnnnnnnnnnnnnnnnnnnnnnnnnnnnnnnnnnnnnnnnnnnnnnnnnnnnnnnnnnnnnnnnnnnnnnnnnnnnnnnnnnnnnnnnnnnnnnnnnnnnnnnnnnnnnnnnnnnnnnnnnnnnnnnnnnnnnnnnnnnnnnnnnnnnnnnnnnnnnnnnnnnnnnnnnnnnnnnnnnnnnnnnnnnnnnnnnnnnnnnnnnnnnnnnnnnnnnnnnnnnnnnnnnnnnnnnnnnnnnnnnnnnnnnnnnnnnnnnnnnnnnnnnnnnnnnnnnnnnnnnnnnnnnnnnnnnnnnnnnnnnnnnnnnnnnnnnnnnnnnnnnnnnnnnnnnnnnnnnnnnnnnnnnnnnnnnnnnnnnnnnnnnnnnnnnnnnnnnnnnnnnnnnnnnnnnnnnnnnnnnnnnnnnnnnnnnnnnnnnnnnnnnnnnnnnnnnnnnnnnnnnnnnnnnnnnnnnnnnnnnnnnnnnnnnnnnnnnnnnnnnnnnnnnnnnnnnnnnnnnnnnnnnnnnnnnnnnnnnnnnnnnnnnnnnnnnnnnnnnnnnnnnnnnnnnnnnnnnnnnnnnnnnnnnnnnnnnnnnnnnnnnnnnnnnnnnnnnnnnnnnnnnnnnnnnnnnnnnnnnnnnnnnnnnnnnnnnnnnnnnnnnnnnnnnnnnnnnnnnnnnnnnntcctcactttccagactgggcagtccaggcagaggggctcctcacatcccagacgatgggcagccaggcagagacgctcctcacttcccagacggggtggcggccgggcaggggctgcaatctctgcactttggggggccaaggcaggcggctgggaggtggaggccatagcgagccgagatcatgccactgcactccagcctgggcaccattgagcactgagtgaatgagactccgtctgcaatcctggcacctcgggaggccgaggctggcggaacactcgcggctaggagctggagaccagtctggccaacacagcgaaaccccgtccccaccaaaaaaacacgaaaaccagtcaggcgtggcggcgcacgcctgcaatcgcaggcactcggcaggctgaggcaggagaatcaggcagggaggctgcagagagccgagatggcagcagtacagtccagctttggcccggcatgagagggagaccgtggaaaggagagggagagggagacgggagagggagagggagagggagagggagacgggaggacatccccaaggatattcttagagcaatttcaaatactgtaatactcagcttatagcaatctcaaatactggagctgaaacgctgtccagcatcattgtagatccattttatttttcaagaaactactgtcagactgagctgtgctccagggtaaaatgtaaaatctgattaacttaatccatagtgagcttagcaattttatcctttgaaaatgttttttttctcttgtgtttccaccataccttgtatacaccttcatcattgcacttcccctttttcattgtaagggtttgtctggctgtctgtgtatccttttctgtccagtgccttgtgttcagggcctgaaacttggaagatatttgtagaatgaatgaatagatgctgactttttaaaaaataatagtataatttccaatttggtaagctgttttgttaaaaaagaagcaggttataacagcattttctgttaacctctaaagtgtttttttatattcataaattttatttcattcagtacacttgatatttgtttaaaattatttaaaaatatttactatagagccctgggcttttatgtaatgtctaattttatttcttaagggtataagcttaatacattacatctaataaatattaaatatgtgctgtctgggacttaatagtgctctcattgtttttcaaagtaaattgccttctttaccaataaaattttgttgtttcctctacttatattgtaatagatacgaccatatgtgggatgtttggtacaatatttgcccctcctttggaagcagagtgaagaacacaatatgttgagatgtgctattttgacaacacttattcatcttgttcaggtaagtcacttctccacagagtttttttagtttagtggtttttaaaaaattcttttaaccatttaaaaattgtttttatgtgatttatgttaatggtagtgaaaaacttcacatatcttttatttttttttccatgtgtgatctaaaccgatttaaaaacaacttttgcatgcttattttggacatttttttgaggatgtaaaaaatattattcacttttaaatgttgtctccagtgatgatagactcatggttcatgcagtccatggcaccatgcatgcagtttccttggtggtcggggcttttctgcttaaacatacttaatgttttcactctttttccttgatttaaaataaaaaaattccctattataacttggtaaggcaggaaaccaggtgagttgcttttgaggggagacaagtgaattggatctcagacattttgacgtttgaggtgttgggatgtggtagcaggtagagaggaacctgaaacttagagctggactatagttcttatttgaactgttacagtgaatcatagtctggtgagagtatggttagggaagagctcaaggccgtgagttagaatatatgtgtggagatgctcaagtgattttactgacttcacccacaagtttgagaaattttccagtggggaagaaatcagaagtatccctaaattcagaagtactgctctaaagctttctaaaattagtttagaaaaaaccagaaacttttctcagaagctttgatacttttttgaacatgagctcattctttccataaatgctttctttttttttttcctttttgagacggagtctcgctctgttgcacaggctggagcacagtggcgcgatcttggctcactgcaacctccgtctcctgggttcaagcaagtctcctgtctcagcctcccaagtagctgggattacaggcacacgccactgtgcctggctaatttttgtatttttagtagagatggtgtttcaccatgttggccaggctggtctcaaactcctgacctcaagtgatccgcccacctcaggctcccaaagtgctaggattacaggcatgagccaccatgcccagcccctccgtaaatggttatggatgacttttagttacagattcctgtttaaggcaatttcagataaatagtaatgcaaaatatttttaatgtacatttccctgctttcttttttttactgtggtaaaatacacataacaaaatttaccgttttaaccaattttaagtgtacagtgtagtgtatgaatatattaaatacattcataatgttcaactgtcactaccatccatctctgtaactctttttatcttgtaaaactgaagctatatcattaaacaaaaactccacagctccatcactaaagcacttaaaaaaaaaaaaagtgaggctgggcgtggtggctcaagcctgtaatcccagcactttgggaggccgaggcgggtggatcacaaggtcaggagatcaagaccatcctggctaacacggtgaaaccctgtctctactaaaaatacaaaaaattagccaggcgtggtggcgggtgcctgtagtcccagctgctcaggaggctgaggcaggagaatggcatgaacccaggaggcagaacttgcagtaagccgagatcgcgccactgcactctagcctgggcgacagagcaagactccgtctcaaaaaaagaaaaaaaaataagtggcccagaatctcttcctgtctaccttttaatgcttatgattaccttataaagattatgtccgttttatagaagaggataaagactaagagaaggttactatcttgtgaatgcatttataagtaatagaacaatgaacgacccgagatattttgtattataacagcatctctgccaaatgttttttgttttcgttttttgagacggagtttcgctcttgttgcccaggctggcgtgcaatggtgcgatcttggctcactgcaacctccacctcccaggttcaagcaattctcctgcctcatcctccagagtagctgggattacaggcatgctccaccatgcctggctaatttttgtatttttagtagagatggggtttctccatgttggtcaggctggtcttgaactgccgacctcaggtgatttgcttgccttggcctcccaaagtgctgggattacaggcgtgagccactgctcccggcctccaagatgtatttttaagctcaacttgggagttttgtgagagacatgtaactaaacaccaactttcaagtctcctcaggcagtgttacttcaagtagtctcaggaggtcagagtaactcttgtggaatgttaggccttttttctttaatcatgacatttaagtaccctgtgtatttgtaccggccaagagtgcaaggttcaaacaagtagtattctacctttcttggagaaagcatataacataataccaaaattgagactgtagcttaaaatatatttttcagccgtttgggaagattatactaaagtttattggttggccaggcactgtggctcacacctgtaatcccggcattttgggaggctgaagtggatgatcagttgaggtcaggagttcgagaccagcctggccaacatggtgaaaccccgtgcctactaaaaaaaaaaaaaaaaaaaatttggccaggcgcagtgactcacgcctgtaatcctagcactttgggaggccgaggcgggtgaatcacgaggtcaggagattgagaccatcctggccaacatggtgaaaccccatctctactaaaaatacaaaacttagccaggtgaggtggcacatgcctgtagtaccagctactcaggaggctgaggcaggagaatcgcttgaacctgagaggcggaggctgtagtgagctgagatcgcgccactgtactccagcctgggtgacatagcgagactctgtctcaaaaaaaaaaaagcccaaaaattaattgggtgtggtggcgcacacttgtaatcccagctatttgggagggtgaggtgtgagaattgcttgaacccgggaggcagaggttgcagtgagccaagatcacacccctgcactctagcctgggtgacagagtgagaccctgtctcaaaaataataaaaaaaatttactggtaaatttcctttcttgcaaaatactgctatcttttggcttttgacacgtaacagacattggtgtaagtttctgtatgtttttgtttgtttttttaatcctggaaatccagattctggtagtctttgaagagggtggtcactgggtgaaaataaactttctagtctgcatagttgaacttagaggaagtaggtattcgttcatacgctaaacatttattgagaacctgcaatgtgcaatacagggtaataggcactgggctacagaatacaaatgaatagaatgggatctttgtgtaggtgactgtctagggaaatactgaataagtgtgttaattgcccttttagcaattaagaacatattgctattgggggtacatggccaattccctgtgtcacatggagggtgaggcggggcacattagggaaggcctcctgacagaggtgttactcaaattttggtgttgttaaatagtgttgttaaataaaacaagaagtgttatttagatggtggtttagcaatgagagtggtaaaggtgttttaggcatatgaactgacatgtgtaaaactacctaagcattagagaatgcagtacattttatttttttttaaggtttatatattgatcagttttaatgttgacagataaaggagttagttcttaaagatttttcaaatgaaaagtatcagtaccctgctcctcctcctcatttcctttttggtggaagaatccactgtcaactcttacagccatatcataggtttctcagtctttctcactctaacatattgtttattactgatttaagcattgtaggcattacttcttgacttccctgcatagaagatgaaaatgtaattcttttatacccctgtgtccttcctattccactatcctcccagtatacttgattgtataaagacggttgaaggcctatatcattatgtcatgattaattttatttcttatacatagtgtttccaacctccacccttgtattaataattttatttgcctagtatactgagaaagtaccataaacttggtggcttaaaacaatatgcatttattagctcatagttctgtaagtcagaaacctgggcatgccatgtctgaattctctgatcagagtttaatggactgaaattgaggtgactgccagaataaattcttcgctggaggctttggggaagaatctgtttccgtactcattcagcttgttggcagagtttagttcattgatttgtaggactaaggtcccagtttacttgctagctgtcatctagggtcccctcttgttcccaagtccagccacattctttgacacatagcccctttcatgttcaaagtcagcagtggggaaattctcaaatgtcagatcccccgagggttttaatctgtgacctccccttatgccactagctagaaaatactctcttttaaagggctcttgtgagtaggtcaggcccacctggataatcttcctatctaaggtcagttgatgtgggactttaattacatctgtaaattatttcttcgcagtagtacctagattagtggttgaataactagggaatggtgtgtgtacagtagtgtccaagaacctaagtgatcatcttagatttctgcttagtacacttagttgtctatgcagttgaacctattcttttcacttgttatctacacatttcctcagtgatgttttgttactttcatcatcttgaagagatacgacagatttttttttttttaacactttaagttctaggatacatgtgcacaacgtgcaggtttgttacatatgtatacgtgtgccatgttggtgtgctgcacccattaactcgtcatttacattaggtatatctcctaatgttatccctccccactcccctgaccccatgacaggtcctggtgtgtgatgttccccaccctgtgtccaagtgttctcattgttcagttcccacctgtgagtgagaacgtgctgtgtttggttttctgtccttgcgatagtttgttcagaatgatggtttccagcttcatccatgtccctacaaaggatggctgcgtagtattacatagtgtatatgtgccatgttttcttaatccagtctatcattgatggacatttgggttggttccaagtctttgctactgtgaatagagccacaataaacatacatgtgcatgtgtctttatagcagcatgatttataatcctttgggtgtatacccagtaatgggatggctgggccaaatggtatttctagttctagatccttgaggaattgccacactgtcttccacaatggttgaactagtttacagtcccaccaacagtgtgaaagtgttcctatttctccacatcctctccagcacctgttacttcttgactttttaatgatctccattctaactggtgtgagatgggagatatgacagattcttatgtgctctagtttggactggttttacttaggcttttgcacagctgttgtaactggattttctttcactgcctatcctttctgtgggatgtctgttttctgcgcatcatgtcatatcttttcttgttttacattctttttctgatggcagccatgaatggcagtagcattttgcaaaaatacataggaggtaaattttttgttttgagatattgcatgtgcgaaaatgtcttcattctagtttcaaattgattagtagtttggctggtataaaagtctaggtttccccctcaaaattttggagactttttttttctttgtcttaagacttccaaaattgctctggggaccctggagccattctaattcttgattcttgaatgtattacccctccttcccttttctggcaacttgtgtgatcatctctgtgttcctgttttcagtttcatgatgggagtgccttttcatctcactgttctggacacttggtggacatttcaggctggaaactcatgttcttgaatgctagatgactccattgtattttatttcttcctcttcgtatttttcttttcttactttctgaagtttttgttacttacatgatagatattctgaaccagtcgtctgattttctttgtttccttcctgcttttttttttcctctttctccttctgttctactttctagggaattttctcagttttatctttcagcctttttattgagtttttcttttctggtgacatgttttaatgcctatgggttcttttgtgttttcctgaataattcttttgtacaacattttgtttttgttttatgaatgcagtgttttctttaatgcagtgttttaattaccaaagatattaatgatatatttttccaagctttcatctctgcctggtctctgtttcttttaaggtgctgttttctatttagttagttgttttgttttctgtttttcatagcaaacattttaatcatatctgttgatcctcggttgccttctcttatttacttatttacgttctattatgaaaaatttaaagcatacacaaaaaaggaagaagagtgtgatgaatcctgaagcatcacccaacttcaagatcagcattttgtctgtataaatttaggagcggacactaaaaagctgagtggagggattgtgtgtgtggtgtggtggggaggcttgctgattgtggtgggttttttttttttttgagacaggatctcactctgttgcccaggctggagtgcagtggtacgatcttggctcactgcaacctccacctccagagttcaagtgatcctcctgcctcagcctccccagtagctgggactacaggcatgcaccaacatgcctggctaatttttgtatatttagtggagacagtgtttcatcatgttggccgggctagtctcaaactcctgacctcagctgatctgcccgccttgacctcccaaagtgctgggattacaggcatgagccactgctcccggccataattgtgtgtttttcttttaggatggtctggttgggttttgtaggagaatgttttcgggttaattttttaaggtctttcctcagtgaaggacccctcagtctcctacctgttacatgctgatgtaatcttcctgttttatgtcatatccctgttcttgattacctggtatctccctgtcttgaaaccatctgttttgtcttagcagaaaataaatagctggttttattctggttcagaggagggccagttatttgtctccttatgtatctggatgagatcttggcatcaaactgctttctaaacattttctagaagtcctcttattattaatacttccttttcactgtcctccaatcctctgtcccctaaatgcaggcatgcatatgcgcacacagttgtgcacacacacacacctctcaaaatacctggtgccattagttcctcagtcttttttctgtagtgtaaatcaggtagtttgtcttttcctgctcccctgctggattttagttttggtttcttagttggctaaatcagttagcacttgtctttcttcccagcttccaaagtgaattacttttatctcttcttattctgtctttgtatttctgtttttagttctttttttttaaatcctcctgtatccttttagttggctttgggaaagaacagtagtaaatgcatgtattgaaactgttcctctgttagctttctccagatgttaacatagtgatttctaacactgtgcattatttggtatagcaggaacatagagtacagagcttgtatagggggaactggtcaggaaggctaagcgaacatctcttgaaggtcagaggaagaaacgttacgatttttattttagaaaagtagtcagtgcaccactgaggacactagtttggaagtgggtaaaactaaggtcaaatagactaggagactgttaatcagaaaaaagatgatgagaacctgaattatggagagaaggggaaagatttgaaaaatatttaggagatatttcttcttctttgaagaagaaccaggaggtagccatgatataatttatcgctaggtagatagtgattcatgtcacttgagttaggaaatacaggaagaagaactgtgttttaggaagacaatgagttggttcagtattagaagttgagataaccttctggctgataatgtgctgtagttagttgattgtttggaattcagagagttgttgtagatatgatagatttgtatatcatcagtgtgttcatgggacatgagaagacagccaaggatactaccctgagaatggtatttggaggatgctatttttttttaaacttttcttctgtggaaaaaattatagattcacaggacgtttgaaagattgtatagagaaatcccatgtgtccttcacccaatttctccttacatgttatgtaattatagtagaatattaattctcccctctttaattattcctggtagttttcttattttaataaccgatgaattcatttttgaactttcagagtattgtaggcaatgtcttgtagttactgtgggcccaaagggtgcttacatttacttaaagctgcatatcagggattggacacattctttagccactagaattataaggtattgaatctcttcaagcattgattaagacagtgtgttatatagtatagtagaattagtattctactataattacataagatgtaaggagaaattgggtgaaggatacgtgggatttctctatacaatctttgaaagcagtgtgtttagcgattgcttacgttagttttgctaatgctagcatattttgaatacacatttaagtaagtagataaattttccaaggaaattttaagtctactgataatcaaaatgaacttgactgtttttttcttaatattctttcttttttgtttcatgaaagattgagctatggagagtgaaattgaagtgagttttaaggcccaatatgtactactctgttaaataatggcattttcataattctcttcctttggaaaactccttaataaagccttccaagtggtttttcattattaaaagggacaaaattatatttaacataagttctggagatttaatatacagtgcagtgactgtagttaaaaaataatgtattgtacactggagaattgcagataaaatcccaacaattgaacttagtagtatgtgtcatcaaaaggggaatacatatatactgtgtggcattgtaatttgctttgaattatattgacatttgaattacttcttaggtgaggaggtattttgtaatttatttggtttcctttttgtgttcatgaaattatagatattattatgttttacagattgactttttacccgttttgttttcttccaaaatacctactgtgtaatacattgaatcaacctccctaacagtaattcagcaaactagaattttagatcgaaacttctcttcttcttccatctttgtgttcttgattcattaaaaatgttatcaaaaattcttaaatatgttgaaaagataacaaaaacacctttgccctcatcccaacatcatcctttttcctttcctgtatctaagaagcattaacagttttttctgtttgcttccagaaacatttttgtgtatatcatatacagatatctagatatttaaaaaaattctttgacatgtggaattgttatacacacttctgcaccttttaaaaagaatttgtttgaaaatttaaaattctgtgtcaaatcctcccatccttttttttttttgtgtgtgtgtgtgtgtgaggtgaggaggtcgacagattcttgctttatcatgtaggttggagtgcagtggtgggatcatagctcactgactgcagccttgaattctagggctccagcgatcctcctgcctcagtctcctgagtagctgggactctaagcaggcaccaccatgcttggctaacttttaaatgtttttcaagaacagagtcttgccatgttgcccaggctggtcaccaactcctggccccaagcagtcctcccgccttggcctcccaatgagttgggatgataggcatgagccatggcattcagcccctaaaatcttttttaatggcttttcaatattcttgaatctgttccataattcggttactttactgatgaacatttagggtgggttcattttagattaattatttaggtgaaagcatctatagaatttaaaataccaatgttagtatgtcatctgtagagacagggagaggaaaatagatatttcttatatgtgcagtctattaaaatgaacagatgtatgtagccttgacatatatattttttaaactgccaataggcaattgaatagtattttttaatttttcctttccaattataaacagaactttgttttgctattacttgtaattaggaccttcctaaaaatatgattcatttttttaattggttttagggctttttgtatgataggtaattttttggtgcgggatgggacattagagtgtcttattataagttttatttatacttcccatagggattaggagcagacagcaagaacctgtaccctttcctgctcccagttattcaactgagtacagatgtttcacagcctccacatgtttatcttctggaagatggtttagaattatggtaagaggaaaaacttaataccatggatcttattttattcgtgacctttcctactctcatgccagtaaagttaaggtcatgtaatagggctttaaaaacagaaaatgtaaactctgtttcttcaaactggggcatatatctcctttttttggcagctgtcaatcagtgtaggattatagtagacaaagttaaagggggacatttcaataggaactcagctgcatttcatcttttggaatttgtcatgtaatatggggtcatggtaacttttccaaaaagttactgacttacaatttccagtctgttaaatgagatgtttgggggatattgaggtcctcttactacttaaccaagtgttgagatattataccttagctccaaatgctaatgcgacttacagtcttaacttactgttctactgagtaaattagtagtatgcgttattaagaggttaaaaaaaatgccctgcttctgtggcagctcggtgctacaaaggcttattgactgcccacggtgtgtaagcaactgtgctagaaaatccttttgctttattaagctcactttactgttggcaacagttttctccagagacaatctttcaataatacatgaaaagtttcaaaatcccattttgtaaattgatagtgcagttaaagaaagcaaatcatagaaatcaactgtaaaagaaatgaacatttgattctcttcatccctccctccctccctttggaactaactgtttttgttagatgtctagaatttaacagttttggttcttagaaattactttggtgcaaattataaataatgatctttatcagaatatgagatgaatgactttaaaactttactagttagatacttattaatttgtggtttgcgttcttcagaaaggtgttgttcgaacttaaatggcatgtatgtggtttggttgtaaattagcctgttgttgaaatattttatattcaaacacttatatttgtataaggatggattactttagatcagaggttggcaaacttgtactagacaggaccagatattaaatattttgggctttctaagtcacacagtctttgttgcaactatttgactctgctgtcagtgtcaaaacagtcatagacaatatgtaagtaggtatggctgtgcgccaattaaacatcatttatagaaataagtacgtgggtggatttagcccatgagctgtagtttgccatcctctgccctagattgtaagataaaatattaattcctggcatataaataattttgtgcaaacatgtagatactatatgatgttgaatgttagaaaaaatccaatattaaagagattagactcagaattatcagtattactgacaatatattaatgtgttattaaaagtgtagatattttcaagggattacattaaaaagtaataataaaaatgcacggctttgttaatggtaatgttttttcctagcttttagttacatgctaataaaaataaattattaggagaaaatttttttaattacctaatttgttaatagttgagtttctttaaagagagtacatccttcttcatgaatttttcttgatgggttagagtttatatttgaaatcaggcaaacataggtgccaatcccagttatgctactgcattatatatgtaattttaagaagttaatcatctttggtgaaccacagttttcttgtctttaaaatgaagaataattcctacccttacatggttgttgtgaatatgagataatgtttgctgaagtggttggcactttggatatggcattcaatgcctgaggataattaaagattgcctaagaagagaaggacagagaacattctggccagggcagaattctaatgaacttgtaacattttgaggacacgaggagccatctacaaagacagagaagagctgtttacttatatagtaggaaaaccaagccaagagaggagaatgtttcctaaaagaggagaaagtggtcaactttgtcaaatgttgctgattttcctagtaagattagtatagagatgtgaatttggccacatgaagatgataggagggttttcaccggagtggtaagaacagaaattagaattggaatagactgaagaatgaattgaaggtaagtccatacagactatgcacactgataacttgtttgagagcttttactattaagaggagcatagacatggggcaacaactgggtagtgtgggaaatgtgaagatctagaggaatgggtgaggctggattgagagagtgggataaatgaaggaggcaaaaaggggtgggattcagagctcaagtggagggggttgaattttggtagcagctgggatacttcatgcattttaactggaggcagaaggtggttttccaaattttgtagtggaatgagatagggaggtgttccatccaatagcttgtattttctcaacaaaatatgaagcatcgtctttagtggggagtaatgggctggattaggagtgtgcacaagatatgagaggtctgtaggtgagagaaggtataaagtagatatcttagagaatgggaatttgaatttattagggataaaaccagtacaccagttgatgcttggggtcacgaatatggagtgaaactttcagactgattatgtgatttatctcctactatggctttttattttcctcttgatccatctcactagagatttgtcagttactaggcttttcaaaaacaacctttggctttggttctctttgttgtatatctgtttcctatttattaatatctgctcttatgtttattatcttattctacttgctttaggtttatgggcttgttgtcatctgatctccattctaagaaaatcagctcatcaacttttagcctttcttctatcttaatataaacatttaatacaataaattatttttaaacagaatttgaacaaaagactttgtatagtttttttgtttctaagaaaattggatgaggtagtaatgaatactggtaagcaggcagcagtatcagctatatcttattaaatgtaatatgatcatttaaaaaaacaaatttgattgctttttgctatttactcaaaagatcatatctttctcttaagaaaaaacctttcttttaaaagaaacttgatttcctaggataaactttacttggtggggaattccactattaatgcatattataaacatttttctaacattttatctaattttattttttcttctattaatgatttggatctatgatctacattttgtgattctttttgattttatatcagtgctatgtttaacaatttaaaaattgttttcattgcactggaatgatttttgtgatatataacaatctattctttgtatgtttgaacaattaagaaaaggaactggaagtagacccgtgttgggggccaggggttctttacagttttgatagcatcatcaggttattccttagtttttagtttttatagccagtattagattttgaataggctttcccctcctttccttgctgctgtttcaacaatcaaaacaatccttgttttgagggttgggggatgtgaacagatagaccaatcacacacttctctgataacccaccgtggatgtgtattatgtcatggattgtggtcagattagtttgtaatttgcgtttgttgcactaaaccttccatgtatacgtattatattatggattgtttcataactgctaatgcggtcagattggcttataatggcctttgttgtactaagttcatatttattaagcatttagcataagttttactaacttattagcctagtttcccatcgaagaacacatcaattacatgtggcagaggaacatatcaagaaaatcagaacaacaaaataacttttttacctgtttgaccaatctgtaatagttatgcttttggtttattgttataatttcattattatggatactttagtatatacagttgtgtctttctatcaacaggggattggttccagggctaccacatataccaaaattcatgcatactaaagtcccgcagtcagccctgcggaacctgtgtatatgtgtatgtgaaaagtcagccctccatgtactttggttttgcatcctgtgaatactgtatttttaatcttggatttggttgaaaaagtctgggtttaagtggacctactcagtgtaaaaccatgttgtgcaagggtcaactgtagttactttccttactacctttgctatgtatgtagaaatattacataatttgcagacaggtttttattttgaggcatttggttaattctttcttagataatttttataacttaactgattatacacttacctttcttcatttaaatgagaccttttaaaatatttaagtcatatgttaatggctttaatgggcatggaaagtggtttaatcatctgtttttccttcctaggttagtaactttggaaaacagtccatgtattacaccagagttgcttcgtatatttcagaatatgtcaccacttcttggtatgtgttaaagcataaacttactaatgtttttgaatgcaaccataatttggaggcattgaaacataatttggaggcattacaacaaagttgtaagttcaacttctagtttagattcaggggatatatgtacacgtttgttacatggatatattgcgtgatgttgaggtttggggtacaattgattctgtcatccagttagtgaacatagtacctaatagtttttcaacctttgagttcctccctctgccctctagtagtctgcagtgtctatttttgccatgattatgtccttgagtactcaatgtttagcttccatttataaatgagaacatacataccttccatttttatttaatccctaatattgacaaataagtctgttggtgttgtttgttttgttttgttttgagacaaggtcttgctctgttgcccagactggagtgcagtggtatgaccacagcttactgcagcttcaaactactggactgaagcaactcctctagcttcctgagtagctagagctacaggcacacaccatctcatctggctatttttttcttttttggagatggagtttcactcttgttgcgtgggctggagtgtagtggtgtgatcttggcttgtggcaacctcccaggttcaaactgttctcctgcctcagcctcctgagtagctaggattacaggtgtgcaccaccacacacagctaatttttatattttagtagagacggggtttcaccgtgctggccaggctggtctcgaactcctgacctcgtgatctgcctgccttggcctcccaaagcgctgggattattagaggcaaaaaatgtccctgaggtataatgaatgacacactggaaaaaatagactcactctttgtaaataccagcaaatgtggactaaaaacaattgtaactgattaaaaaatcattttctcgccttatttgttggatgaccatggtggttagataatgtgattagttcttcacattttctcctaaattttttgttactcttttcaaataacaatcaaggtaaccatttgttttccaataaagagccatttgctctttgttatctagagtccccataaaaggaaaaacttaccaaagatgaagtcagtggcaataggtgttgatctactagaaaaagagaatagggttctttggtgaaggcctttttagttctgttctacctaacttggagactacataccatgctactttaggcagtccacagggcttctttatatttgacctaagattagacacctcagccagcccttttaccaactttgtcgtgaacaacattcagctgcttccacatatgtgtgatttcacatattggtctcatttcaccctgttttccacctcaaattcagcatgcttagtctccacaacgttcagttccctaagagtgatgggagagggattggtaaccaagaagaagagatttaaatacaaagcatatgacttactttactataactgtatgacactatttttagtgtagctttaggtaagtgctctaatgtagtggttttttttgttggtggtggttcgtttgtttgtttgtttgtttgttttgagacagagtcttgctctgtcacccaggctggagtgcagtggctcaatctcagctcagtgcaacctccgcctcccaggttcaagcaattcttctgcctcagcctcccgagtagctgggactacaggcatgtgccaccatgcccagctaatttttgtatttttagtagtgatggggtttcaccatgttgcccaggctgctctcaaactcctggcctaatgtgatccacctgcctcggcatcctaatgtgctgggattacaggcttgagccaccatgcccagcctgtggtgtagttttaatgatagaaatctttgtagctgatgcatatttcttaccaaatcaataaggacttttatgtgtttggaataatgcctggcacatagtaagcattatctaatgttttgctagtatgtttagtactattactgtcactattaacattactcccatttaaaaattatcctaccattgaccggctcttcaggatttgttactttactgaatcaagaactaatgaaatttcaaccttttgataatggatgttcaatttaaacttttttaatttttaaagatttaaaaagttctattttataaagtttcaatgaatataggtgatgtggattctattatttattttctacttttattgttcaaacaaaaaagataaacataatttgttttatgcattgtggtatgtgtatttacatcaataatgaagaaattctatttacaaattacatttgttcatgtttatttgtacatcttgacctcagtattaccttcatttttgtttgagtttgacatacagctttttgcatgtatattctttctttctttctttttttttttttttgagatggagtttcactcttgttgcccaggctggcgtgcaatggtgcaatcttggctcactgcaacctccgtctccctggttcaagagattctcctgcctcagcctcccgagtagctgggattataggcatgcaccactgccccagctaattttttgtatttttaatagagatgaggtttcttcatgttggtcaggctggtcttgaactcccgacctcaggtgatccacccactttggcctctcaaagtgctgggattacaggcgtgagccaccatgcctggccgtacattctttcatgaaagtttaaaaatttatttttaaatacaaccagaatatttaatcttttaagagtataaaccaaaatgaatactgtttttgtatgttaaattctcttattagaacagtgcttttaagctatctgtttattaagtatgataggtattatatttttctaagcagaaattaagccactgggctagttgcagtggctcatgcctgtaatcaggtagattgcttgaggacaggagtttgagaccagcctgggcaacatagcaagaccccatgtctacaagaaataaaagttagccggccttggtggcccgtgcttgtgattgtagctgctcaggaggctgaagtgaggggatcaaggctgcagtggctgcagtgagctgttactctgctcttgcattccagcttgggcaacagaacaagatgctttctctttaaaaaaaaaaaaaaagaaagaaagccactggcagaaagtttcttactttaaaacatataaagccaacattatagaacactttaagatgtttaagttaatggttttttaggatgcgttaattaagtatgaatatattcaaggctaagattcattttatgtccttttccctacgtgtaaatagaatctgataaattttaagcagaaccagaggctgtaactggacgttattatattaatttagttctaatggctttttttctttaaatctatgttatggtgttaatttacttagtattctcattacttaaaagatcagcatgtgactggctcttgtcctagttattgcaaatgcaacactaatgttcctttaactgtaaaatttttcagctggtaactttctatcaaatttggaaaggatgaagcaggtttctctagattctctataacataatttaataattcactccctttcctccttacagaaatttaaaggaatatatatgtaaaatacaaattaaatataggagcaaaattataaataaaagcaaatagtagattataaaataaaatcacactaaagatatgaatcatatatgcacagtgcataactaaatactttgataggttatatacaggtttaccttagagttctgtagaagtctacgaaaagaaaaacctagtcacttaaatcagggattttcagtcttggctctgttgacatttgggtcaggtaattctttgttgtgagggactttcctttgcattgaaggatgtttaaaagtatcctcagcttctacctacttgatgatagtgatgacaaaaatgtttctagacattcccaaatgtcctgtaggggacaaaattgcccctgactgcgaaccatagacataaattactcagtatctgaaagtaaatacctatctattgcatgattgaagtataacttcttggtattaggactagaaaatttttctttagagtctcactaggaacttgtggatgtaatgaacagtgtccagtaccttaaaacagataaatttgttaattttaaggctatgtataatattaatatttatttatttatttatttatttatttatttatttgatgatgataacatgcccaagaaaattttgtcagtgccatcctgggcatggcagaggcatggaaagcagtgtgaagtgacctaatttgtatagaacgatccaggaatagtttttaaatatctgtaggaagagacgggctcttttctttttatatcaagtcttcttaaatgttggtttttttttaaacattgattttgataaaattatacttggcaatgatttcaaaattatattccctgatacgtctggaatgaagccattctcagttctctcttaaatatagacccttggccctacttttcatggcgatggccagtctgctgttcattgttggtctacaaaaaaagtatgcacgagtccaggctttctccttgaggagaaaaggataatgtgaatttttcataatgatagctttatctaatataaaggccccctttatcctgagatttttatcttcttttgtaaaaagatacttagatgacagtttttggtttttttatgtcttttagattagtaactagtaataagtttatcatttcctgtccccttcttatcctcattttttaaaactgtcaaatcctaaagtttaggaactaatgccttcagagacattttgagacagggtaggattgtcattcttttgtgaaaataaatggaaaattcacatctgaatagaatgtcttctttttattaagatatgatagataagaacacaggggctaatcttttgccagaaattaagaaaaaataatttgtcttattttgagtgaatataatttctaaaatacttgcagcaaagaatggcaggttttaggcatcgatgatattttggggtcatattttaatctgtataattttacacgtacagcctgtattcctttgtattattattttaagtagtgaaacatgtaaaatagcacagtgtcaacttttgatcatattcagttttaacaaatagtttctactctgcacttgcaaaggaatagctaaaaacgatatccttttctgataaaaactgaaagattgaaaatatctaaacataatataatttttttggagtgtgatcaggactctgttgagaagtaatatcgcatatttagtgcaagtgcagtaacactcagtaaatgttcactgagtgaacccatttaagcagatgtcaaaatatgatggtaaaatgattcagtttcatgtagtatgccatgctagcagtaaaaatttattttgaaatgaaaggttgggtcaaatagttaggtggtttttttttctgaaaggaaaatatatggggagcttggcttttttctgaatgtttcacccagtgaaaagcaaatgaggtagcattaagctttgggttgataccagtattcattcattcattcattcattcattcattcattcattcattgagacagggtctcactcttttgcccaccctagagtgcagtggcgtgatcattggtgactgtaccctttaagtcctagtgatgccagtttttagatatctgtagatactggtagtcttgatagtactcggaagaggtttctagagtatgcaaattagttttaaataactatgaatcacttcatttaaactaattttgagcagtgaattaatttggttttttgtttgacatttattgttttggcagaactaagttcagaaaatcttagaacttgctttaagatcatcaatggttatatctttttatcatcaacagaatttttacaggtatgttggagtacttttgcattatatgaaattatataattattattttgattattatttgaaatcagggggtacgttttcaaaattttaagattggtctgttattttaagacagagaaacattgactgtgagcatttcccattgcagggcagatgtgctgcatgcagttcctttctcaatgcagaaaatgtgctatgtcaacaaattttttttatattcctatgaaaatcagtgtatcaataatctatatttttatttggcataatcttttttaacttttcctaagcgttctgattgaaatttgatatgcttagaccattagtgtataattctcaagtatattataatgaatcccaaatgaaattttatgcctttttgatattacagatatattcttacatatattgacttttaattgaatttcagacatacgcagtaggtctatgccagtccttttgtgaacttttaaaggaaattactacagaaggtcaagttcaggtgctcaaggtattgtgatcattttaaatgaatatatttatgaatttttcatttatattttatgaaattggactttcatttggatggttcgcaagaaggagaagagttgatatagttctagacaggctattttggcagttttcagttggtttaatacctgtggaccagaggtctcaaatctgaaggtgcatacaccttcaacaggcaagagatcaactggacatcttataaaaattcaattctggatttctaacaaggtctgaactgattgggatgttgcctatcttgagacctcactttgggtagtaaggatttaaaaactcttgtaaattatccagtgatgtgatatctgatacttcttattctttcattttgttagtctgctgttgggacaaagttttcacgttataatttgatagctttaatttaagttggctatcaaaattagaataccacgtttgttgatattctgtaattatgaactaacagtctctaagttgtatattatctttatatattatacctgtctattaaagatataaatagtattaaatgtatatatttacatataaacataaatgtatgtagaaatatattaaaatatctttatgtatggactttgagagaaggtgtagctgttaaaagtacccctatttgggtgcagcaaaccaacacagcacatgtatacatacgtaacaaacctgcacgttgtgcacatgtaccctggaacctaaagtataataaaataaatataaaattgattaaaaaaaagtacctttatttttagtgttgaggttctcagctatgttctaagatatgagagctgaatttctatcacaacaaagtagcattatggtgtgaaaatcgtggcattgctttagagcctaaaaatgatttcacttcctcccagtgaaatgaaagaggttacccaaagaggtttgcttacagaagtgcacttaggtaatcagagtaactgcagcaagaatccaaagtgtactttaggatctaagtgagtaaaagtttgcacagataatgaagtcttacttcataactgatatggttaggctttgtgtccccacccaaatcaccccatgatcaaggggattgtagggattactgccccctgattagttatctctacctggtctcctgagtcaagggaatcctggggatggttttccccatgttgttctcatgatagtgagtcctcacgagatctgattgttttataagggcctcctcccgcttcgctcagcacttcttcctgctgccctgtgaagaagatgccttgcctccctttcaccttctgccttgattgtaagtttcctgaggcctccccagctatgctgaactgtgactcaattaaacctctttcctttataaattacccagtctcaggcagttctttatagcagtatgaaaattgactcatacattaaccagtaagataccatctagatttgcgtaagcacagtctatgacgtttgcacaacagtgaaatcgcctaatgacacatttcccagaacatatccctgttgataagtggtgcatgactgtgtttttattcactgtcgtaactctgctagcatgaatcaggcgaatatagtgttaagtactgcagtgaagtgaacaggagtaaggagagaaatgctgttaggattgtctgctgagcatggggatttacattttaaaactaacatttaaaacgtatttttgtgtctgtaaattggaagggtcatctgccagattattgaagtattaaattatagattgatgagaaaaggaaggagcttaaggagatcagtaaggactgtattagtttcctagggatgctgtaacaaaataccacaaccttggtggcttaaaacaagagtttctttataatacttatgttaattatataattaaaaaaatcagtgtttgcagggccttgctctttctgaagggtctagggggagaatctgttccaagcctttctcttaccttctggtgattgcaggcagtcttttgcattccttggtttgtagatacgtaatcctgccatctgtgcttccgctgtcacatgatgttctcctggtatctgtctgtgtctctgttttgtttttgttgttgcagggacaaaagtcataattgattaagggcattccctaatatcttcatcttaccttgattacatctgggatacggcagaactctttggctttaattttttagcttattagtttcttttttagagcaaggggtttactaaagggtgagaatataagccactgttaccaaagaatcatgtgggctctaaaggacttgtaataacagtaatctgtgcttgtggcttgttgagaccctggatacttgaggcctggtttattggactagtctattaatccacatttattattaatttcaaagtattctcctagctccaaagcttacaagtaacatcaaacatgttgcttactaaaatgcctttatgaatttttattgcatttatgcctttattaaactgacacagtggcaatataagtatattaaggaactcagtcttatacaatttcagcttcagcttttgctttggtgataaattcttctctggaggtaagaggaagtaaggaattaatacgttggacttaattctgactatttgaggaaaaagtgattggtgatgtgggagtgattaaaacaagtgaaaattgccatgtcattttgatattattgtctttacagatttttttctgtatgtatgcctgttttaacctttctcctctattatactgagcttctccattatccaaagttcagtaaatgtgtgctctgtttgctctgaatacatatatagtaagtgacttgaaagacaaggaatccataatttttatgttgaagatgtgatctcgactatactgaggatccatttgggattctctgcttgaccagtcccttggtttgcgtatgctgccctgctacttttatggctcctgagtatactttggtcttcattttcctcagttattagatgaggagtgatactaaatgatttttattctgtaataggcagtacctgaaattctccatgttaaattgtaatatatgtattctaagtgattaagaaaagaggtgatttctcacatttaaacacttcccagaccaaatttgaattgaccttacccccatccccctcttttggcttttctgcaacaatattgttaaagtaattgttgaaagacaacttgtggattatttggaatggccattgtgattctacttgtttttaattatactcttaccacattattagagggagcgtagcatagcaggtaagactacacactgaagggagacttccagggttagaacattggctctgctacttcacagctatgtgatgtggacagattagtctttgttcctcattttccatctgtaacatggggatgataactttacctacttcctagagttgatgtgaggaatacttgagcttatatatataaacagttatagcaatgccaagcatgtaataagtgaatataagagctggctgtttttatgtaatatatagctgtctcattatttagtctctctatggggggaaataggctactataattttaggcaaaataatttggctgtagagaaacaaaccaagttgttccactttactctttgaccatttatttgaaataaatacttaagtacattaattaaatttacttttaaaactaagcaagttgtttatacaatgatggtatattattagcaagaactgcatatttcagctggctctttaaaataattaataattgtattttggtcgccaggtgccgtggctcaggcctgtaatcccagcactttgggaggctgaggtgggcggatcacctgaggttgggagtttgagaccagcctgaccaacatggagaaaccctgtctctactaaaaatacaaaattagccgggcatggtgccacatgcctgtaatcccagctacttgggaggctgaggcagggtgatcgcttgaacccgggaggcagaggttgtggtgagccgagatgacgccattgcacttcagcctgggcaacaagagcaaaacgctgtctcaaaaaaaaaaaaaaaaattgtattttgaccaggcgtggtggctcacgcctgtaatcctaacaccttgggaggctgaggcaggcggatcacttgatctcaggagtttgagactagcctgagcaacatggtgaggccccgtctttacaaaaaatacaaaaattagctgagcatggtggtgtgtgcctgtaatcctagctactcaggagtctgaggtgggaggatctcttgagcctgggggttggaggctgcagtgagctgagattgtgccactatactccagcctagacaatagagtgagaccctgtttcaaaaaaaaaaagaagaaaattaattgtattttattttattttttttggctgctcagaataacacaatctttttaaacatttttattattgaaaattccaaactaacttactgcatatcaaaaatctatagtcaaatatgtagtcattatttttgtaacgtttaatatgttacagattaaggcaatttctctgtaagtatgccaacagtaggttatgattaggatacagatacttgaattaacaaatttggagccagagatggtggtgtttgcctttaatcctatctacttcagagactgaggttataaaatcacttaagctgaggagtttgattccagccttctgcacaacatgacaagactgcatctctcttttttatttctttttattttttttatttttttatttttttaagatggagttacgctcttgttgcccaggctggagtgcaatggcgtgatctcggctcaccacaacctcaaaaaaagaaaaagaatgaaaaattgagaatctgatagtatgtgtttaagatggtatttttatacgaatattgctgtagctaaatctgtatgtttggtttaaaaatctcagaaactagattttattatttaataaatggatgttaaatcctaaatatgttcattatgaataaattatatttttatgttaaggaatattttaggacaatagtgctttcattttactgctatatttgaaggctgggcaaactcaaaatttttggcgttttcctgttcttagagttctagtatagcaataacaatagtttttaatattagctcattttcgtttttagtatctctcataccatttcttaatatagtatgttatataacattttaaatatattttttactaaatgtcattgttatactaatttttgacagtgtctgcaagtaatttctttgttctttgaagcagaaagttacaatgttaggaaaattggatagagagaccagtatgcctgcttttggagcaaatggtgtagagcaaaggatacgctttactttattttgtgactgaacatgttatctagaggaatgtaattataaaatactctaaattgttaacatttctcatatttgaaatttgtcaatattacagccgtactactatgactttttgaattctcattctggtcatggtcatattaagcaatgttaagccaagtttctttttttcactgtgattagacttaagatgacacaaatatttttaaggtgtaacttattgtgtaataataatagctcatactagcatttaacatatgctacatattctaagcatgtaaaacatagatgttatttaatccttacataaacatataatgatagtactgctcttttccccagtcttacagatgagaaattaaatcacaaagtggtgaataattttttcaaggccactcagttagtaagcattggaaccatgatataacacaagcattttgactttaggatccatgcgtttaatcactttgtatgcagtgtaggcctaagtcaagtaaattgaatcctgcatttttcacaaaagttttaagaacacagtctgtttcagaaggaatggtaccagctcctccttgtacctctggtagaattcggctgtgaatccgtctgatcctggagtatttttggttggtaggctattaattgttgcctcaatttcagagcctgttattggtctattcagggattcaacttcttcctgggttagtcttgggagggtgtatgtgtccaggaatttatccatttcttctagattttctagttaatttgcatagagatgtttataatattctctgatggtggtttgtgtttctgtgcgatcggtagtgatatcccctttaacattttttatcacgtctgtttgattcttctctcttttcttctttattagtcttgctagtggtctatcaattttgttgatcttttcaaaaaaccagctcctggatttattgattttttgaagggttttttgtgtctctatttccttcagttctgctctgatcttagttacttcttgccttctgctagcttttgaatgtgtttgctcttgcttctctagttcttttaattgtgatgttagggtgtcaattttagatctttcctgctttctcctgtgggcatttagtgctataaatttctgtctacacgctgctttaaatgtgtcccagagattctggtatgttgtgtcattgttctcgttggtttcaaagaacagctttatttctgccttcatttcgttatgtacccagtagtcattcagcagcaggttgttcagtttccatgtagttgagcggttttgagtgagtgagtttcttaatcctgagttctagtttgattgcactgtggtctgagagacagtctccaatcaatagaaaaagagggaatcctccctaactcattttatgaggccaacatcatcctgataccaaagcctggcagagacacaacaacaaaagagaattttagaccaatatccctgatgaacatcaatgcaaaaatcctcaataaaataccgtcaaaccgaatccagcagcacatcaaaaagctcatccaccatgatcaagtgggcttcatccccgagattcaaggctggttcaacatacacaaatcaataaatgtaatccagcatataaacagaaccaaagacaaaaaccacatgattatctcaatagatgcagaaaaggcctttgacaaaattcagcccttcatgctaaaaaccctcaataaattcggtattgatgggatgtatctcagaataataagagctatttatgacaaacccacagccaatatcatactgaatgggcaaaaactggaagcattccctttgaaaactggcacaaggcagggataccctgtctcaccactcctattcaacatagtgttggaagttctggccagggcaatcaggtaggagaaagaaatcaatgatattcaattaggaaaagaggaagtcaaattgtccctgtttgcagatgacatgattgtatatttagaaaaccccatcatctcagcccaaaatctccttaagctgataagcaacttcagcaaaatctcaggatacaaaatcaatatgcaaaaatcacaagcatttttatacaccaataacagacagagagccaaatcatgagtgaactcccattcacagttgcttcaaagagaataaaatacctaggaatccaacttacaagggatgtgaaggagctcttcagggagaactacaaaccactgctcaacgaaataaaagaggacacaaacaaatggaagaacattccatgctcatggataggaagaatcaatatcgtgaaaatggccatactatccaaggtaatttatagattcagtgccatccccatcaagctaccaatgactttcttcacagaattggaaaaaaactactttaaagttcatatggaaccaaaaaagagcctgcattgccaagacaatcgtaagccaaaagaacaaagctggaggcatcatgctacctgacttcaaactatactacaaggctacattaaccaaaacagcatggtactggtaccaaaatagagatatagaccaatggaacataacagagtcctcagaaataataccacacagctacaaccatctgatctttgacaaacctgacaaaaacaagcaatggggaaaggattccgtatttaataaatggtgctgggaaaactggctagccatatgtagaaagctgaaactggatcccttccttacaccttatacaaaaattaattcaagatggattaaagacttaagtgttagacctaaaaccataaaaaccctagaagaaaacctaggcaatacaattcaggacataggcatgggcagggacttcatgtctaaaacaccaaaagtaatggcaacaaaagccaaccttgacaaatggtatctaattaaactaaagagcgcttctgcacagcaaaggaaactaccatcagagtgaacaggcaacctacagaatgggagaaaatctttgcaacctactcatctgacaaagggctaatatccagaatctacaaagaactcaaacaaatttacaagaaaaaaacaaccccatcaaaaagtgggtgaaggatatgaacagacacttctcaaaagaagacatttatgcagccaacagatacatgaaaaaatgcccatcatcactggccatcagagaaatgcaaattaaaaccacaatgagataccatctcacaccagttagaatggcaaccattaaaaagtcaggaaacaacaggtgctggagaggatgtggagaaataggaacacttttacactgttggtgggactgtaaactggttcaaccattgtggaagacagtgtggcaattcctcaaggatctagaactagaaataccatttggcccagccgtcccattactggagatatacccaaaggattatatatcatgctgctataaagacacatgcacacgtatgtttattgcagcactattcacaatagcaaagacttggaaccaacccaaatgtccatctatgatagactggattaagaaaatgtggcacatatacaccatggaatactatgcagccataaaaaatgatgagtttatgtcctttgtagggacatggatgaagctggaaaccatcattctgagcaaagtatcgcaaggatagaacaccaaacaccacatgttctcactcatagatggaaattgaacaatgagaatacttggacacaagaaggggaacatcacacactggggcctgtcgtagggttgggggagtggggagggatagcattaggagatatacctaatgtaaatgacgagctaatgggtgcagcacaccaacatggcacatgtatacatatgtaacaaacctgcacgttgtgcacttgtaccctagaacttgaagtatataaaaaaaaaaccacacacacacaatctgttgcaggtgtatttcgaaagggaatgggtttaaactaaagtgcaaaagttctttttgtaataacaaaatgttgtcaaaaaacaattagtaataggtaattggatgattgaagtaccacaccttgtccagttacacagtggagtactgtgcattccattaaaaagaaatgaagaaaatcgctatatgagtttgagaatataagtaaggagcattgtctctagttttcttctgtttaaaaagtagaaggcagtggaagaataaaccaggtaattaaagtagctatctagcaaaaagaggaggagagggtgaaactagatctgtcaggatgtatatctgttttatattttagagtttggaaccatgtagaggtaaagcatgatttagggggaaaaataaaaacaattcctaaagatacaaaagagactgaaacatttgaatctaactgttacgatgttggtggcacagctatttgagaagaatatttcaagtcattttaatacatagtatttcacatgtacatccctggtgggatgtaacgttacaaaaaaagtaagtttgtaattacattcagtagtattattgtcatcagtaatattggtattgttattttgaaactcatatgtgtatatgaatagtagatagaaataaggttataggacctggcatttttcactataagagaaataatatcggaccatttcatatggatttcccacaggcacctcaaattcgtcatgtcagagtggaatgtcatcattattactgacatcacaattgtacccatttgaccaaacaggaaagctagaagcagtgaaagactttttcacctttggtccactgttcagcttttctatatgttgccagttctagttctgaattttctcttgattctgtcccataccctctgcacccaagtctgataatggtatttttctttcagaaactctcatcttctctagctacggttccagaccttttagaccacaaaaactctgttttatccctgaaatatttgtgtatacgactatgttatttatttactcaatcagatactgctttatgtggggattatttaatccttacattaattctaagtactcccttgccacaaccccctcctccctgctgctaaataaaactgtaaagattcctatggattggggccagccacagctatgtattattactataaattctcttcaaacccttttgtttttaaaattttaaccagaattttatatgacatagtttagagtcaactagatagatatataaggtttcttaaagaaaaaaactgtagacacctgtctttctgccatttttccttgctcagagacaaccacttttagtgcttgtagccaattgattcttttgtatctatgttcagatctgtaaataacacccctgtgttgttccttcatgagttgttaattgtaggcagtatgtattgatactgcctttgcacttcctctgtgccttcatcctccaagtaatcaaaattcagtgtttacgtcatgattcctctatttcttcttcaaagctgagacatgtagtcagctgtgattacttctccttttctgtacaatcttttgtattctctggaagtaatacttacctttttttggtataatttttttatgttcactaaactgtctgacagatgtccaatatgttcagacacatcaaggattctgttactttaattttcttgaggaagtctcttcagagccatgctgactcccaccttggggctctttcttttccaagtttgtagctgctgctgcttgttcctgttgttatgaaattttagaatgaggtgccgtaatgtaagtttatttaaatgcattccattgggcactgatgggctcttatagtctggaagcaatctcttttagactctttagagaaaatacactctcttcgttctcctggattgggcatcagttgtccagatactacagagttgaaaatatctagcactctgtttcttagacagactttcaaccagtcttattttctttcttcttatttttagcttcccctttctccttcccaaaagtataagattctgctactttctgtgttttttggagtggagaaggggagaagttatatgaagtaaatctggttgcttctgtcagctttctcctttgacaccttgggattcagctttctctgacttgagtcagtttcctcttgaatttctttcttgctttcagtgtttgtttctcattcctcttgtctttttaaaattatgctccccctcttaaaattttttttctgtaattttagtagggttttagatgggagtgaaattatacatgtatttaataatgggcaggtggtcttactttctactcacagataaatactgtctggtgatatctgcctctgtgactctctcggtctactagcttatctgtatattttccatgtttatcttttttcccagatctagttgtgtttttgttttttgttttttcaaaaaagtaaacttgagataaaattttattgtttcaaattttatctcctcttgcttttaatgaggaattgatatcttgtatacctgtatcttttagtagtagcatacatagtgcttgccacacagtatagtgtttatatttttaatcttttatttggaccttaccttcacttcttgctcaaaattagagcagcaacaaatgttgttatcaaccatggatgctatctgcttaccttgggactgtttcgaaatgcttggaagtattcttgatggtcgtaatttttggagtacactattggcacacagtaagcagacactggaagatgctaaatctccctccatgcatgggatgactgtaaatggttctcttcatacaaaatgtcagtagtccatcttgagaagcattaatggaagtcataagggaaacttggctttaccctgaggctgttccttgcccataaccctctcagatggtatctgtttccttccccacctctcaagcacttaggctggaagtgtggggtaaatgtccttcttggtcctttttgctgtttcgtgaccactgcattcttctcttcctaaatattaaaacaaaaataaacaaactccaccctgctttgaatttcatgcttacccatttttgttgtaaaagaaacatctcactcatatcaaaataatttttagtcaagttttcacatgtaacaatcaatactcatgactgatctgtataattatgaatgaaatatgatttctaatttaataaatatgcagtatatatgccacatgccctttttcctccaatttattgattaacttaaatgtagatttatttctaggcagtgagtataggtgttactaacttcctgtttagctatcaaaaagccaatgttttaaaaatgctttttgctgcctctattagtgcatcatttttaagggttatttgtttacattgcaagggtaagaattacattaactgcatatgatacctatgttattacaatgtgattaaatacagttgtatgcaagatatatagctgtgtgtaaatattatatacttcatatcaaactgcaattttaaaatggattatcttgtaaaagtgtgtctagtgtcagaatattgcataccctgcatacgtgtatgcattcttaaatttggtctgtgatacttattttagtacattgtttccttacatgtgtttttcataaagcaatgacttgcagtattatcaccaatctttctttctggtttttaggttgtggaaaatgcccttaaagtgaacccaatactaggtccacaaatgtttcaaccgattttaccctatgttttcaagggtattatagaaggggaggtaagatttttctttaagttccaaaggtagtgttagactataggattctagttttaattactctgttagatacagaaggaaagcttttcttgtcatttggatcatattaaattatgttaaattttcagggcggttagacacctttgccttttcctgttccacacagggaagcatagattttctttgacatgtgtctttcaaacatatgcatgtatgttcacacaaaaatcatttgaagtacaggaatggtgagtggcttaattccaatgcttgactactaagaatatgagggggacaaaatagtattaatgttcttatagactgaatatgttaaaccactggttattttctaagaacagctctcttaaatagatccatggacctgtgtatgttatgagtatttaaagtaatatagtaccaggaggcagaggttgcagtgagccgagattgcgccgctgcactccagcctgggtgacagagtgaactccatctcaaaaaaaaaaaaaaagtaataaagtaatatatgaaattgataaatagtatttttctctttattgtatatatatatatatatatggtgcatataattcatatatgtatttagtaagttagaactcaggcagtattgatagttcattctaaagagaagtaacatggaggagaatgttattttatatccctgttgcttgttactgtgtcagtgattgtttttacttgtaccataacacaattttacatgtgttgtattttaattgtacagaggtatcctgtagtgatgtccacgtatcttggagttatgggtcgagttctactacaaaacactagttttttttcttcactacttaatgagatggcccataaatttaatcaggaggtaagaatcaatatacttaaatttaaggaagtctttatctaaatataaattagaaatagtttgatgaaataatgagtctttgtaaaagtcgctttgtagtatttagacctttacattttaaatctttatttatgctgtatcaataatttggggtagaaaaagaatctgtaagtggcacttgaaacttatacatttttgtcctcgctcaaaataggtgattttattctgcttagcctagaatataatgttgatttgtttatagctgctgtttttcttcactgatacagaatctggaaacgggtattttgcatgtagtgatgtatcatctttgtattacttctttagttaacttattttttaatgccacagattgagagtatttctgttctgtttattgtggaaaatgacctttttagcaaaggtttatttttaaaaattgtagttgatatctgttaccagagtaagtttggaataggttttttagtgaggtgatttaagactatatatggccaggtgcggtggctcacgcctgtaatcccagcactttgggaggctgaggtgggtggatcacgaggtcaggagatcgagacatcctggctaacacagtgaaaccccatctctactaaaaatacaaaaaattagcccggcgcggttgcgggcacctgtagtcccagctacttgggaggctgaggcaggagaatggcatgaacccgggaggcagagcttgcagtgagtggagatcatgccactgcactccagcctgggcgacagagagaaactctgtctcaaaaaagaaaaaagaaaaaagactatatatgagatattcaaataagattatgctgtaagtcattaatctgttaagatttataagatgttgaagatatggtatacttgacgaatatatctacaatggagacaattttttaaaatcttttggtttatggctgaaaacaaatataactatttctaatacaaggaaatccagaataaggaagtacaaattttaaaatatatgtagcttttctagaattagactaatctaattagagatcccaacccttgttttgataaataaatagggtatatttttattagcttattaattttaattgaaatggggtaatatatattttttagttttttttttttttttaaagtagagatgaggtcttgctatattttccaagctgttctcaaatttctgagctcaagtgatcttcccaccttggcctcccaaagtgctgagattacaggataactaaaaatatttaagaacataagagaggaaattaaaattacccagaggaaacatcaggatgccattactatgtatttactttcttgtttccatgaggggcctggtcatgtttccaacatttcttgaaatatatgtccttcttcccttgcattagttcatgaagattcagtctgagatcacaatgagtaaatatttaatcaccaaagtcatggattaatctcttaaaaatttttttaattgacacataatagttgtagacatttatggagtacatagtgctatttctatacatacagcatatagtgatcaaatcagggtaattgacatatctgtcaccccaaacacttactatttctctgtattgggaacatacaacagcctccttctaactatttgaaactatatattactgttaactgtagttatcctgcagtgctatatagaacactagaacttattcctcctatctatgtgtgatttttttatcttttaaccaatatctctctctctcctcactttccccttacctttcccagtctagtaaccactattctactttctgcttctttgaggtcatcttttttagcttctacatgtaagtgagaacacgcagtatttctctttctgttcctggcttatttcacttaacataaggctctctagcctcactcatgttgccatgaatgacaggaattcattcttttttgaggtcgaatagtattcgtgtgagtgtgtgtgtgtgtgtgtgtgtgtgtgtgatattttctgtatccattcatctgtaaatgggtgcctaggttaattccatatcttggctattctgaacagtgctgtaataaacatgagggagcaggtatcttttcaatacaatgatttcctttcttttggagatgtatatatccagtagtgagattgctggatcatacgatagttcaatttgtagttttttgaggaaactcatattgttctccataatggctacactagtttacattcccaccagtagtgcctgagttccctttgctctacatcctttccagcatttttttttttttgcctttttgataatagccattctaactggagtgagatgatatctcattgtggttgtgatttgcatttccctgatgactagtgatgttgaccttttttttgtttgtttttgagacagagtctcactctgtcacccaggctggagtgcagtggcacgatctcggctcactgcaacctctgcctcccgggttcaagtgaatctctcgcctcagcctcccaagtaggtgggattacaggcacctaccaccccggctggctatgggatttcaccatgttggccagactcatctcgaactcctgacctcaggtgatctgcccgcctcggcctcccaaagtgctgggattacaagtgtgagtcactgcgcctggcagatgttgaccattttttcatgtacctgttggccattcgtatgtcttcgtttgagagctgtttattcagataattgttctacttttaaaatggattattatttttatttagctgttgtttgagtttcttgtgtatttcggatagtaatcctttgttggatatataatttgcaactattttctcccaccctgtgggatgttcttttactctgttgttggttgcttttgtcatatagaagctttttagtttgatagaatcccatttgtctatttttccttttgttgcctatgtttttgaggttttattagtaaaatcttttccctgaccagagtcctggagtgttttccttatgttttcttctagtaatcttatagttgtgggtctcacattttaagtctttagttcatctagagttgatttatgtatatcacgagaggtagggatctagttttgttcttctgcatatggatatccagtttttctggcaccatcgttgaagtaactgttttttccccataaatattcatgctatctttttcttaaatcagttggctgtaaatgtatggatttatttctgggttctctgttctattggtctgtgtgtgtttttatgctggtaccatgctattttggttactgtatttgtagtatatatactgtatttgttatacagacacacacttttttgggggggtgggggtggggagacagagtctagctctgtggcccaggctggagtgtagtggcagaatcttggctcactgcaacctctgcttcccaggctcaagcagttctcctgactcagcctccccagtagctgggcttacaggcacacaccaccatgtctggctaatttttgtattttagtagagatgaggtttcaccattttggccaggctggtctcaaacccctgacctcaagtgatccacctgcactggactcccaaagtactgggattacaggcatgagccgctgcacccagcttatgtaatatattttgaaatctggtggtgtgatgcctctagctttgttctttttgctcagcattgctttggctatttgggatttttttatggtcccatacaaatttttttttctatctctttgaaggatgtaattggtattttgatagggattgcattgaatctgtagattgctttgggtagtatggccattttaatagtattaatttcaccaattcacgaacatggtgtgtctttttttttgtattttttgtattttttttttacttttttatgtttttaaattttaaaaatttgctgttttatttaaaaattttgagagacagagtctcactccatcatccaggctagaatgcagtggcacaatcatagctcactgcaaccgcaaactcttactcaggtgatcttttcaccttagcctcccaagtagctgtgactacagatgcgtgccaccacacctggctaattatttatttatttatttatttatttatttatttatttatttgagacagagtcttgctctgtcgcccaggctggagtgcagtggtgcagtctcggctcgctgcaagccccgcctcccgggttcacatcgttctcctgcctcagcctcccaagtagctgcgactacaggtgcctgccaccacgctctgctaatttgttgtatttttagtagagacggggtttcaccatgttagccaagatggtcttgatctcctgacctcgtgatccgcctgcctcggcctcccaatgtgttggggttacaggcatgagctactgcgcctggccccacacctggctaatttttaaaaatttttgtagacatacagccttgcatgttgcctaggctagtcttgaactcctggtctcaagagatactcctgcccctgtctcacaaagcactggaattactggcataagccactgtgcccagccaccttcagtttttttttaatctagtttttaattaagaaaaagaaaatgtcatttgggtccatatcaacatttgatctgattaaatccaaatgcaatccagtgtgatattaaatcagttaaatgtaatttaacattgatatttttctttgggctgctgttagctttaaaatattgcatcatcatgcaaaaaaaatacatcttattgagtaattaaaatggcttaacttttgacaggcatgttggcaggcacctgtaatcccagctacttggggggctgaggcaggagaattgcttgaacccaggaggcagatgttgcagtgagctgagattgcaccactgctctccaggctgggtgatagagtgagactctgtctcaaaaataagtaaataaataaaaataaataaaatggcttagctttgcgtatcatataattaaagcatcatatgaggactactccagttactgcttggtaactttgaaagcaaacacattttaaggtttcagtggctgggtgtggtggcacatgccttgtaatcacagtgctttgagaagtctaggtgagaggattgtttgaagccaggagcttaagaccaggctgggtaacaaagcgagactccatctctacaaaaactaaaaataaatagagccccagaatttgaggctgcacttagctgtgatcactgcactccagactgggcagcagaacaggattctgtctctaaaaaaaagtttaaattttttttaaaccaaaaaaattaaaatgagaatttttttttaaatgaagtttcagtgatttggatatcacttccaaaacaacctactttttattacttctcattgtcctttacctgcaatttcctttcatcgtctttccatcctcttttatttttcctttccttgctctcctagtcttggatactccttccacccccagattcctactgtaattggttttgattgtttgttttgtggcttttttgtagcttgtgattattttacaaaacttctacttgatgagggctcagtattcttgttagatgtattcacatgtccagccctttctaaaatcccttggtacatcaggatcctgtccccttgaatatcttgggttttcacctcagtcgcctagatcccatttgaatgcttggcctcacttgtgagtgcccctcaatgtgttatctaaacattattgtcagtgtctctatatccttgataacaactctgggatggtcatgagctcttttttttttgagacggagtttcaatcttgttgcccaggctggagtgcaatggcgcgatctcagctcactgcaacctccacctcccgggttcaagtgattctcctgcctcagcctcccaagtagctgggattataggtgcacgccaccaagcctggctaattttgtatttttagtagagacagcgtttctccatgttggtcaggctggtcttgaactcccgacttcaggtgatccacccgcctcggcctcccaaagtgctgggattacaggcatgggccaccatgcctggcatgagctctttcttgcttaggaacttaaaatatacccctggtctctcacttcccattgacatatcatttgttttgacaggaaatcagtaatagaaatgtaagggaaatactgttattcctccatctataggctagtgagctaatccagatcttacaatgcctatttttccctctttttcttcccagttctatattgtttttatatccacacttcattgtgctggtacctagaatacattcctttccagaatgctgtgttcttattctggattagacatttggtcttctggattggacagctggtttgatatttttcacgttacactgatgaggtttgactggttcatatgtttgctgcactgtccgtaccccaactatggctgaaaagaactctcagccctctcttctctgccttctctcctcaggcttttacttttcagtctttcactcagccttctattttttttgtttgttttttcatttgttgagctagaattatagtaagtcacctagaactttataccaaggctcaatgtactgtggttttaaaagtgtgttttgaatccttgttaaattaattataaattctgcagcccagaactgatactcagctgatagatgtcagtgtggtcataccagttgttaaaatattgacctaaatcctgcaaattagcaaacagggtaaaaaatgactttaataagtgttataatgaatagtataaattttactgtaaaaaattgagcattccttttaagtattgtaaacacatgttttgaatctgcaggagtacagtgaagaaatttttatcagtaataaactatcaataataagctagtttagaacatcatctggtatatttaacaatttttgaagtgttcaagaactacgtaaatataggattcagtgcaaactaaaattagtatttattcctggaataaagaaacttttactatttcaacaaaaatatagtggcttgctattgctagtaacataaagtttaggtgcaaagatgcttaagaattatatcattaagaattgaagggtctaaattatattttatcagaatgtcagttattttctattaaagttccactggcaaaagtaaagaatttttgcaacagtcagggaaaaaagtaaagtatcatcatgaattgacaataaacagttgtgtttgaaataaaaaacgcagtttttaactatcaaaatgaacaaaaatactatcggcattttttcaataccatttactgtgtagttttaatagaatattttaacgaataaaatatttaataaaaacaaaattaatattaaaatgagagtattattacattgtagatttgtttccgacctcttagaaaacttgtatagatgtacttgacattgtgggtttggtgttccagactaccacaataaagtgagtatcttcatagcaaaagtcatatacattttttggctttccagtgcatatagttataattacactatactgtagtatattaatagtgcacaatggtattatgtctaaagtaataatgtttgtatctgaattaaaaataatttattgctagaaaattctagcgatctcagccttcagtgaataatgtttttgctggtagatggtcttgccttgatagtgaaggctgctggctgatcaggatggtggttgctgtaggtgtgggtggctgtggcagtttcttaaaataagacaaatgaagtttgctgcatcaattgactcttcccttcacgaatgagaggattgactccagttgtgacagaaattctactgaagactgaatggtcctcagagagcaagaaaaggaaaaataaaagaggattgaagcaagttgcaggcgaaggataatgaacagtaggttgttttggtagtgataacaaaatcactgaaacttcattttttttaatgatgatgatggactatttggtcctcagtagaatttctgtcacaattggagtcaatcctctcagattctgctgctgctttattaagtttatgtaatattctaaatcatttgttgttattttagcagtgttcacagcatcttcaccaggaatagattccatcttaagaaaccactctttgttgcttttgtttttgtttttgtttttttttcctcatccataagaagtaattcctcatggctgggtgcggtggctcacgcctgtaatcccagcactttgggaggccgaggcgggtggatcaccttaggtccggagtttgataccaacctggccaatatggtgaaaccctgtctctactaaaaatacaaaattagccaggtgtggtagcacatgcctgtaatcctagctacttgggaggctcaggcaggagaattgcttgaatctgggaggcagaggttgcagtgaactgagatcacgccattgcacttcagcctgggcaacaagactgaaactctgtctcaaaaaaaaaaaaaaaaaaaaaaaaaaaaaagagagaaaaacaactcttaatttgttcaaggggcagcaagacaggtagatgttcacactgctacttttcccagaccctcaggtttattatattttatagggaattgctgtatgtgctcttggcaagacaattaaaggtacccttccagaacatgcaagaatgccatatgcagcatagactataattagtgcagtaaagtcaagattgctttgtccttacactagggacactaaataaagcagaaatcaggaggccttcccaggactagggctaatcagaagccatcatattggattagcattcaagatggagtcatttttgtctccgcagtcagattaaagaattggcatacataattttcggggctggtaagtctgaattttgtatagcaggctggaaactcaggcaggatttctgttacagtcttgaggcaaaatttcttctttcctgggcatactgtttttgctcttagggttttcagtgaattggatgaagcccactcacattatctagggcattctcctttatttagcgtcaactcattgtaaatgttaatcacatctacgtaatactgtcacagcaacatctagcctagtgtttgaccaaacaactgagcaccttagcctagcagagtttatacataaaattagccatcacattctgtattatgttgatttgttttagcatcatttttagtgtagcatgcaaatgtcttaggaaataattcatttgttttcctttgaaactctgcagtttgaggttgcaacttgtcctctcctctgagggtagcagcaaattagtctagcaaattagagaacagtgaacagtagtcatccaattgaataaagaataatctaagtacaagttgacagttttgaaaaatgcatgttttttttaattgtaccagattggcagtgatttattaaatgatactactaaaatcactcatgggctacatacatgttttgaataagtctgcttagctgtcaggattaattagagtcagtttctggttttgctcaaattatccatttccagctcatgacttaaccccagttcaggtattccagttctgtggtttactataattgaattttaaccatgacttatgaggctttagcctttaaaagtatttacccacaagtaaaacatattttaggtattttgagatgcctcctcctcttgtttcagatggaccagcttttgggaaatatgattgaaatgtgggttgatcgaatggacaacattacccagcctgaaagaagaaaactttcagctttggctttgctctctcttctgccatctgataataggtgaggaaatgttttcttaaaatttgtttctttcggccgggcgcggtggctcacgcctgtaatcccagcactttgggaggccgaggcgggtggatcatgaggtcaggagatcgagaccatcctggctaacaaggtgaaaccccgtctctactaaaaatacaaaaaattagccgggcgcggtggcgggcgcctgtagtcccagctactcgggaggctgaggcaggagaatggcgtgaacccgggaagcggagcttgcagtgagccgagattgcgccactgcagtccgcagtccggcctgggcgacagagcgagactccgtctcaaaaaaaaaaaaaaaaaaaaaaaaaatttgtttctttcaagcatcaaaatgtaaacactatttttggccatcagtattgctgtgtgttgctgggcagtggtacttttatatatatggatgtgaattttgttagctgataatgatgtggtaaatgttggtctggatccagaaagcagtgagtgggataggtannnnnnnnnnnnnnnnnnnnaattgaataaagaataatctaagtacaagttgacagttttgaaaaatgcatgttttttttaattgtaccagattggcagtgatttattaaatgatactactaaaatcactcatgggctacatacatgttttgaataagtctgcttagctgtcaggattaattagagtcagtttctggttttgctcaaattatccatttccagctcatgacttaaccccagttcaggtattccagttctgtggtttactataattgaattttaaccatgacttatgaggctttagcctttaaaagtatttacccacaagtaaaacatattttaggtattttgagatgcctcctcctcttgtttcagatggaccagcttttgggaaatatgattgaaatgtgggttgatcgaatggacaacattacccagcctgaaagaagaaaactttcagctttggctttgctctctcttctgccatctgataataggtgaggaaatgttttcttaaaatttgtttctttcaagcatcaaaatgtaaacactatttttggccatcagtattgctgtgtgttgctgggcagtggtacttttatatatatggatgtgaattttgttagctgataatgatgtggtaaatgttggtctggatccagaaagcagtgagtgggataggtactgttggattgtgggggctgtagtttattttggttgtattcattttacaaatttatttcattcttgtctgaatttccattttttataattacgttttattagactaatcttcagtcctctgtttacatagatatattaaatatctaacatttcaaagtcaatagcacttcataaagtatgttataaagtgtgttaattcaacagtattattagttttgttttctttttattttggattatttctaaggacgtttgcaagttgttttttttcttctaaaacttctcactcccataaagcaaatacaaaatgctttggtttggtcatttaaagaagaatatgtttctttgttttaattccattttgtggagttcggcatgaaatacttttaaaaataaactttgacagtcagtacctagttctcattcatgctgtgtagattttttaaagtggtggcaggtatataaataacatacagcttcattggtgactcttcctcattacattttctggacaactgcacatggatgtggtatgggacattgcttatacttttggtttagtcagcttgattgagcttcatatcagtgcactcacctggagcccccttcgttttcatagcaaaattttgaaatttcttttagtgcatggtcagcacatttcttgaaacccacttcatggatgcacttatgaatgttggtggtatattctcaggtcaccaccttgttgatggcataacagccctttttgctgcccttctgtaccaaagccattatgctgggcccctatttttttgtacttttaattctaaaggcttaaaagcaggtctcagggcttgatgttgtgttaaaagaataatgatactacattagatctttatgtcttaggacagcggtccccagccttcttggcaccagggacctgttttgtggaagaaaatttttccatgaactgggggaggggaaggggatgttttcaggatgaagctattccacctcaaatcattaggcattagattctcacaagcagtgtgcaacctacatcccttgcatgcactgttcacaatagggttaccactcctatgagaatctaatgccaccactgatcagacaggaggcggagctcaggcagtaatgcttgcttgccctctgctcacttcctgctatgcagcttggttcctaatagaccatgggctggtaccagtccatggcccaggggttgtggaaccctatcttagggaaattttagagcatacatatactagtgataaattagtgacttaagtccagttttagaagtccttatttgttctttatgtattatttacttctactatggtaatttgtattaaggacatatgtaattattttgttgcaatatcataacaatagatagtacttagcaaatgccacatactttcctaagtgctttatgttggtaatttaattcttaaaacagcccgatgaggtatagacatgattatcccttctcacagagcaaacaattacttaaaaatgttaagtaacatatctaagataagagatctagcatttgacatggcataagccaatttgaacctgggctgcttaacactaggaatgcctcttttaaccaccaggtgatattgctccccaggtggacatgcacaagatgaaaagatttcttcactgtgaaatggtgtggcatcttatttatttttgaaagccaaatttaagttacctacattttaactcattggtgtttctttctctcattgggaaaaaagtgacttgagaattattgaggtttttaatattgaaatgttaaagaacatggtccttggtggtagtcagcactctgcttgttagataaattaatgaatggaaaaaaatgagttaataagacatgttagagttttctccaagataaagtactgagattattgaaagaaagctagaaatggtggaggttaagtttagaaagatacctaattgtatcagaaaaatttgttttacatttttaatgagaatactgtttgcttcaacgtataatattatgtaagtgtgtggttgttcaaaactatttttgacatgtaagttgtggaaatttaatataggttgagtatcctttatctaaaatgtttctttcagattttggatttttgagattttgaaatatttgcatatatataacaaggtattttggggatgggactcaagtctaaatgtgaaatttatttatatttcatatacacctcatatagtctgaagataattttatgcaatattttaaataattttgtatatgaaacaaagtatttgtgtgaaattttccacttgtagcagtattctggcactcaaaaaaatctcagatttgggccatttcagatttttggattagggatgctcaatctatcgttggcatctataagaaaaattaatacttagactgggacttaagtcaacttacataaattgagggataggactttattaagacttgaaattctcttaaacactggaattttaaatttaaaagttgtgaggtggtagccttgtgatggaagatcagatataatttttgtttttaagatgaaatacaaatctaatgggcattagcaaagtcatgtcatttttaagggtactgagaaagtcttgaataatgtggtagtagaattttaaagaataatgatttaacttcataatatccttaatagactagtgatgaaacattgatatagaaaatctgtatcaacctgtaacaatctgaaaaaaaaaacctttattgcagtagaaatttggcacatagtaattggcttgtgacttaggaagatttatagtcacatactgtagtggaacgtgctgatattcaagtcagcagttttattgtttcctatttgtaacctttattctagttaactacatagttgttggagttagggggtatttttcctcttctgcatcctcaatgatgatttcttatttttctacatactagtaatttcctattcttgcgtttcttttagattttacagcataccatttccttttcccaaaataaggcatgtctaaagtatgatgttgatgattttaaaagtcagactaaattgggaaatgtcattttttcctccttttattatgatggcatttgggtccagatgattattttttgtgggagggtgtcctgtgcattgtaggatgtttagcaccatccttggccactacctaccggatgtcagtagcactctcctcttcctcccaccccctcaagtcacgacaattgaaaatatcatcagacattgccattagatatccctggggacaaattgcccccagtttagaaccatgactctaaagaatgaccatttgggaaatggttaaactcttttactctaacccactacttttggcttagaaattcagtgaagactacagactttaggaccacactcaaatcccagggccatcagtcacttgctaatgaccatggtcaagttacttaactcccatgtgcctgtttccttgttcttaaaatggagttactaatagtatctttctaatgaggttgttgtcaggattaagattgagtttacatatgtaaggtcaaactgtctacatagatggaattagctgtccttatttcatccccttctttttctcatctatttaatgcagtacctaattctaaaagatgatttgaatgggaaagatatatttttgcatctgaaatacatagtaagttttgtattaagaaaatggacctaaagaaataaccaaattcaggccaggcacagtgggctcacacctgtaatcccagcacttttggaggccgaggcaggcagatcacttgaggtcaggactttgagaccagcctgggccaacatggtgaaatctcatctctactaaaaatacaaagataactaggtgtggtggcacatgtttgtaattccagctactcaggaggctgaggcaggagaattgcttgaacccgggaggcagaggttgcagttagccagtattgcgccactgcactccagcctgggcaacagagtgagactctgtctcaagaaaaacaaaacaaaacaaaaccgatgacaactttaatttcgattatgaagaaaagaaacaaactaacaccaagcactcttcatcattcccccacattttgattttttgatgtctcagtttatatctttttatattgccatttcttaacaaattgttgtggtcatttttctttttttcatactttaagttccaggatacaaatacagaacgtgtaggtttcagcccatcatctgggctttaagctccgcatgcattagctatttgtcctaatgctcaacctcccctccctcaccccctacccccccaactggccctggtgtgtgttgctcccctccttgtgtcggtgtgttctcattgttcaactcccacttatgagtgagagcatgcagtgcttggttttctgttcctgcgttaattgctgaggatgattgctcctagcttcatccatgtccctgcaaaggacatgatctcattcctttttatggctgcatagtattccatggtgtatatgtgccacatttcctttatccagtctatcactgatgggcatttgggttggttacatgttttcgttattgtaaatagtgctgcaagaaacaaatgtgtgcatgtgtctttatagtagaatgatttgtattccttttggtatatacccagtaatgagattgctgggtcaagtggtatttctggttctagatccttgaggaattgccacactgtcttccacaatcattgaactaatttacattctcaccaacagtgtaaaagcattcctatttatcctcagcctcgccagcatctactgtttcttgactttttaataatcgccattctgtctggcatgagatggtatctcattgtggttctgatttgcatttctctaatgatcaatgatgttgagttttttttcatatgtttgttgggtgcataaatgttatttttcttattaatagttttgttttggctaggcacagtggctcatgcctgtaatctcagcactttgggaggccgaggcaggcagatcacttaaagccaggagtttgagaccaacccgggcaacacggcaaaaccccatctctactaaaaaacaatacagaaaactaactgggtatggtggtgcatgcctataatcctagctactccggaggctgaggcttaagaatcacttgaatccaggagacagaggttgcagtgagccaaaatcgtaccactgcactccagcctgggtgacacagtaagactctgtctcaaaaaaaaaaaaaaaaggtttgtctttataattcataaagatatgagtgatatagtcacaattagagtataattttgaatttttgtctgtgtagtttaaaaagaatatatatatatgtgtgtatatatatattttttagtggcagagtttagcttctattgtccaggcaggccttgatctcctgggctcaagtgatcctcccacctcagcctcctgagtagctgggactacaggcatggaccaccatacccagctgtgtagttaacctttaccagggaattttatccatccagatgttttcttgttacattttaccattattttctttaagattgatgaattcctttcagcagtttttgtaagacaggcctgtggtgatgaattccctcagcttttgtctgtctgagaaagtctctatctctcctgcatgtttgaagtatatttctgctggttacagtattcttggttgccctttctttccttcagcactttgaacatgtcatccctcctggcctggaagattttcactgaaaagtctgctgccagatgtgttggagcccctttatatgttactggttttattgctgcttttaggatcgactctttgtgatcattgagaattagattattatatatatgtcttggaatcatcttatgtgggttgaatctccttggtggtctttgactctcttgtccctgaatatttatatctttctctggatttggaaaattttctattattattattattattattattttttttactatttctacccttttttctctccctcttgaaggtcaatgactcttacatttccttttttttttttttttttttttaagatggagtttcactcttgttgcccaggctgcagtgcattggaacgatctcggcccactgcaacctccgccgcctgggttcaagcaattcttctgcctcagcctcccgagtagctgggattacagggatgcaccaccacacccagctaattttgtatttttagtagagacacggtttagccatgttggtcaggctggtctcaaactcctgacctaaggtgatccgcccacctcagcctcccaaagtgctgggattacaggcgtgagccaccgcaccccgctacatttgctcttttgatgctgtcccatagatctcgtaagccttattcatttgttttcaatttttctcctcctttgattgtgttttgtttatttttctcttttgattgattgattgattgattgagacagggtcttgctgtgttgcccaggctgaagtgcagtggcacaatcatggctcactgcagcctcaacctcctggggtcaagcaatcctcctacctcagtctcccagttagctgggactacaggtgcataccaccacacctggctaatttttgtattttttgtagagatggggttttgccatgttgcccagtctggtcagacccctgagctcaagctatccacccacctcagcctcccaaagtgctaggattacagatgtgagccaccacacccaggctgactgtattttcaaatattctgtcttctacgttactcatttttttcttctgcttgatcagttttgctgttgagaccctctaatgcatttttcagtttgtccattgtagttttcaactctagtatttccgtttgattttttgaaaataaaaatacaaaaaattagcagggtgtggtggtgcacacctgtaatcccagctactcgggaggctgaggctggagactcacttgaacccaggagacagaggttgcagtgggtcgagattgtgctactgcactccaacctgggcgacagagcaagactctgtctccaaaaaaaaaaaaaaaaaaaaaaaaaaaaaattcaatatctttgttaaattttttgataagttcctgaattgattttctgtgttttctcgaaatttgttgagcttcctcaaaaaagctattttgaattctttgaaaggttgcacatctccatcttttcaggatagatcactgatgcattatttagtgtgataaatatgaaatgagatcatatttaggtgaatgttcttgatgcttgtagaggtatgtcagtgtctgagctttaaagaattagatattttttctgtcttcacagcctggccttgtttgtacctgtctttcttcagagggtcttcaggaattcaaaagggactgactgttcacttccctaagcctgtggatactgcagccattttagcactagagagtgccctaaggccaggtgtgctgttcaccagcctgagggacttgagaattcctagggttcccaggcaaaggcctttgctcacttttctcttccctcatatggaaggaatttctctttgtgctttactgtttggagttggacccagtactgtgatttattgtgggtggcggggaggggaggtgggtgctggtagtagcttccaaggcaaagctgtctgcaaacttccttctctctctcccccaagcacacagcttctgtctctgccctttactgcctggatttgggataggaatggtataggcaatgaaagactgttctttcttcccctttcaatgtgccctttcttgttctatgctaaaaccaggtactacgatctctcacttggtttctttagctcttgtggaggtattttcttgtctggataattctacagattattctgcaaattggtgttccagtggaggaatgcaaggaattggtcattggagggttctgttttgccatattgctctgcctgttctctgagtagttgctcttattgttgatgtttttactcaaaatacagcctgagctgatttctaacctagtttccattatctgattatatagtaatttgtggaaaggggcagtgaagtaacaaggggagggttctttacaatttttattttgccagagttgactgtaaaagaaacagtcttcatggggtatattgaatgatgactaatccctttcttgcattgttatgcgaggaaaatagagacatgaataagattactttgaagtttcaggacttcagatgttgaaattctgctcccttaccactctttgaatatatggtttacaaaggggctatatatctttagaagatcaaaataatctttacattatgtatgttttccttctttttatataatctaatgcaatttgtagtaattattggttctgattatttcagttcaactgggaaaaaaccctttgatgcagcttttatttttattttttgtataagctatgcatatgtatcttttggctcttgtgagtttggggactggttttccagcataatttgagtaagatacctatttttgaattggctaataattataagctgaattttgttagctttaatccagcagaagctggagggtgtagacgtgttagaacagtacaattggatgctcactcctttcatctgtatacaaagcaatttcattgaaaaagaaggtaaatgattaattccttggcttactgatttttcattgaagggttataatcatttataaaacttttttttaagcttctgaaagttctttgaaaaccagatattcccctctccactccccccaaaaaagtcccacactttttgaagtattttgaggtgtttctatcttcctatgttaggatttgaatggaaatagtctgttttggttttcatttttaatacaaatttactttacccttgaaacatacattagaactaaaatgctcacctgttcctcttctgatatcaaccttatgacactaatacaatagcattgttttaaagatgctattatgtggtagatcaccatgctgtgcactgagggcacattgtacttcacctttaggatagatgattgttcattgcactctggcatcttagaacaacaatttgtgtcttccatctcctgtcctgactatttaggaaagtttctgaatgcttgttaatttgatactacgttctcaatgctttcctcatatctaggaacagtgccctgtctgcaaattagataaaagcttctggcaaactgttttcttatgtaacagtcatattatagacactgagtgcgcttagctaatcactgaccattctgtgagacacttcttttaaacatatcacctaagaaaaactaaactgtgatcaaatgagattattttgatgtttcaggacctcaaactgctttacaatgagaataagagatgtttctcagtgagagtgaggtattgggtccagagcctcaaagtagttgatgtgatatagaaaaataattatacacagaataactagctccaacaaggataacactagaaaaagtactcagaggagtaaaatgatgagtctcgtgtgctttctagttttacccatgtagatgatgcatgtgtatgtcacaagtggttccttcatagctcgaggaacatcttttttgtttattttattttatttcattttattttttggagattcttttccttgagtttctgcttttattctatccagaataccagagagaaaaattttcattataatggaaaggaaactagatttagcttcagatgcctggtctgcctactgtttgtgtgaagttggaccagttttctgtcattctcagttttctcatatttcaaatggaagcagtgataacagctagcacctagggcttattatgataaattggagaatgtatatatgatgccttctaaaatgcttaatgaatatgaccactcagtaaatcattgtttctactgttaaatcaatttgaccaactgtgtgatgataccagcttattcagtaggtacatctctttcttttgaaagagtttatgtgtgaagaaactgataacaagaagtaaataataactaatagaacacataatttgtgatagccttttgacaatacatttttcatatacatttcagttgattcttccaatatccctatggggatggacattattaaactttttttttttttttttgagacagccttgctctgtcgcccaggctggagtacagtggcacaatctcagctcactgcaacctccgcctcccgggttcaagttattctcctgccccagcctccccattagctgggatcacaggcgcacaccaccacgcccagctcatttttgtatttttagtagagatagggtttcaccatgttggccaggctggtcttcaactcctgacctcaggtgatccacccacctcggcctcccagagtgctgggattacaggtatgagccactgcacccggccttattaaaccttttaaatgtgtaatcaagactaataaaggctaattacccacccaaagtcaagtaccaaactgaaattcaagtccagtctatcttactcttaatgtcttctctgccaggctattgagtacctcaagtaatgctcttttgcctaatttttctattccacaatctggttttactatttctgagtcatttttgttagtctgattagaaaatgagatcatattcctagatatttcattattaaagtaaggtacttcttccaaccacttaaaaccacatatctcgtttttatttaagttgttcataaaagggacaacatatcattcttctgtcctttctctagaaatcaagtgcatttattaagaaagtatttattgagactctccactgcattatagatacttatctggaagagatgacatagaaaatacattggaagtattatttggtgtttacaactctaaaatgctagcttattcacaggacacaatacctttaaactataatatcttgattttatagtacacaatcattgtgtatatgtatatttgtttatttatttatttatttatttatttatttatttatttatttttgaggctttgaggcagggtcttactctggttgcccaggctggagtgcaatggcatgatcttggctcactgcagccttgacctcccaagcttaggtgattctcacacctcagcctcccaagtagctgggactacaggattgcgctaccacacccggctagttttttgtgtttttagtagagatgggatttcgccatgttgctcaggctggtcttgaactcctgcactcaagcagtccgcctgcctgggcctcccaatatgctgggattgcaggtgggagccactgtgccaggcctttcacattctttcatagttagttatgaagtttggtcactgcacattgttcattttttgtttcattttctcaagttccgtttgttacgaaaaacctcctatcgtaaattatatacgaacaaaattttatatatggaaatgtggtagtatcttcttggggtgtaaagctttactgttttttttgagatggagtttcacactgtcgcccaggctggagtgcagtagcatgatctcggctcactgcaagctctgcctcccggcttgtagctgggactacaggtacctgccaccacgcccggctactttaaagctttactcttaatttctctgtctcatttttttatccattgtatgagggtaatcatagtaccctactttatagggctcctgtgaggattaaaaagagataatacttgaagaatgttgagaacactctctgagtcatagaagcactctatcaataaatagatctgatccagcagtagcaaaaggagttaatcctatattctgtttatcctaatttctctgcttcactaacctttctgactgtatactcctttttaaagttgtgagttagattttatatagggaatttttctgaattactgagtagctatattatactacatagtagaaatatgtgtgatctgtgagctgatggatgaattatgagcagtggttattgtagtgagaaagaactgctgatgcttctttggcgggtcaaaataatggagattaaatggtagaagttctgtcaaatccaagctataagatgtttcaaaggccagctgtgaaaaggttagcaatttgggtgccaagaagcagttaaccatattccaattacaaaaataggcatgattctggagttatttttcacacagtggtcaatttgactagtctcatgcctgacatagatagtattgtgtggagccttgatgcccctgcagtattgtacatatacctctcagccgtattgggtggtcttcagcactggtggcttaacattgagagttcccttaggggttatttaggttaatccttatttggtaataaactttccttctgtaacatctctgatggggatgttcattcaacttctgtttggatacttggctaataaaaagtccctggtccttaaggcatcccattttattgtaggacttctttctaactatagctatttgttatataagtattatcctcaaaatacaaacagtgactcccaaatctgtgcttttaactccatatgctagtttctatattcaatacagtcttcattcatgtaacttcatccattttataatattgtctgttgaggcaagaaaataatttcacaaaggttattatagttattggaagaggcttagctctctcatagccttattaaatcatctgttaggctaattactccctcctctcttcttctggtgcatgtgcgtgtgtttgtgtgtttaaaactttagggattttagggactatggtaaactggaaattgtaatataagcataaaataagaaccatcaaaatggaagggatttgcacgaaagagaaattctaatatagctcagatctgaactataatctgctgagtgagattagtctatctcagcaaaacccagaaggtggtggatagggtcagaagagagattagtgttccaaaggtttcatgtggagccaggggaaagaggagatattttgaattctaatccatctctgctagctttttctaagttgaaacagcccttctgtttaatagttctgctttctgtgctttgcagtgtaaaactatgccaatatacatcaaagaaatttatcatcatatactcgcaatgaggatggtacctaaaattgtccatggaaataaaatatgcttctcagaatgactgtgtaacaggaacagagatcaagaagttaaaaatgttcttctaaagtcatgctggggggtgattaataatgttccttgaaagtgtcctagtgtcagtacatccttagaaagtatcagtttgcttttaaagccgcatagtcacaggcatagttgaaattttatgcttctcatgcataaagtgcataaagtttattttttattctcataaatagatttgcagctaaaaatttcttagttgattttcttgttgacaattgagcaaatagagatattcatagttttgccatgttatggcagcacaatatttgtttctgtttttattttaaagcatacattaaaaacttagaaatggtgacatatcttggcagtaatgctcatggacaaattttacacggatatcatagctactgtcatgatattttcacttagaaattatttcagacttagaaaaacactgcaagaacaataaagaacactcatatgacctttacccagaatcacctgttgttaacttttgtcccagtttgttgcgtgatacacattttctgtcagataactagatagatgttttatattctgaaccatttctgtgtaagttgtatttgccatggtctcttactcctcagtacttacagtctaggaccaattattgttttagttcttgtgtttttgtagtctcttttactctgtcatgtcatttcctcagtcttttctttttctcttataacatttttaaataatccactccttataatctctctccatctttccaattgcctctctgtttttgtctcccatccatcctctccccacctcccccagcagaatagagtgttcctcatttgtggtttgatatttccttatggttagatttatgtatgcatctctcgttagaatattgcataagtgatgtgtccctcttggaatatcacaggcaaagtcacatggtgctcatctgtttctcactgatgatgttaatgctggtcaaggtgttatctgatttccccactgtgtatagttactatgttgttatttttttttcttgcaactgataagaggtctatattgagatatactgcccctcattaaaatttatctcctacattgagcaaaagaattctcaaattgtttgctaaatttttttttccaggaacacaagtccactttatttacctttcattagtttaaatctttaaggggttacagcatctatgtccaatggccttagcagaaggatcgctttggaatttggcaaaaaccatgccaatgtttccttgggcccaagttacctttctctagaatactctgattttgtttggtttgctgccaggagtcacttgttgttctttgctttgtgtgcgtaagcacatttattgcccaaatagaattcagtttcatcttgggcataaacaccttcagttttaagaagatttgtgtgctccctttggttccagagaccctgcttatagcgcaaaaatggccttggatgacagccttccagaaatacttgccttttagaagtcatgttccaagcaggcctcgacaggcttcatgatggcaggaagagctggattatttttaattgcaaatcccatttcacattttcattctcttgattttagttccatcagtgacttttaaggtccataaaatcagtaactgctgttattataagccattctttatatgtaaaccaatcttgattggtttatatatagatggtatatatctaaatacatataggctggacacagtggctcacacctgtaatcccagcactttgggaggccaaggtgggaggattacttgaacctactagttcaagaccagcctgagcagaatggcaagactccgtctttacaaaaataagaaaaagcatggtggcatgcacctgcagtcctagctactcaagaggctgagggaagaggatcacttgagactgggaggtcgatgctgtggtgagctgtactcacattgttgcactccaacccagccgacagagcaagactgtgtctcaaaagaatacatgcatccatacagatgatgtatatttaaaagagctaatggaacaattgctctgttatttatacattcttgtttttgtatggggagaatctgaatggaaaagagaatagttgtgtattaataccagaagcatgagatgatttgaagacaaaggcagtgtaaaagaaggttcagcaacaagaatgagaggaaaacagctcaatgagtcaatttcctggaaagaaatagaagactaatttaagaggttgagcgtagtgttcagtaatagttgtaatgaacattagtaatcagaaaaggataatgaggaatcattgttgatcagttgtctctaagaacagcaactcctaaatgaacagaaagactaaactttgttttgctggagataggaatttttttttaaaccattcaacctgagagttacagtgtactatttatatttgcttgttttgttgaagtcagtttagtttccttcagtttttagaatgtgagaagtgagattttattttgtcatttttccttaatacagtttcctaaaaattttacctttgcatcctaataagtgttctttactgctttggatatttttggcataaagaacaaaattaattcatactctggttatattactttgtgggttttttctctttaattttatttttatttcaaaggaccctttctctgaatttttcccaagaaattgaaaaatccatgggacaagcttcatatcaccttgtatattattggaagtactaaacaaaatggacctgagaaacatagcccctacctcaaattcatatcatttctgtcacttgttttgttttccatttttaatgcataaaatagcaataacagtaaccagccataatggataggtgtaagaatcataagtcattttgataacgatctgctatccagtatgcattgctgaatttttagtcatagaaagataatgctaggtattatttcagctttctaatatggacataattcatattatttctaaagtaattgttgatgtgaaatgaaactgctttaatatcaaaggatagttgtatacaattatataacttgatattttaggaatattatcaggctattagtaatattaataaaagtcagaattagaaagcttaagcaactagcttaaagttaatgaaagaaagttaatgactgaacaatatataatataaacaatttatatccgattctttaaattcttgaaaaatgacgttaaaaaattctccatttttgttctaaaagattcaaactgatacagatatatatagggtgaaacatcgcctcttttactctccccaatttttcttgcaaagataacctatgtcagtaagttggtatgcagcttcttaacatcttataacccaacacaaccaattagtgcgttactactaattagtagcttactaccaattagtacctcacgtattaagtagtactcagtattttttgcaaccaaaaatattttgaaaattttaaaaagagcactggaggataatataacaacatttatgttcattctaaattttttcccctatttttattaaaggaataaagcataaagtttaagtcttcaatgcgtatttaacacaacataaatattttattcattaaaaagtttacaaaaaattgtattactcgatatacatcttatttgaactagccttttccattcagtagctatgttgtttgatagctagagtctgttgattgatatttgggttctgaataactaatgttttcaagtatcctttaaaaactattatttttatattataggagatatttcaatgtgtatattaggaaaactctaactgcattctgaaaaaataagttcctgagatttccgttcagcaatacttttgaaacacagataaaattacttcctgtctcttagcttcctgtatccatggcaacctctgttttacacattgactgtaaaggaaccaatgtgaagagtggtgtttcctgagcaaacggtgacttaaaaaaaaaaaaaaaaaagtggtggggtggaggtcagcagtgccacagaacaaactggagttaagaaatgtcgttcttcagatttaaaaagaaaacctttactgaatcagctgagtgttaataatacgaatttccttttcttggtaagattatttacttaaatatgaacttctagctgacatgaaaaatagttctgtgaaaaactgtaatttagaatttaattgttctgtagtgaatttgtattttcataaattataatgttatttgatattagactttatgttgttaaagggacatattaaattcaaagattctcattcctacatcatttgtcacctgtgttgtaatcaattgtaatttttaagttaacttagcaaatgtttcattaatctgaactattttgtcaaatagtgggttaatggcctgatcatgttaataattctagaacgtattccatactcattattttttgctattaccatggtatgatttatgatagtattattggctgatcctaattaaaatagaatacagaagttatagtattataaaaaaaattcatttgatgaagttttcgtgatttaaagctttaccttctctttttatagccaattctgatctgaacagaaaatccaagaacagggatatgtgtggattacagttttctctgccttgcctacgactgtttctggttgttacctgttatcttttattattactccacaaagaaatacttggatgttcgtctgtttgtcagctctgcactgggagacaaattaactgccgtaacttaggcctttcgagtattcctaagaattttcctgaaagtacagtttttctgtatctgactgggaataatatatcttatataaatgaaagtgaattaacaggacttcattctcttgtagcattgtatttggataattctaacattctgtatgtatatccaaaagcctttgttcaattgaggcatctatattttctatttctaaataataatttcatcaaacgcttagatcctggaatatttaagggacttttaaatcttcgtaatttatatttacagtataatcaggtatcttttgttccgagaggagtatttaatgatctagtttcagttcagtacttaaatctacaaaggaatcgcctcactgtccttgggagtggtacctttgttggtatggttgctcttcggatacttgatttatcaaacaataacattttgaggatatcagaatcaggctttcaacatcttgaaaaccttgcttgtttgtatttaggaagtaataatttaacaaaagtaccatcaaatgcctttgaagtacttaaaagtcttagaagactttctttgtctcataatcctattgaagcaatacagccctttgcatttaaaggacttgccaatctggaatacctcctcctgaaaaattcaagaattaggaatgttactagggatgggtttagtggaattaataatcttaaacatttgatcttaagtcataatgatttagagaatttaaattctgacacattcagtttgttaaagaatttaatttaccttaagttagatagaaacagaataattagcattgataatgatacatttgaaaatatgggagcatctttgaagatccttaatctgtcatttaataatcttacagccttgcatccaagggtccttaagccgttgtcttcattgattcatcttcaggcaaattctaatccttgggaatgtaactgcaaacttttgggccttcgagactggctagcatcttcagccattactctaaacatctattgtcagaatcccccatccatgcgtggcagagcattacgttatattaacattacaaattgtgttacatcttcaataaatgtatccagagcttgggctgttgtaaaatctcctcatattcatcacaagactactgcgctaatgatggcctggcataaagtaaccacaaatggcagtcctctggaaaatactgagactgagaacattactttctgggaacgaattcctacttcacctgctggtagattttttcaagagaatgcctttggtaatccattagagactacagcagtgttacctgtgcaaatacaacttactacttctgttaccttgaacttggaaaaaaacagtgctctaccgaatgatgctgcttcaatgtcagggaaaacatctctaatttgtacacaagaagttgagaagttgaatgaggcttttgacattttgctagcttttttcatcttagcttgtgttttaatcatttttttgatctacaaagttgttcagtttaaacaaaaactaaaggcatcagaaaactcaagggaaaatagacttgaatactacagcttttatcagtcagcaaggtataatgtaactgcctcaatttgtaacacttccccaaattctctagaaagtcctggcttggagcagattcgacttcataaacaaattgttcctgaaaatgaggcacaggtcattctttttgaacattctgctttataactcaactaaatattgtctataagaaacttcagtgccatggacatgatttaaactgaaacctccttatataattatatactttagttggaaatataatgaattatatgaggttagcattattaaaatatgtttttaataatttgtgaacagtgtattcatttagcaaatattttctttgatatatactgtattaagtaataatagctaacatttctgtgtatcaagcactgtgccaaatatttcacatttcacatttaatctgtgaatagtcttgaaaggtggcactatttatactttacaggtgaggaaacttaaagtttaagtaactatgccaaattctcacagcttgtaacactttttgggcctctctgactagagttcatgctttcagttttatactatattgctgctttggttctaggattgtgatatgaaaaaaatagacgtggttcttattctaggtagagcttgaaatttagaggaggagatatatggttactgcacagtgcgatgataagtactgtacttggagatgctgttgagtataacatttgtggaggtgagagatggctttatgaagaaagtgacatcaaaactggatcacgaagaataaatagaaattagcccagtgaagagagctgagtaacatcgtgtcagaggggttaacagaagaaaacctgctgcttttcaggaactaaaattcagtacagctggtgtcgtgaatgatggtgtgcgatttaaagcccgaaagagagatcaggtgatgaaagctttatagttacatgctttatcttgagggcaacagagagccattgaaggatttttaagcagtagagtgaaatgattagatttaccctttagaaatttccctctttctggaaggaacaataaaaccggagccagaattaggtgagtaggaatctgaattgctaatccaggggaaagatgctagaggcctgggccaggatactggcaaaaaggatggatggatccagaggtactttgaaagtaaaatgaactgccttggtgattggttgaggcgtggcaggggagggagaagtcaaagatgttaggtttttggcttaggcagttttgtgctgtattcactaagctagggaaagaaaaggggtggggcaaaataatgagtcagttttagacagattgaatctgaggttcttattagatctccacatggaaatatatatcatgcagaaattcagaagcgaggtcttatggtaaaggccaatatttcttaaactttcatctgtccagtacactggaaatgtatgatgcaccctttacagtaacaataaccatttaagctgtggttttgggagataggtaagtggggaagaataagaccttgtagaagttgagagagtccctaggagatattagtgcccttgattaagaatctttaatatagatggtaattgaagtcatagaagtaatataatggttttctttattagcaaaaatttgtacttgcagaatatttgtactgcagaatattagggattatagtaagtgcctatgcttgttggttagttaatagtgacctgaaccacaaatatgtatttaaaattttttcttaatatatttgagagaaaatcagaaaggagctgaaaagtaattttaagatatattagaaattgcataaataaagccccaccaaccccaaagggttttcaaacaatggtttgcttttccctgcttagctgaatgcctttttggggattataatttcagcagaaaatgtgaatatatttaaataaacattatttttcctaagtaatttgttttgttatggaagagcaatctttttgttcaccttgagagacatttttaataatgtatttttttctttgttgtatcctcccaactcctacaaatccaattatgttttttctttaattactaaaagtacttgttcattgggaaaaaatttaaacagtgcagaaatacataaggtaggctgaaaacttctccatgcctcccttccttaccacctaaaccgtaccctcttaaagatgttcacaagcaacacagctggctatgtgaagttcaggaaaatttatataacaaagtatttttatcttaaaattcctaaattcaaagaaggcagttcagaaaatctatcaaaatttttgctttttgaaagtatagcttctaattgatttagactcaactagaaaaccaattatattaatatcaatttatatatggagctatagttctatacagtggtattcattaaatgttcatttcagtctttgtcagctatttccttttaaaaaatttttctttttttactaatcaaaagagagctggagtaagtagctacccccttgaaaaatgttagccagctcatatttcaccgttgtttggtagttgtacagttaaaaaacttatttaaggtataattgaagtgttacaggcataataattttcttgggtacaatttctgtatttcattgtttcacattttgagcagccctaagttaaaactaaatgatattctaaattaatatagctaaggaagctcacctttcttaagatttctgtatttctctaccatttactacaggttcttatctctaccatttattaaaagttcttgattagagcacccaaaaataggctctaatttaatgtgactgtgtctgaggaagaatagaatccattttttccattgagtattacaaattgtaattaaagttgcagggcatatcgaaagtaatttgttttcccctcataacaaatgaccaatattagaaatcaatagtatttatttataaactataaattaaaagcatataacttttaaatttataattccaatgtggaattttaaaaacatatctcttatttctgggatgtaaaactgagaacttactctcaacctcttcctgtcagtggagtagatacgtttggtgtcaagctattgatgagggcttcagtggtgatgggacagagacttcaatagtagtgatcaggagataggagaggctgggcacggtgattcacaccagtgatcccagcacttttggaaggctgaggaaggtggatcacttgagctcaggaattcgagaccagcctgggcaatatggtgaaaccccatctctaccaaaaataccaaaaataaaaataaaaaataaatctgggtgtggtggcctgtgcccgtagtcctagctactcaggaggctgaggtgtgaggattgcttgagcccagcgggaggaggttgctgtgagctgtgatcacaccactgcactccagcctggatgacagagcaaaactgtgcctcaaaaaaaaaaaaaaaaaaaaaaaaaggaaataggagcaggtcacagcaatagtaacaaggtaataggcattttttttttctatactagtgctgtactgtctgaagcatagctttttttgttttgttttttgtttttgttttttttttttaagtgcccactaccactggtcatcactttgctgaagctgataagcttgtgtggccgcacacttttaatgtgggaagcctggtaggttaaaagagaaatgttggagaaagcagtatgagagagaagaatgtatagtacacctgctgctggcccagatgtgccttgtttcattgcttctgactcaattccaagataccttgtgatagaggacattttaatttagtagaaggtagttttcttatcctgaataatgtggagaccttacgtatatatgttgtcttcctgttttctttggtctccatttcttccatgtctgtggagttttcagtacatgcacataaaccctagcctgttgttagtatgtatctttggctttgggcaaccttattgcttttttccatatattttctatgatacacaacttaatacataagttggtatttttgtctgagactctgaggagcaaacgtttttatgttgtagtgcagtttcctcaagctttggctttcaaaactcccttatcctcagttacctgcttctcatctatgaaagcatcctttaacaccattgtctagaatcaggaccatacctgcagtgttgttgttgtatttgtagtcttattataaatgctactgaccaggtaaatccaggccatacaattcctagcagatggaaagccccctgtgaaagcccggaaactagaaagtgttaatcaaagatagcctgtgaaggtggagaacaatgtgaggctaggtaaggtcagagagctgggcaggaaccaggtcatatatagggctgagtaaactaggattaagggtttggatttttaagtgtaatggaaagttactgaaaggtataaacttttgctttaaagcaaggaaaagatactagattttgtaaaagccttctagtgtgccgtatagagaacagattagaggaagtcaggagtggaagtttccttgttttggaaaggtaggcagtagtttaaactcaagacaaaattggcttgttgcacagtgttaatagtaggaatatagaggagtagaaacaaggaaaaatttcagagataaatttgacagaatttgttgatgaattgagtaaatggaagggtaaatgagaaggaaggtcaaaactgaattcctggtttctagcatgagtcactgggttgatagagatgctttttactcagataaggaaaacaggaagagaacctggttttgattctctgtttttggtttccttgtttttgttggggaggcactcataagtttggtgttggatctcttaattttgagatgattgtgagagtgccaagagtgaatgagaaagatgccagtgtacttagggttacagagcttagagaaaggtcattgagcataaagttttttggtcaactgtaatacattattattagaaagctgtaacaaaacagtaaacgtgtttatatgaagttgttagtttaattacacatatgtatttttaaatgtgaaattttgctttagaaatattttttcttttattcatgatacaatgttattcaaatgcttcttgcaaactttgacattggtgtcttcatcattatcagtcaaaattccctttgatcatgtaacactgttttccagagtattttatcttcattttgatctgagctgtgtggcatacaagacttttccaggaatttaatcccaagctacaattaccttttcaaataactttggtaacatgaacagagttggcctttttgatttgttcttaaaatatatcttcatcacctgaggtcgggagttcgagaccagcctgacggacatgaagaaaccccatctctactaaaaatacagaattagctgagcatggtggcacatgcgtgtattcccagctactcaggaggctgaggcaggagaatcatttgaacccaggaggtggagattgtggtgagctgagatcacgccattgcaccccagcctgggcaacaagagcaaaactcagtctccaaaaaaaaaaaaaatatatatatatatatatatatatatatatatatatattcatgattaccttgtaattatgtatagctttattttcatcagtttccgatatctacaatggtgctagctccataattaccaattctctgataaattccttttatcacttgaaaaaaataattctgtcaagtgactttttaagtaactattcaaaccaagtgtttttattcagctgaattttttttttttccagacagttctgtaccagcccttaatcatctccttttcatggaagcttagtatgtcttcattgggcattgttttttatagcaaaatcacacaggatggcagtttcttctcatgccatgacatatagatccttttagttattccttgtagtcttgaagataatggttttgttggaggagggcgacactgctgtgtgtgtgtgtgcactcaaaaaatgaaaagacaggtaagcaggggaatggtttagtagataaaagcctttgtaaggatcattattgaatgcaaaaaaaattcaactttcactttaagatagtgaatttccactatggttttttagcttattttcttgccagtatttttcaggggagctagatttattaatatacttttccatgaccatgcagaattactgtgtagaaaggatgtatgtttccatttaaacgacaaaagtatttgcaggctgtatcctggaaaatatctataggggaaaactttttttttttaactaggtaatgggtttattacatttttaagtgaataagtatttttaaagtattttcccagttttctaatataaaaaatattgagttataatacattctttaaaaagttctttggtatctttaacaatttttaagaatgtaaaaggatactgacatgaaaaagtttaagagatttagagactgttaaccccctcattgttcaaatgagaaatggtgatgatgctgacatttaagtagtgctctggtacatgtggcaggccttgttataagcactttccttgtggatactattatgcctccatgttactgataaggcaagtgaggcacagagaggttaaattgacttgcccaaggccgtgtagctagtcactggtggagcgacaatttgaggccctgatgctgaccacagtttcagccactttcatgaggtctgggagggatcagaaggcctctgccatctggttacttcaccagctctgtgtgttctctagcaatttcacaatcactatgcaggagtcactgaggcctcgaatctgctttgcagtcttcatcccaaattctgccaccctgaatgttttcaagcatggccttacagttggacttgatgtttttcaaatctgtatgcacttccacttcaaccacacattcctcccttgtgatcatgctcaaaactctaatatcctgtcttattataacttcacattttccagttttcttactctctaccactaaacttttttttttttttaatgtacagtgtcttgctttgtcacccatgctggagtgtagtggtgccatcatggttcactgcagccttgaactcctggcctcaagcgatcatctttatatctcagctgggactgagtagctgggactacaggcgtgcaccactgcccccagctaattttcttcttttttgtagagacaagggtctcactttgttgcctaggctagtcttgaactcctggctttaagtgactcttccacctcagcctcccgaagtgctggaattataggcgtgagccgccatgcctggcataaactttgatgtttgcacttggtgttatggggttttctttcgtttgttttttccacttttaaccccattctctacctgacccaacagatgccctgtggtcaactcagacttctcattcataccctcagctctttaaaccccgcatcctcaaactctaccagctttgcaagcttccaagcctgaattgcctgactcaatttctccatatgtatatctgcttagggtgtaaaatatagcaactaaaaatgatagaagtgtacagatcggggctgttacaaatctagggcattcaactgcagttggacctcactgccattgagcaatctttttgtctttggtcaaggccctctattacaaacattgaccacttggctccaactgcttactcacccacgtgcctaatacataacctcaccttctaattcacagagggaggaaaattcaaaatgcaggaacttctgcttcccactgtgtgcctccaagggagtgtgtacatctgtgtcctgctgcctcatgtacgaagatatccttgtgtttagccctgcctctgttatgatcccacttcatcccatctctgggatcctgctccttcagccacccctttggcacctgtactttcagctgttcagcctctactggtccatttccctcagccaaaaaacaccccttcaaccctgcactccctctagttattaccctattgtttccctccctggacaagcttcttgaaagaattgtcactccccttcctcagcttagaacctgatttatctgattacttgacttttggtgatgttggtcaccctctcatcttctgggataccactttcatcatcttccttcttatgtctttgctctctttgtatcccctattggattgagccgaagtcaccaacctagtcaagtcacccacccaagatgaaacccaacagtcatcctagactctttcctcccatttatctttcatagccaaattagttgccaaatcctgtgatgcttacccattaaacatctgtcaaacctacccctttctctttattcccatgtccaccaaaccatttcaggctgctaccatctcttctgatgtggagtgatcttggctcctcaccaacaatcatactcccttatgtggttctttttactgccctgggcaataatgatgctgaagggccccctagaggagaagtctgtgccagagaacaagagtgaccagaagagggggagaccaatggtgtccacccagcagagatatctcatgagatagactgaagtgtggcccctagattcaaaaattgatgtcatctgtccatggagtagtagggtcaaaagctgcattgcggtaggctgacgggagtcctgggaagcctagaaactgagagtagctagagatgacttcttccaaaagatgagctgtgggctcagtggaagccctctgaaagcagtttctcagcacagtaaggtcgaagtcgtctccagtcaagcctggagcactgccttctgggtttggtcagtataaagttctggatttcagtcttggctttagccgctagcagctgtggggacactccaccatctcagtctttattacttgccaattgtagcagctttcagctaagtttgttccttgctcaggggctgttccagttgtcagctcttcctcctctggtagggaaagtggaaaactatttttttttaatgttaccactgttacagtctctactgttgtagaaattctggattaaaactaataaatcagggcttgtttcttcctttggctatttcaataaattgttgttctttacttaaccctgttggatgatataagcagataaatacagttaagggaatattttatttggttgtgggttttagtgcctaaaaacttgtttagtctcttaaattaccctaacttgacctacttcctgtatttaaaatgtaataatgcaagaatgactttaaatattaattaggtaccatgtataaatagcgtaattatggtctggttggatctgagaaaattctaaggtgattaaggttgtgattcatttctgtcttgggattgctattattaaaaagtgttgcatcattaattttagcttagataactattttgaaaagttaattgaaaattttgtctgtgttactgcctgcctgttttccttcttggacgttataaaagtctgtaaagtctgcacttttatagatttacctccttaatgtataaaaatttaaaaaacactaaattttttaaaatttcattgcaatttaatttgaatttccctaatgcctaatgattttgagcatccttttaggatgctcacatgccatctgtgtatcttctttggtgaaatgtctgttcatgtttttgcctttttaaaaaaaaatgtttttgttctgtttcttttaagagacaggtctctctgtgttgtccaggctggagagcagtggctgttcccaagtgtgatcatattgcactgcagtcttgaactcctggcctcaagagattctcctgccacagcctcccaagtagctaggactataggcttgcaccactgcacctgatgcctattttaaattgaaattatttttcatcttattgtgttttcagagttctttttacatcctagattcaagtccattaccagatacttgttttacaaatattttcttccagaatttggcatgtcttttttcttcacagtgtcattagaagagcagaaatttttacttgtcaatactctatgtctttatctttgtagttatataagtaacataagactgttataaatctaagaatattaaaatattcctttactatcgaatctatccatctagtatttaaacatactaattagtgaaaaagaattttgtgatgttataggcaaagataaactttttgttataagaaatagattttgaaagtttcttttgtatttcacagctgaaatttctcttcatgttcgagaagatgtttaggaaaaaaaaaacaaaaagaattaatctagtattccagttaacctgttttgcttttcttttattctagtgttatccaagataaattctgtgggattataaacatttcagtagaaggcctgcatgatgtcatgacggaagatcctgaaacaggaacttataaagagtaggtgcattatttaattaatcataattggacttgggggataattaaatacatgctgcatgatttttttcaccatcactctataagcacagtatgaaagttttataatttctcttttatacagaaacgtttttgttattttgcttgtaatatttattgtttgatcttggtatcaccttatttatttatttattgagacggagtttcactcttgtggtccaagatggagtgcagtggtgcgatctcagctaaccgcaacctccgcctcccaggttcaagtgattctcttgccttagcttcccgagtagctgagattacaggcatgcaccaccacacctggctactttttgtatttttagtagagacggggtttctccatgttggtcagggtggtcttgaactcccgacctcaagtgatctgcctgcctctgcctcccaaagtgctgggattacaggcatgagccaccatgcccggctggtatcagctttattatgttacagcgacaacctgaattgagctgctttgatttactcattgtttgatgattaagtttttaaaatttcaaatatattttagtctataagtctttttcctagtatgttctgagcatgctctttttttttcagttttgctgtttataaagccatctctagcaaatgggaaagattgtcacttgaatcatattttgttgaaaaatatggatagcagatatatgttgttgaatcttattaaacatattaacataatgtgtctgatatgtcacttagcttttgagaaaactggagtttgtatgaagtggaaacatcaaattttttgagactacaaaccaaaaacaagaaagcattcaatgtaggcaggtttttttctttttaagttaatgtaagggtttatggctgtattagtccattctcacgctgctataaagaactgcctgagactgggtaatttataaaggaaagaggtttaatttaactcacagtttcgcagggctggggaggcctcaggaaacctactgtcatggcagaaggggaagcaaacatgtcctttttcacgtggcggcaggaaggagaagtgctgtgcaaaaggggaaaaaccccttatgaaaccatctgatctcgtgggagctcactcacaagcacgagaacagcatgagggtaatcgcccccatgattcaattacctccagctgggtccctcccatgacacatggggattatgggaattcaattcaagatgagatttgggtggggacacagccaaaagatatcaatggcacacgactgtaaattgtatacttaatatgtgacaaagtttacaactcaatgtgaaacatttaggatatgatcagatgttcctttgtcctctttggagtatacagtttagttgaggggaggacatggctgatagcacagttaaaacactagtgatgaatgcagacagttatatcttgttttgtgcagggcacaccaaacagtacagttctagattttgctttaatagtcagggaaagaaaaaaggcactatatgttacagtcttcagggaaggataagggttaggatgtaggaagtagaacaaaattataacatgttttaactggaagaggtaagaatctgaaagttactagaaaatttagaaattatctagtgcagtctcatggaattaaaaatcaggatatccaggccctgaaaagttagctgggcacagtggctcctgcctgtaatcccagcactttgagagactgaggcaggcaaattgcttgaggtctggaattcgagaccagcctggccaacatggggaaacccttatctctactaaaaataacaacaacaacaaaaaaagtggagtgacacagcagatttgtggaagagtcaagatgagtcaaggtctccatgtgccaagctcagccatgaagaaaaagttttgttttggaagagggaatatgttggaagtaaggaaaacaaaccagttttaggatcccagctaaaaggcctagacttgagcattagtattgatgagtagctggaacatatctgaccactggtttcttttatccccagaattgtttggtgatttctttttattctggggtggtactttgcatatagaaacacagttgagaaataaattaccaagagatacacttttctgtgtctctgtttcaaagagtggttagactagatctctattaaatcttcctacattataattctatgaattaaatagagttctataagttacagtccatgagactataaggcataaataaactttcagaaatgcctgtgtgagaaacataaaatacatacttatgtagctaacttggctttcaacttccccttcctgtttatttaaacagtttattcaaaaaagttaatctttctggttctgttgaattcttattatagtctcttaactgagtgaattggaaaaaaggaagaaaactctatttccttcacctacatcagtagtgtactagggttctccagagaaacagaaccaacaggagacaaaaatatgtatatataaagaaattgattgtaaggaattggctcacatgattatggaggctgaggagttcaaaatctaccatcagcaagcttaggacccatgagagcccatgatgtaagtctgaggtataaatctgatcatgtccctccagtgtggaaatcaccagtggacctccattgagtacagaatacagtccacagttctttgtatttcacaaaggttacttaactggttggctctgaagacggaagaagtacagtgtcccagcttgaagcagccagaggatgaattcttcctcatccagtcagttttattcaggctttcagtggattgactgaggtctacccacatggggagggcaaactgctttacccagtttatagattcaaatgctaatctcatgcagaaacaggctcgctgatacacccagagtaatgtttaaccagattgctgggcactcagtatctcagtcaagttgacacaaaattagccatcacactaagaaagccttgttgacagatcatctttttattcaaactgtttacaccaggcactgtgtagtgtgaggaagcaactgagtctctcacctgagagagcccacaacctagaaggggagacagggaccaatggagcaataccaggtgcaagagagaaaggagtccagggaaactgagaatcattcttaaggatatgtagtggattggagccaactagttaagtaacctttgtgaaatacaaagaattgtggtctgtattctgtagtcaatggaggtctcctggtgatttccacaccggagggacatgatcagatttatacttagaaaggtcactttgatgcattgtggaggacgacagaaggggtagatgctggtgcgtggtctcagaccagtggaacaacctggaatgcatgttagaaatgcagattctccttcctcagtgcagactcattattcagaatctttgggggtcacacagtagaatctgcattgcaaacaggaactgtgatgtttcatatacactgtaaatgagaacctactgctgtggaagtgggaaaaccatttaggtagctgttaaagtagtcttatcttggtgagtggtgatgagatgaatttgagatatattttggaggaaggattagcaggaaatggggacaggtaggtatggctaaagaggattgaaaggtgtttacagtttgggtgacatatgacatacacatgcatatataatttttaaaaatagttgtgcttatacctgtagcctatgcttatttttataccttgatttgtcctcataacatattgaacaggcattttaaaatttaaacaacattctgtgtggaaaaaaatggaaatgggcttttattttcccttctaatgatccctctttttttaaagttagaaaagttttatcttccaagataaatggatagtcaacagttgcctattaacgttgatactagtatttcttcagagttgtacagaaaatgaattcttttggaagaaagaagaattccattttgagagttgaagaatgtgtttatttgttggggttttgttggtgggtttgtggtttggttggtttttgtttttattatttttttagctagagtttttattaagccaagaaaatacattgatggggctagagatttgccttctttgctttctgcttgtctggttagagtatttctcttttatttccttcaataatatttttgttgaaaggaatattgggaaatgaaattgacaatcccttaccaaggtttgggaagtaaaaaggaagaaagaatttagtggcccggcgcggtggctcatgcctgtaatcctagcactttaggaggccgagacggtagaatcgcttgagcccaggagttggagaccagccctggcaacatagtgagaccctgtctctattaaaaaaaaaaaaaaaattgaaaatcagccaggcacatgcctttagtccctgcttagcagctgcttgggaggctgaggtgggaagattgcttgagcctgagacatcgaggctgcagtgagctgtgattgcaccactacactccagcttgggtgacagaccaaggccctgtctcaaaaaaaaaaaaaaagaatttagccagcattttaagaagcctagaggcactaaaatttgactagaaaatgactcataaattgtttttatagctagaaagtacaaaacataccaagtataaaggaaatagtcttatttgaaactattctgtagtcagtggaggtccactggtgatttccacactggagggacataatcagatttatacttagaaaggtcactttggtccattgtggaggaagactggcggggtagatgttggtgagtggtctcagaccagtagaacagcctgggattctaaaagttaaaatttggcttttataaggacttttttctccttcactcaatacattgacccactgaacggctcttcagaatagaatagagaatactagaagaaatgttggttcctggattctgacatctgtatattatcttaacttgtgtagatcctagtgacctccttaggaagtctctctctcttcagttttccccctctgatccattctgccccacttaaaattaaaagctgagtttcttacaggatcaagttaatggggctctattctgtgctgactcagacaccagctttctctcttgtctccctggattcttcatcattctgcaaacatgccatacacttatggcttgactaataatatttctgctccttggtgtgtcaagcccttatcctccttcgcaaatatctacctctaaaattgcattccaggcttataggaagaattcattccatctttccctgtttcttcatggcactttgtctttactgctaatatacaatatttagttgcttatattcagtctagtgacggtaagaggatttgagacagtgcaaaagaaagcacatgctcattataacagaaaactattaacataggattgaagggatttaaataagaaaccttgatttgggaaacctgtggcatcaggatataaaacttagctatatgctttctaattaccaggataaaaaaaagaaacattaggaattacatgggtcttattttcaagtagaagaaagtaggtttatcaggtgttaaacttaagacaaattcaatttaacagagtttgattaagcaaagaattgttcacaaattgggcagcccccagaaccagaattggttcacagtgtcttcagggctgtacctggtcagataatatttatgagcagaaacgggaaagtgaggtacagaaaagggaaatagggtactgaaacagctggattggttacagctcagcatttgccttatttggacacatgttcaacagttggccacctatgattggctaaaactctgattagtacaagaaaagattacaatctctacacttccagttaggttacactttactgtgtacgaagagaccttcaggctgaacttaaaatgtgtgaggaagaaactttaggctaaatgtaatttaacacaggagagggagactcataatatttcttctcactgagttgtcatgccctgagcccagaagtgcattttttattaatatttatataagtgactatacaaggactgtccgttttaacaataaagaattagttgtttctgatacactaatgactgtaggtaagtgactccaggattagctgactgtggccttagcaacatcatcaaagcctgagtttttttctactccatcccctcagcatattaacctcatctgcaggctaccattcctcatcgataaaaagtagttctaggcattacagttcatgacaatgccactgacagataagtaatcttcttccttatgtcttttttaagatcaaggcaatccttttctggaaatcattgcattagatgtcttcttatgtctaattggccagaattccttaaacattctcctgctgaaagtaatcattgaccaggggaatgggatctccatgattgcttattgaactactggcactggggggctgggatcagctttttctgaaacagtggtagcatgggaaaagaggataactgtacagattcagggttcaattaggaaagaggctgattatataggtccactacagagaccaactgaacaatgtcagttttgtcttatgtgaaacgacccataaattgtttgcttgcttgcttgcttgcttgctttctttctttctttctttctttctttctctctctctctctctctctctctctctctctctctctctctctctctctctctctctctctttctttctttctttctttctttctttctttctttcttttctttcttttctttctttcttttctttcttttctttcttttttttttttatggagtcttgccctgttgcccagcctggagtgcagtggtgtgatctcggctcattgcaacctctgcctaccaggttcaagcagttctctcatctcagcctcccgagtagctgggattacaggcacgtgccaccacgcctggctaattattgtatttttagtagaaatggggtttcactatgttggccaggctggtcttgaactcctgacctcaagtgatctgcttgccacagactcccaaagtgctgggattacaggtgtgacccaccgcacctggcccataaatcatttcttatatcagcctagctgaaagtcagttacatagccataaaaaaaatcattattaaacaatttattggaggccagaggtaaaaaaatataagtaggaagcgttttggtggtttgccctaacatagaatgggggttaacaaagtgtgtgtcccccacaacttcctcaacaacattagcatcaacatgacggaggaaatgatgagaaaccatcacagaggaacttgtgagacatgcagattctcaggctccatcaaactctactgaattagacactatgggagtggggcccaactgtgctttaacaaagcccttcaagtggttgagctgaaaactcaagtttgagaatcgctgatattggacattaagaaaatgactggaatacttggcctttgccccaactatccctcctgtgcacacagatgggctccaggtagagtggaactaagctttttttagacaattgcacttattctgttcaggtgctagaataagggcaattttaaagcatccaaatttgataccctgaagtagagaaaagttcatttagacaacaaaaattttgaggaaaaatactgtttatcagcgctcaatgaatgtttgtaaattcagccttttctcatctgtaaaatggctgaattacttagggcagagtttatatagattaaatgaaagtattactacaagtacctttaaacccagaaatgacttaaaaggtttcattttttcatgctaacacctgttggttctgtttagctggttgaagtttcttcttgagaaagattcttatttagcaggctggagtgcctggatctattcggtgatttctgccttgagtttagaatggaggagtggccacttatattcacgttagtcattcctattttaaactgttgtgtttactgttttattagtataactattactgcatgcacagtctacacacttcagtttattagaaatctgttaattcttacgtatcttttatgtaaagcgtgattgtctatctttaatctttatcaacaaaatgagatttgacttttagttggaaattttcctgcaggacagttttagctttgggcttttcagtattctgttatttgtctagtttttggtcagtgaaagaagtaaaatctgtatatatgtaactccagagtatactctaatattaatgtgataaatcttctttttttgggggtgggggagacagaatcttgctctgttgcccagtctggagtgcagtggcacgatcttggctcactgcaacctccacctcgtgggttcaggcaatttctcccatctcagcctgccaagtagctgagattacaggagcctgccaccacgcctggctagtttttgtattttttcttttagtaaacaaggggcttcaccatgttgtccaggttggtctcgagcttctgacctcaggggattcacccacctcagcctcccaaagtgctgggattacaggtgtatgccaccatgcccagtcttaatatgataaatcttttaatttagggaggcagaacagagagcattcactatatgagtaagttaacagattttggaatgcagtggaagaatttgatgcagaataaagcatgctttcatgcagatccatagtcattgcagttagaattcaggtctgcaacagacataaattggctagtgtaaagaaaccccatattattattcagttctaaaatacaaactgggatgtagacctttttaagacacttcactttattaaatagcttttgggttgatagagtaatgtaattttcttactttgtgtcagagtccattggccagctacttgtactacactgtattatatcatggcagacaaaagcattgcagccccaggtcaaggccatgcagtgagttagggattgagttcctgccgtttttcaggacttctgatttctagcctaaggttcttactctttgatcccaccagtgggcactgactggatcagaggcagtcactccaaacattgcttttttaatggtaggaaatagaaacgaaagacacttgtttccactgcaagaatgagcctgatcaagttttctggtatccgcacctgtgttagttctgtattaaaagctgtttacacagctgagtcaggaattgtccttcacctgtacttgctacaaaacaagagaacccaaactttctttgccactgtttattggttaggaacctatgatcatgctgataaattactgaattctcctgttacaagttaggaaacagtgggattgttccatcagtttgattcactagacagtgttgatttctggtctccctggaaccattgttgactgaacaggaaactgtttctgttacctctgctaatagtaaagagcatggtgcagatattcaaaataaaatgatttataactacccagaaggtacaagtgctatcaggacaagttcctcatagcacagtcatgtcatttggaacacaaggtagattgttacataattaatatgtttgtgatatttaaattattgcatgtataaaattctgtagatgtgaaaattatggggaaaaataagtattttaagagtttatgtcatttttaaataacatataaagtgtatacatgcattactttgtcagctgatggttcattgtttcagaagtggcgtataaataaattactaactgaaatgcccaagtaaaatgctctaaaatgttttagtgtggccctttttatagtgagatatcttttcataattcaaaaattttgttaaattttaaattatctagtctttttctcacattttggtgtgaaaaactaagaacatagaattattcatgttcttagtgattttaaggacttatttttaagtgtattatagacatttttatttaaaacatgttttttaaaaaattattatagctgtatgttgatgtctcatcttgaggaaccaaaagtaacagaagatgaagaaccacccacagaacaagataagaggaaaaagatggtaagttataaaagtagcttgtaaaaattaagaaccatatattatcattttctgtaggttcagaaatatctatggtctatttgtccatccagctatatgtctatccatctatcccatgttacagaattaatgtaaggtgtaccctaaaacagatacattttattcctagtacagaaagttgaggttaacttttcatctgaaataactgttgcttatcttagtgcagagcagatgatttagtgttttacttatggaaggtatgtgtgacctgcaaaccttatttaagttgaaatgtttattcttctgttttgaggagatgtactgaaatttccttgcattccctattattttatagatcttcacatgaacttttgctgatctgcatcacaggcttttataaaaatgcccttaagttaaccactaacttgttgtaaaaaccactaattctcaccagaggaatctgataaggggaaaagaacaaaaaaaaaggaaatatctaaaatatcttgccttttaatattatatataatcgtgaatgtttaaatatttatttttaccataaatagaaaataggtacataagaaactattttttcccttttcttttggaatcttttcttgtcttctggcctcatcatttaactaactttattataccttctttcctcatttgcaaaatgaaaacaattgtatctacctcatagatagaataaataattaaaatggttatggatacctagtaattactctgtaagagttagctgtcattttaatctgatcattgtatttacacctcgcattacagcacgttagctctcaagggcctaatccttagcttatagctaacattgcactgctctgagagccttcttttaaactgtttgaatttaactcattttactttgcttttatgctaggtatcatctccctagcacatagtgtagaggaaaggacaacatccaaagattcttaagacctgaattctagtccttttttactattacttgtgaccttgagcaagtcaccttgtctttgtagatccgtttgcctcatctgtgaaaagcggcagaaattggattagcatatttccagggtcttcgaactgaaaaattactgttaaaactcttaatatcattacttttcttcccccaaaacaatgtttgtacatataataagtcctcatttaacatcattgatagtttcttggaaactgtaacttgaagcagaaaaacatataatgaacctagttgtaccatgggctaattgatctaaacaagaagctcctacagcatatttctggtcacaaaaacatcaccgaacttcttaataaagatccaaaacacttctaatatttaacattgaagtaagtgtgagctatatatacgtttaagaaagattaatgaaaacaagttaaattattttcccttgtttttggtgaatcagtgagtgatgatggtcgtgatggtgggttaaatcaaggaataaatgtttgcaaagtgaaaattgtaaggagcacctcctactgccatgcacttcaaaaacgaacaaatctggcgagcttgctgaaagctttcatagagcagcatttatatgcatttgtatgacaatttgtattcattcattctttcatttttgcaacccacttattctgctttacggtagtgggtggctggagcctgtcctagcagctaagggtgcaagacgggaaccagtcctggacaggacaccatttcctgacagggtgcacttgcacacacttacactcagatgggaacaatttaaacacgccagttcacctagtgtgcacagctttgggatgtgggaggaaactggagtacccagagaaaagtcacgcagacatggagagaacatgcaaactccacacagacagtggacccagcccaaatccatttgttttccttttcaaagttacaatgaaatgatgatagcaaggacctgctgcgcagtcatgcactgctcagcaacacaacatttcggtcaacagcacactgcatatgatagtggtccgataagataatgataccatatttttactgtaccttttatgtgttttgatgtgtttagatacacagatactacttggttacagttgcctacagtattcgctacagtaacatgctgtacagatttgttgcctaggagcaataggttataccatgtagcctaggtgtattgtaggctgtaccatctaggtttgtgtaagcacactccataatgtttacacaaggaacttgcctaacaatgcatttctcagaatgtatgctcatctttaagcaatgcatgactatatatctcgagaagtatttttcctttgaaattaaactgttttgtggttgttttgttttgttttgttttgcaatggagtctcgctctatcacccaggctggagtgcagtggtatgatctcggctctctgcaacctccgcctcccaggttcaagcagtaaccatacctcagcctcccgagtagctgggactacaagtgtgtgccaccatgtctggctaatttttttgtatttttagtgggcacggggttttgccatgttggccaagctggtcttgaactcctgacctcaggtgatctgcccaccttggcctcccaaagtgctgggattgcaggtgtgagccaccatgcctggcctatgtggtatcttaaatacgtggaaagtatttttttttgcacctacagtaataatctctaagtatagcctaacatttgtctttctactgctcacacccccactttatcattctaattatatgtagtattggtttataaaacaaccattatttttttaagtggccgattttaagttacttactacagtagatatttaatatagatttatattatcatctctagtaagatttccagtaccttggtcttgctcttggatacccactgctcttagatatgctgaggataccacagcagtttttgactgaagctgggattgtgtattgtataacatttaataaatccaattatgaatacatgctaattttccaacaactttaaacaaagaaaatttgtttcacttatctcttagaattataagttaatgtattttttcagtaattacgtcattcttgaactgtattgtctataacgttagacattttttgagaactatccagcaatatcttggttgtttcttcaaagggggagagtaaacatttgctggcaaatggttatgaattattctttacaaaaaaattagcaaaggcttttctcattttaaaatgaaattatttgctaggaagaaaaatatagctgcttagttccaaggtcacataaatgaaaatttgattcgcttactgtcattgttgtcttaaagtagtccataaaatgtggtgtctgtgtttcagcagctgctttggtagagaatagcagtagtgattgtagttcagaaaggcagatgattaatattatatcaaatgtgccaaataattttccatacgtttctgagaattctctatattttatttcaaataaggatgaaatttacactcaggaaagctattaagctgtccagccttttgatctcccttttcattcagcctctctctctacctttcatttcggtgaaataatacttagaatagcacatgcagctcaagcatttcatttaatatatgtttcctttctgtccagtatattctaattagtagaataataattttatgacctttactataaagacttcagctaatttattaacatctttagttttttgtaattttttgaaatctgactcatagtcacttgtaagttgtaatttccaaattctagttttgagcattttaatgctttctcacaactctatgataccagctaacaaagtattattattattattattattattattttatttacttttttgggatagtcttgctctgttgtccaggttggagtgcaatgggtgcaaacatggtttactcagcctcaacttcctgggctcaaagaaccttcctgtctcagcttcctgtgtagctgagaccgcatgtgcatgccactacgctaatttttacatgttttgtagagacagggtcccactttgttgcttaggctggtctcgaactcttaggctcaagagatcctcccttgtcagccttccaaagtgccggcattacaggtgtgagccactccaccctccctattttttcatattattacttggttttttttaaatgggcaaatgaaaactgtatgtatctgtggtgtacaacatggtgttttaaaatatgtgtatattgcagaatggctgaatcaagctaatgagcaaatctgttaccagttgagctcattcagaaagagaaaagttgggccaggcgtggtggcttatgcctgtaatcccagtactttgggaggccgaggtgggcaaatcgcttgagcctaggagttcaagaccagcctgggcaacataggtgaatcctgcctctaaaaaaaaaaaaaatttagctgggcatgatggcgtgcatctgtagtcccagctacttgggaggctgaggtgggaggattgcttgaacatgggagacggaggttgcagtgagccaaaatcatgccactggtactccagcctagacaacagaacgagaccctgtcttaaaaaaaaaaaaaaaaaaaaaaaaaaggagaacccttatgtctcattacaaaccactgaagttaaaatgtgtgcggccgggtacggtggctcacgcctgtaatcccagcacttcgggaggccgagataggcagatcacgaagtcaggagatcgagaccaccctggctaacacagtgaaaccccatctctactaaaaatacaaaaaaattagccgggcgtggtggcatgcgcctgtagtcccatctgctgcattatcatttgaatgtgttttaaattgaaacatatatatggcaaacataatctgcagctttacttagctttttaatgcaatcaagtatgtgtagactgcagctctggcaagcttggcatcatagtcttttgcctaggctccagcatatgtaagtaaactatacgttaggttgagttgcattttatttgatgaatttataagtacatcctaagtttcatgccaaatataacaaatcctgagcatggcttttgtactgtcttagagtgattattgtttctgtactgctcttgccaaatactgtactggctcaaggatggagaacagtgctgcactgtgaggatggaattgtcctgcaatcagagcctacacatagctaacatttttctcttagagcacagagatatctccctcattttcccctccctgctttcccctcctttactcatcaactctgaaaactttcattttgtctaacttttggatctagaagctttctttagacttgtacttgttagaatttagaatacatcatcaaaaggaaagtgacactgttatgagttgaaactatttcataaggttttctggaaatctttattccaaatataatgtcaacagggcaccctgtggtagtggcttggggtgggagtttttaaactctctctggatgattttgaccactgagaaccagtagattgattcttttgcctgctcccatttgcttctagaaaacctcagcagaactactataaagatagaattgtattggtactgataaggtactgtgttgttcttaattaaatatcagtaatttttaatgtatgcataaaatacattttccttttgcaaataatatgagaataattcatcatcatattggtggcttcagaactgccctttgagaatccttaccttatagcattcagtaatcaagataaattatagcattgttgaaaatactttttagtattcagcttacatgcagtccacccaggttatgagttgagagaccttttttcttttctcaacttgcgcagttaacatttatcacttctagtatcatgccacatctcttttttttttttttggagagtcttactctgtcacccaggctggagtgcagtggtgctatctcagctcactgcaacctgctatctcagctcactgcaacctctgcctcccgggttcaagcgattctcctgcttcagcctcccaagtagctgggattacaggtgtgcaccaccactgctggataatttttgtatttttaggttagagacggggtttcaccatgttggccaggctgttcctgaactcctgacctcaagtgatccacccgccttggcctcccaaagtgctgggattacaggcatgagccaccactcctggcctctcatgccacatcttgaccccaaaccttgaactccaacatttctctctcatcacagtctcttcttccttactaatcattccttttcttttggtagatctattttgaactttatctggagccctacaatttttccttactttgtcctcttaaatcctagagtaccatattctttgctgtttttacctttggacaagctatagccctcaccctctctatttcagacttactgtatctgggggcctgggaatcaggcatacatattttctaaaagcttcacatgttcttttggtatataaccagggttgaaaaccactagaataagaattaaaccccttgacactcttttaagaaagacctctgcagtctgcctccttttaaactttgtcctgtattctcattctatctccttcactggctaaaccaaatgacttgtctccacacgttatatggtttctgcctctattacatgctagtcctccatctggaatagcccttttgtcccttttctccccactgagttttctcatttgccattttaattcccatatatgccgtgtcccccacatagatgcaacctcccccactgtccacatcctgtaccacagtgttaaatttgttacagctgatgaccctacattgacacatcatcactgacaattgatagtttatgttagggttcactctggtattgtacattctatgggtcttaataaatgtataacgatgtgtatccaacattgtagtatcatacgtaagagtttcactgccttcaaaatcctgtgctctgcctagtcatccctccctcccctgagcccctggtgtttttactgtctccatcgttttgtcttttctggaatgttatgcagtaggactcatacactgtgtagcctcatatgatttttattcagaaagtcagcagagtgtgatgttgcagctaatgtgtgttgtcacttgtctgctggctcaccatgttggtgtggggaagcagctggaactgcaccaactccacgtcctgccagatcctctctagcttctcttactttagagccaggcacatgcctagtttaataatgaaggcattggcttctcttagaagataccccatcagcaaagttgaagacttggaagtgatgagaggctaaagggtgttcccatctgttcttgtaggttctactcattcttgcagtttcactttgccctgtcccttgggccatatgacttcaggctatagcatcaccagcacaaaaagaaacagccttccatggactagacgtttaactggttctcacagtcatggaagatcaaatccctataataaggccaaatatatgattgatacaagctccctagtgcctaacagcatgtatgatgtatatcaggtgttcagcaaatgtttgttgaatggataagtgactggatggaccaatgaatgaatgagagacacagtccctgccctcaaggagctcctagaccagtgtagagacagaactgagatgtagggctgacaacacaattgtgtcattttgacatctctagtggagcagtctggagaagagctgggcctgcccctaggcctcccagtcaccaatgtcttcctggtttgagtttatgctgggtgaggtgatgggcacttcattagactgccatgttagttggtgtccccaggggtctgggagcacataattcagtgtcctaatgtccagcaggtgactgcaagggttgcttctgaaaatgaggttctaactgttgtgtgtccaggtgctacagcaaatatgaggtcaactcgtagtcacatgtgtaggtctgcttctggcgcctgctcctgggaccacattggatgtggctgttggcgatactgtaattgtagcagtcccatttagggaagcactgcctagctctcaggagggaataacagcagtcatgggtgaggcaacaaccagttgttggcatccaccggctgcctctggcccaccaaaccacagtggcagccatagatgaggtacttgtaatattactggatatattttatcatactgtttgagtgaataaaagcataggcttgaatgctatgttaacctggttaacatagaggtactcatatttgttactttattgcttgccatctgattatttcttttttccttcaaaaattactgaaatgattttgtttttttctttatcctttggcacaagatgatctttacaaagtttgtagatagataataggaaaaagccagctatatattgaaaaacagtttgaaagatagtgaatataaattattgcttctcattttgcaatgagaaggcaattttactattaatttttatccatgtgtctgtcttttggttgtcactggtttgttgtcacttacgtgttggttatcacatatcacatatatttgcaccaaatttggttatcataaggcccagtttataaaaatgtgtgcaaatcctcacactccattcttttaagacttaacaaaattaacaatattaaaagcatttctctgtttactcttagttaagtaatcaaataatcaagtgataataatcaaatgatcaagtaatcaaataatcctacctgctaccattgcacaactaaatatataatggcaatagaactagcatcttcaaaatgaatctttttttttcttctgtattcattccacatacattttttaatgcttaccatgtgaaaaccattgatctttataatcagtacttcctctgagaacctatcttctagggtattttgatcaacagtacatacatagtatttttaaagtgttagatatcattaacttattaccaggccagtttcttaaaatggaaagatgtacttgtttttatctatgctttgctcacattctacctgcttctctaagtttgattaactgactgttgtactgctgttgatacatccttattttcatttctagatgatacactgaaacatacaaaaagccattgtaggacatataactttacctataaatatttcaaaattgtaaaccaaacatagctttccttataaatgaggcccacaagctcaatgttaaacttatctcaagtattagaaatacactgtggtcatgggtaattcaggtcctaaaaagtgcagagttgaaagtgacattaaaacaatccaagaagataggaaataatgaattgaaataatccaactgagatgcaataaagatacaaattgataaccaggcatcctaaggtagcagttcttcctgtgatagagctaaaatgttaatcaaaaaatagtttcagattatagaggttaagatccttcacagtaggctacataatagtaatcaaagacactggaaaagaaaattcccttgaaaatgcctttggaactaaataaagtgatgatagtgatggttattttttagttgagatttcaaattaattgcctgctgacgtcagtattgttcttgagtattgcatagcagacggcctcactgtatctcccttatttacttgaattgttactaaaaaccttaattgtgatgaattcagtaactttgcccctgttcacttggaaacgttggcaacatggtattggctcaaggtaaataaaatcttcaggtttgtaaatgaagaatgtggtctcatttgggagaacttttttagtaacttaggtaacatgccagggtacattagactgccttcatggcagtttttcctatttcctgtttttctcttctgcttctttttctcaataaattgtagtacttactgtcttttaatataagggacttgtctttcaagggaagaaaaattaagtaaactttttgaagaattgttctgtatgtggaagttgccattttgaagaaattgatttttcattataaaagtaacctatactaaaaaccacaaaatgaatgatatgttgtgaaataacattcccctaggtaacctttactaacattatgcgataagtccttccaaatattttatatacatacataaaatatatgatctatatgtattttaaatgttaaaattacgttacattctgttctggtgcttgatttttcttaaatgaagaactgcataattcagtgaaccagtattttccaaacgatctgtgagtacatgttaaaaaaatcattcaaaggtaaagatttattcagagagtaagacaggccaacggattttaatgtgacagagaatgggggtctattgatatggtttcagagttcttttaagaaactactatttgtgagtttcagtgtagtttcaaagaagaatatccaaaatggtcagcaaaggctgttaaatactactccattttccagctgcatatctgagaaagactggattttctttactttaaccaaaacacataatgcaacagattgaatgcagaaatagatacgagaatccggctttcatttaagccacacattagatttccaagtatgtaaagcagtgccatttttctcactaaagagatatttttattttgaaaaatagttatttataaaaattatattaacatgtaatggatttattgatattttaaagtgagttgataagtatttttgaattttctaatttctgatccagtaaatattggtagatttaacccatataagcaaatacttcttgagatcaccaataacttttaaatgtaaaaatattaagggccttgaggccaaaatgagaaactactcttgaaagacattgagattgtttccatttttcagttattataagcagcgcttcagtaaacaacatcaagtgctgtctttatgtacttctaaaagtttgtaagtctgtaggaaaaattcttagaagtagatatgctgggctgaaggatatgtgtttttgaaatagtgatagattataccaaattgccaatttatgtgctcaggagtggttcatgagtcatcctacagtctgatcaatgggataagtagaaagcagtgttttgttgtttaatgtactttttcttaattatgagtgagactaagaattttttagatgtttatagctcattgatatttttttgtttgatgaatggcttgttcatatttccctctctcacacatttttttactggacattttgtttgattatctgattttaaataagagtcccatggtagattttatttcccaagaatagccataataatatctcctattccacatgctcttctttttttttttttttttttttttgaggcagaatcttattttctcacccagtttggagtgcagtagtgtgatctggctcactgcaacctctatctgatgggctcaagccatcctcccacctcagccctccaagtagcagggactacaggtgcacaccaccacacctggctaattttcatattttttgtagagaagaacttttgccatgttgcccaggctcgtcttgaactcccaagctcaggcaatcggcccgcctcagcctcccaaagtactgggattacaggtgtgagccaccacgcctggcacacatgctcttcttaaaaatgtgattttgacattcttccttattggcaggttgggtctatattccttccctttgaaactgggcaaatttgctgatagtttatgatttcccaagtctcgattataagatagagcttccacctggttctctaaggacacttgtacttggaaaccagccaccatactataaggaagcccataaatccataagaagtaggcctcattttccccatctgagatcccagttgacagccagcattaactactaaactcatgaatcagtgacccttaagatgattccagcccccgaagggcctgagtcaccccaagccttcaagtcttccctgtgtatatcctagccactttaattaatttttgcatgaacccttgcaaggtgaaattacctatgacagactttaaaacagctgtggtgcagttttatctttattttctttttcacatgtgcattgtgtgtgaacatcatattaatcatctgattttctggaggtgtctccttggaataaagtactttaaaataaaacacatagaaaaggaaagcttttggtatagaaactattcagatattatttatgactttctttgaacttaacaagagttgatttcatccccacaattgtcttactgagctgcaagaaacctgatgagtttcttaaccttattcaaaatggctttatgtcattgtgtgaattaagttgaggtaacttttacatacagacaaagaggaggaaggatctttgtttaatagtggttctcaactgggtactattttgccctgctcctcgccccttcccgccagcattgtcattacaggacagggaagtgctgctggcagtaatgggtgggagccaaggctgttgctaagttctgcagtacgtagaactgaaatgctgaagagttacctgacccgccccccctcaccccgcaggatatgcgacaggggtgtgactcatccacaagtgctcaagccccttatgggagggtgagcatgcagacaggtaggtgcaggagccagggcaaatacccctgggctccagccccatgacaacatccagaggtggtagcctgcaactccgaaaacccaagtgtgcgtgtgtgtgtgtgtgttacagtccacttttagctttgctgtctgcagacagcttaagcgttaaccagctcagtgccctcttagtacgcaggtccttgtctggcatccaggaagaatcaggtcacacacagacttgaagatggtgaatgtgggggttttattgactggtggaggtggctctcagtgagctgtatggggagctggaaagggtatggagtgggaagatgatctttccctagactttagccatccagtggccaatctcctttcctaccaccccagccgaactcctattggcgttctgatgctcctcttcttccttccctgctgtgccattctgctgttctgctcttcttttctccttatggagctgtggattgcggtctatataggtacaggataagggggtgtggtgggccgtatggaaacttttgggcatgaaaacaggagtgcctgttcccatttagggcctcgagtttccaggcttgagggtgaggcctttgccagggaactgccctcttctacccagtatttccgttttctgtctgtgtcagaacaaccccctccaataacaaagaattatctacccaatgtttgatagtcccaagtttgagaaaccctgaatttaagccacccatgttttgttggtttagttttgagtttagattttgcaagtataattatcttgtttcactgagcagttgcaggagtatcattcaagaagtatttattaggtgcataccatgtgccaaaatagtagatggcttatagagggccttgtatgccataagtgtagcagacagaataatccctctcatcccccagggatgtgcatgtcctaatccctggaacctgtgaatgtgtttcatgtatcaaagaacaaaatttcaacaaagtgagtttcaaagatttaattagcttttattagtgattcatgaatcaggcagcatccaatctgcaaaatagatgggagctctgaggaggtggcagaagagttggtttttataaggtaacttgaacaggaacaaggaaacagcatagtacaaaaagtggattggttaacatttgtttactttccttggatgggctaagggaaagggtgcttccttatcctatctcaggtttattgggccccttttgattggttactgtgaatctcaattttagaaaactggcctgtttttaaattttgtttgattacatggcatctagcacaagtgactgcaatctggttatttaacacatgacaaaatggaatttgctgatcaaagataggtacatttggattatctagataggaacatttgtcatgacaagtcattaaaagtggaagatggggtggagggggaggtgggggaggaagggggtggcagtggtgcagaacagagaggaggaggagccagaacagaaaacaaagagaacatatttctgttactgtggcccaaggacagctaactggctatgtggacatatctatctaacggcattattattcactgagtggaagcagttaatctgtaggtagctaaatgttgatgggcagggtgggcaggaggagaaagttgagatcccgtagtaggaaaatgccaggaagctttcttagatgtggctaagcacaatctcaaatcttttcttgccaaaagttttctactctttctgaagattcctcaataaatcaaaatataatcaaataacatttaaaaatatatatacatctgatctgtgataaaaaccaatgagatggccaggtacggtggctcacacctgtaatcccagcactttgggaggtcgaggcgggtggatcacttgagaccagcctggccaccatggtgtgaccccatctatactaaaaatacaaaaatcagctgggcacggtggcatgcccctgtagtccctgctacttgggaggctgaggcatgagaatcgcttgaacctgggaggcagaggttgcagtgagctgaggctgtgcccctgcactccagcctggggcacagggtgagactctgactcaaaaaaaaaaaaaaaaaaaatcagtgagagaacaggatctgctttagaaaaattagcctcatagccaaacttggtttatttaacaattttgctctgtcagcagatggtcaagatggaaaatttttagccccttattcatctccatcacattttgtcatttttataaattattgatacaccatttgatgaaatcaaatttttgaaagagattgaggacactgactgacccattattaaactttcttgcctttaaaggttctcattcaacatttcctctttatagcacctgcacttttcagtccttcacctgatacttgaccttgttgagcatttttatcaagagacttgagattctcataagatttgctcagtgatcttgcttcttggaaccacaaaggcaattagaacaataaggagatacaagggagcagctgtgtcctatagatgttcatacttgttcagatttctcagtccctgtaataaaaatgtagacagaaataaatgatattcagaaaactcggcatatccatgacatttagatttcaaatagaaatctcatctgatttttcctcacagtttatcttctttccattctctgaatcacctggtgtccacatataataggaacaatgtattaattcacatgtttggttttatagtatattctctcccatagtggacaaacaggaatattaattatatttctgagagggaagtaatagaattaaaggcagtgctggatagtggcacttttagatatctagcagtctgttattttctaatttagtaacattaatgtgccatagcacacccctaaatattctattacactttgttatgtagccattttactttaatgacaataagatgaatggaaggaaaacaattccctattatttaatttagttatatattaaagttgattttttttttaatgtaaagagttcgccccattgctggaaactgaatggagacagtcctaaattgcactgccaaaactgagttataagtagaaatgcttttataaaacatgtaagaaattatctcaaaaagcaacatagttttataggattctaaaaatacatgtaagattataacatttttattggtgcaaaatttatcttattttcctacacattttctttttgtgatagtaagtcttccccacagccttctgtataaactgatgctaaggatagcctatggtagtcttgtgagcctatgtttagttgagcttaagatgatctagtgggtgtatagtgacagatctgaataatatgatcaggaaacttaatatctatatataaaaattctactctataagtagaatatgtaagtgttcatgaaacatttacaaaaactgagcatattctaggctaacaaagaaaatccctggtttcttagaacagaaatagtacaggttaaattatctgaccacattaaagtaaaaccaggtattacacaaaggttgagagaaatactggtttcataaagttttttaaacagtattttaaaggggaagcttgaaattttgaagtagatgacatacaacattgagattgttacacataaaaacatgggagcaaaacttaattattcctaaccttaagtaattttattatacaagaataaatgaaaataaatgaactctacttatgtcaagatgtgaaaaaaaggaaaaatacagacattagaaaaaatcagccttagaaaaatagaagacattaataattttaaaaattagaagacagaaaagtactaaaattgatgaataagtattgtttgcttgttcttcttcttaaaaaacccacagaatagataaacctggccaatttaatcaaggggtggaagaataaacataaaatattagggataagaaggcatataatatggcttcaggtattgtacatgcaagtctaggctaatcaatggaaaaatcttttcaggacagttttcccatattaattttaccaaaaaaaaattaaaaataaacttaggacctgatagaaatagatttataaccacggaacaaaaaattagccgggcacagtggtgggcgcctgtagtcccacctagtcgggaggctgttttaaattgcctccttccccccaaaagcccctctcctcaaatgtttcttgcttgctcattgcaagtggttttaccagaatgtactatcagtctttttttttatgtagtttaattcatttaatattactaatgacaggccgggctgggtggcttacgcctgtaatgccagcactttgggaggctaaggcaggtggatcacttgaggtcaggagttcaagaccagcctggccaacatggtgaaaccccatctctacaaaaaattagccaggcatggtattgcacgcctgtagtcccagctccttgaatttgaatggctgaggcagaagacttgcctgaacccaggaggcggaggctgtagtgagccaagatctcaccactgcactccagcctgggagacacagcgagaccctgtttctaaaatgaaaaattactaatgacattcttttagcaatagcttgtctttccacacttctttcttcttttgttcctccatccctcccttcctttcttcctttgtatcctattttaaagaatagatcattctatgctagttcaactattctagaacctagaaaaaagaataaaaagaatagatggctttttaaaataaaaatagatgcaaaaaatgtaaattactatcagcaaatttgatctaacattaaatttaacatttattcctggtaaaatttcttattgaaataggaatagaatattatgtctttaccatgataaaatatctgtttgaaactgcacaaacaggccgggcgtggtggctcacgcttgtaatcccagcactttgggaggccgaggcaggcggatcacgaggtcaggagctcaagaccatcctggttaacacggtgaaaccctatctctactaaaaatacaaaaaattagccgggcacggtggtgggcgcctgtagtcccacctagtcgggaggctgaggcaggagaatggcgtgaacccaggagggtggagtttgcagtgagctgagccgagattgcgccactgcactccagcctgggtgacagggcgagactccacctcaaaaaaaaaaagaaactgcacaaacataccactggatagtgaatattctaaatgccagaaaattctgtcttctgtaacagacctctggaatctcaacttaatgtaatagtttattgctcaggaaaaacacaagagaggcaggagcaggagtgggtcttgaaatccgcagtctttaagggatgatcctgtcaacaaaaagagtcatactctgtaaaatattttaagagatttattctgagccaaatgtgagtgaccatggcctgtgatataggcctcaggaggtcctgagaacatgtgcccaaggtggttgggatacatcttggttttatacattttagggagacgtgagacttcagtcacatgcatttaagaaatacagggctgggcgcgatgcctcacgcctgtaatcccagcactttgggaggccgaggtgggcggatcacgaggtcaggagattgagaccattctggctaacacggtgaaaccccatctctcctaaaaatacaaaaagttagccgggtgtggtggcgggtgcctgtagtcccagctactcgggaggctgaggcaggagaatggcatgaacccgggaggcggagcttgcggtgagccaagattgtgccactgcactccagcctgggcaacagagcgagactctgtctaaaaaaaaaaaaaaaaaaaaaaatacattggtccagaaaggtgggacaaaatgtagaggcaggaggctttcagattattggtagatttaaatttttctggttgacagttggttgagtttttctaaagacctggagtcaatagaaaagaaatgtctgggttgtggagaccaaagttttatcatgcagatgaagcctccaggtggcaggcttcaaagagaataaattataaatgtctcttatcagacttaaggtctgtgttgatgctaatactggagaggtataatgaggcacatctgcttgccatcatggcctgaagcagtctttcaggttaaattttaagagtgtcctggccaaagaggaagtccattcaaacggatggtgggtggcggagggccttacaattttatttctggtttacaatcgagacttattgaaatgcatggcttcaacacatggctctgtctagcaggaaaactgtgaaaaagaatgagtacgagtagtttaagagttaggttgaataatggcacttatcatttctgctcacattccattggctggaaatgtggtctgtgtggcctaggaaaaagagtaaaagagtttgatgatgatgatacaatggtctgttacgcagagtttctagccaatgcgatgagaagagagtctatgtaagttttaagtattggcaaagaagagacgaaattcagaagtcattgtaatgataatgttgtagtaaaaaccaggttcttgtcacacgaccaggaaggattaggctggcagacactttgaagggcgagggggaacagaattattgggcaaaaatggaaaaaaactcagcaaagtgacaggggtacctgttaacaggtccccatctcgcagattgaatctcaggttaccacacaggaacaggagaggccaggctcctccccctgcaaatggggcatacatttcccaaggctccaccctgtcctcccacggagcaggcgggttagagattctcccagacctgcagtccgtttttcggccttcaggctgttttaggcttgaaggctgggtttaagggggaaggggagtggggccttggctgcctcctgtctctgtcagtaatttaagccaggaaagtccctaagaagatcaacagatcaactatgaagagaatttaataagtgataattatatataaatgtatgttgctgttatatgctagcaataactagttaggaaaagcaggctaaatgaacgtcttttacaaatttgaatctcatttaccctgtgatttgaggaatcctttggaattcaggaaacaaaaaccaaaatcaagaagcgcactaaacttttggacagtggaggagtcaaacaatgattaaaaaaaaaagtcatcaacatttcctagtatgcacacagtaaagtaaaactccctcaaaattgcctcagtgagtctaaaggagaaaggaaacctgaaaggtttctggcaagtaatggtaaatgggtttaagtttaaagagcttgtaattagtagctgaagggttttttttttcttttaagtgttacatgttttctttagcctgttgtctatattcttttattttaatgcatatggaaatacctgtagatgttttattgtgttttcttgagaggttaggcctcaaaacgcttggcccacgtttttctgtagcagtgcttcttatttttggatgtatatcacgatcacttggggagcttttaaatattctggtacctgaaactacttaaaatcagaatcactaggagtaggacttagacatcagcattttttaaagttccccaaatgattcccttatgctgccaagtgaagaactattgtataaagatttgttgtgactttgctgaggcttccctttcctcctttattcttattgttagttttaaatgaaattatatatgtgaatggcctaccctgtacctagcagaagccttgcttgtgattggagtttagtaaatgtggatattgtattttgattcccatttaattgctctgaagatgattgcatattgaaacgtgaagaaataagcagatgttctgttgctcagatctaggtttgaaataattactttgtctaattgcttgagttgtgtttctgtcaagtttactctcagagatttaaataaagcacactgcagtaaaggcatactagagtaagaatgcccaagtaataatggtcaaggactaatagaaagaaaaataattatgtcaggaaacctagcttacaaggtaattgctaaattggaattttaatttgttcactgagacatgtatgtatatacggttatttttatctcatgaagtctagatcccagtgtttctagacatagcaatgtaaaatagttcctttacttacaagctggtcatttagaaattgtattccaagcttctcaaaggacagattgggttttacagtgggtatagtttgatgattgagcttgtattgctgcgccctgttgattaagtgggttctgattggtatctgctggactcatactcttcattaagccacagagttaggagagtttatatccaacagatcttagaaacttagttattttagatatatttcagaaattgacagttatctgcagcaaaacaattagtcagaaaagaagggaatttttaaaccaaagataatttaattaaggaatttttgaagaccacatggttaaatacattgttgtagatcaattttcctttaagattttttggcctgttacatacctagtgtatttatatgtctcctaccaagtttcatggaaaggaagcctgaatatattattattcttaaaaaatgttctacatttctaagtgacaaaaattaaattcaaatttagcaattatttagtatttttctaggatggaaaacactttagcaaaattcaataggaaattgttaccagaaagcagtcctgatccagatcccaagagagggctcttggatctcacacaagaaagaattcaggttgagtccatagagtgaagtggaagcaagcttattaagaaatacaggaataaaagaatggctactccataggcagagcagccccgagggctgctggctggctatttctatgggtatttctttctttctttcttctttttcttttttttttttttttttaagacagagttttgctcttgttgcccaggctagagtgcagtggcacaatctcggctcactgcagtctccgcctcccgagtagctgagtttacaggcacatgccaccatggccagctaattttttgtatttttctagtagagatagggtttcattgtatcatgttggccaggccagtctcaaactcctgacctcaggttatccacccgcctcagccttccaaagtgcagggattacaggcgtgagccacaatgcccggccttttatgggtattacttgattatatgctaaacaaaggatggattgttcatgagattttttgggaaggggtggtcaattcttagaactgagggttcctccccccaccgttttttttgttttgttttttttgagacagagttttgctcttgttacccaggctggagtgcaatggcatgatctcagctcaccacaacctccacctcccgggttcaggcgattctcctgcctcagtctcccaagtagctgagattacaggcatgcaccaccatgcccagctaattttgtatttttagtagagacggggtttctccatgttggtcaggctggtctcaaactcctgacctcaggtgatctgcccacctcaacctcccaaagtgctgggattacaggcatgagccatggcatccagccagttcctcccctttttagactatatagggtaacttctggatgttaccctatacgttaccctacaaataccaccatggcatttgtaaaccgtcatggtgctggtgggattgtcttttagcatgctaatgcattataattaacatgtaatgagtgaagatgaccacaggtcacttttgtggccatcttggttttggtgggttttagccagcttctttaccgcaacctatcttatcagctaggtctttatgacctgtatcttgtgctgaactcctatctcatcttatgacttagaatgtctaacgtcctgggaatgcagcccagtaggtctccaccttattttatccagcccctattcaagatggagttgcaggccgggcacggtggctcaggcctgtaatcccagcactttgggaggctgaggtgggcggatcatgaggtcaggagatcgagatcatcctggctaacagggtgaaaccccgtctctactaaaaataaaaacaaattaactgggcatagtggcaggcacctgtagtcccagctactccggaggctgaggcaggagaatggcgtgaacccaggaggcggagcttgcagtgagccgaaatcgcgccagtgcactccagcctgagcgacagagcgagagactcaaaaaaaaaaaaaaaaaaaagatggagttgcaccggttcaaaggcctctgacaaaacaactttacagtaagtagtttctgaaaaattataattgggcatataggcttaaaaagtgaataatgacatatgccacataacaaggaaaatgaaagattttgattcactaaattcttgctgggtgaaattgcttattaatgtagtgaaatataatgggaaactttgtttcaaggaatagaaatctcaaaaagaaatttgtaagtagccccacagaaactaaaatcttgaaccactttagaagactacttcataggttgaagcatatgtcaaaaggctgtcattaccaacagagggaactgctgatacacacttcaactagaaccattctgtcttagagtaataattttaaaattaagcaatactgagccacgtgctcattaaaatccgatgtgtagactttagaagtgaatctggctattaacacttcatttatctggtgttaccccagagtcaggaattctgggtaattatctcttgctaatgactgaagcttctgaaggttcctaattttatcttaactatttcaatggaaatacttcttaaatgatcacatactttcttagaagccaagagcatatggaagtaatggaaagagaacaaaaccaggaatttttccgatctatattctagttgtgatgaagtcattaacttgagaaaaactaaccttgaatgtcattcagagcttggagacatcagcttttatctcaaaattgaacacaggcctagctgcttagaaattctattattagacacttatataagctaatacataagatgagatgtcagttgtagagtggtttgtccttataccaaatggccacagaggggtatacttttctaattgctgagtccattttttagagtaatcttcttaatttggaatacttttaggtttacaggaaagtaacaaaaatagtacaaagagttcccatgtgcccctcacccagtttctcctaatgttaacattgtatgttacatttttctttcctcttctttttcttttttttttcgagacggagtctcgctctgtcacccaggctggagtgcaatggcacgatctcagctcactgcaacctccgcatcccagattcaggcgattctcctgcctcagcctcccaagtagctgggactacaggcgtgcaccaccacgccaggctaatttttgtattttcagtagagacggggtttcaccatattggccaggctggtctcgaactcctgaccttgtgatctgcctgcctcagcctcctaaagtgctgggattacaggcatgagccaccgagcctggccctacattttccaaatatacatggtacatttatcaaaattaagaaaccaacatcggtgcattattattaagtaaactccagacttttatttagattttaccagtttttccggtaacactcttggttgcaggattcaatcgggtatatcacacattgcacttagcctgggtccaggtgtgttttatgtatatgtatgtatgtgcataccacagggatagaagaagccaaaatattttcttttgtcattgttatctttaaggagtggacttctgggttatttttcatgaaattacactccttttgttttccaaatatcccagtgggagacgaggagtcccttttttttttttttcagccagaagcatatacaggaatttaaatagtattgcaatccagggtagggcaaacactgtctcctttctcgatcctgagggcatcactgggttgccacagtggcctaccctaccctatcttcctaaggagaatgctggacaattgtatttaaatgttcttcagcatgttctgtttcttttagaatgctttctactaggctttgatgctttaaatgaatgagtcccccagctcttgagaaatgcctgatcagaaaacatgttcagggggcgctagggaactgaagttaagactaattgaatgaaattttctttgacagatttttccaccatgagattagtacagaatctgtgtgagaagagaggcagaagcaattttgttactgtagaagagattacaaagaacttttgtaaattgcaggtaggagagacttgttttgcttttttgacagtcttgctcctctctgtatcccacagctggccctgaaggaccctgttcatacagtgtcactgcagcagttcatctacgagaagctcaaggcacagcaggagatgctaggagaacaaggtttccagtccctcatggaaacagtggatacggagattgtcacccagctacaggagtttttgcaaggattctaagagcacatgacatgtggctgcctcccctttcagaaacaagctgagtaacccagcctgccgtttgtatgtgagagcctgctgagatgaagaaatcacttcatgaaaataagcaaagaccacacattttttactacaaaatgtaaaggataaatgtaaatcctgcataactaaaatcacaaacctattcctcaaaagaatttaattttatatttatgagggggcccttcactaaaaagtacatgtaaaagtacatttgatgacaatagctgcttagtttcctgttaagagaagaaactttatcttttaattatgtgctcttaatatttgaagatgagagttaatacctgagatgtttttctgcaaccaaaattcattaaatttggctgccttatcctttttttaagctaatgaaactacaggtttgaaaaatgacaaagctgttcagatgatgctattaaagaaatgtgtgtactaagcaaaaatatataaatagtgacaaatacacattaccaagcttatcttgcaagggagttattttcatctaacatagaaagtgtgttttatcagacaaatgcttttattttcattctaataatttgatacagaaattagtaaaggcatttttttctttttttttccagtaaatacattgggtctataaatgtgcatttgtaagggccacaaaagtgaacgtgtggtactgtagtaccacgtgggagacctctggttatggtttagtcctagttcctttgttactcctgtgagcaccgagaagaactgggcgactcccagtcccacctgtgctgtgacagtcccacgtggctatgacagactgtttagtacttacccttctcaggttcctcagtgcaggggtgcatcagggcctcaataataggggtatacctgggaggatccagcagtaatccccagggtactaggattactagtactctgatggaactagtcttccttccttattcctcgaacatgcagtacataaaaaggggaaaaggagaaaaaaaaagccttactttgttttacttgccatttattgtaaggaaactttaaagcattttttaggaaatactcaaaagcaaggttggaaaatgttttatctttctatagaaagttgggtacagtatgtaactgcgggaaacccactgcccctttgtaagctgtggaacccaaactgtatggggatatttgatgttttcagaaagaggaagaaaatatggtccaaattaaattttccaaagatacctcaccttggactgatttgtctgactacttttcttgctccccccaaaaaatgagttcttaaaaattgcccagtgacttatagagaattttcttttatactctagctttgattctgtgctagtaggtatcagtattgcaggtggcaaatcctagttacccttttaatttatcttcatttaaagacaaaaagctcctttcaagtgatatttctttatcagtattactcagtcctgaagactgatccaagaagaatttctttttgttgacttaattattttcatttgaaacactaactcattagtgttatcagaaattctcaaacatgctcatttttcagttatagtaaagtactcatccttctaattcctgacagatttcattatagtgccataccaaatattactgaaatagctaccttgcaaaagaagtaaaaagcttatctcagggaaagagtttgcttcatttttaaaactcacaagtttaaataggcttggtaaatagctcagaaaaataattcatgtatcttgaatttctaagtgctcaattaagacataaagtgtaattattggtttacagaattctattcattaacagaactatatagcaaatatattaagtttaggacaaacaactcagccaggcctctggcctctgggtgaactgtggctcctgaaacaaggtaatgatcatttatactccaaaaacatattccttttctatttattttctattccagagacttctcccaaccctctcacaaaggcccatgtgactaacaataacatttgaaagcttccttataagttggtccctcctctctctcctactagtcattttagagaatccacattattgcatacaatttttaaaaagatacaatttttcttgaaaaatcctcgctttaatctttattttacccatttctttattcagttagtgtttattgagttctgtttcatgccataatgctgtaccacattctgagattagaacagagtacccaccttcatgaaatttcacagttgattaggaacacagacttgccgacatgctgtaagaaaataggggttccaatggaagtgcacattctaaagcagttggcctgcaggggaaggagattgtgtatgaaataaaatgatgctgtcactgtataatttgatagttatttaaaaactgctccctaatggcatggtttggtgaggctacttaagcgtcagtggcactatactggaactgggtaactccctgactccagactcgcatcaatttggagtcactctaacataaaaaatcatcaggttttgaaaatattggatctttgtagcctcacgactaatctctaattccatgaattaaaacataaggctcacctactaagggttgttgtcttttcttcttctccaagtcataagcctattgtatagaaatttaaaagttgaagagctagtgaaggtaagatgcatgtcatgaaaaccaaaatactttcttctcctaactttagaaaagaaaaaaatctgcagaggcatgaaaaaaatagtataatgaaccccaatatacccatcatctagatttaccaaactgttgacattttgccatatttactctctttatatatgtgtatctgtatataaatatacttaacatatacacacatgtactttcgctaaccatttgaaagtacaaacactacaaaagtttattattataaaccctttatctccaaatactttagcagacatctgaggatgccattcctctacatatccactaatgccattatacatctaagaaaattcacaataatgcaataacatctaataaacagttcatattccaattttccctactgccacacagatgtcctttgtatgacatataataaagacatacaaaaatttggtttttgatccagaatcctatattatttatttattttagacagggtatcaccctgtcacccaggctggaatgcagtggcttgatctcagctcactgcagcctccacctccctggctcaggtgttcctcccacctcagtctcccaggcagctgggactacaggcacttgccaccacgcgtggctaatttttgtattttttttgtggagacagagtttcaccatattgcccaggctggtctcaaactcctgggctcaagtggcccaccttggcctcccgaagtgttgggattacaggcctcagccaccatgcccagctccatttagtatttatacattgcatttggctgcttaatttttcaatctagaattgtcttcttttagtgtctttggctttttagaagaatccaaggtaattgccctgcagaatattccttattgtggaattttctaattgtttcctcataattttattcaggtaagcatttttggcaacaacactaatctggtaatgtacaatttctgtgacatcacatcaggaggcacataaactaagcaccaggcctctctattataaggattattattattattactattttttttttttttttgagatggagtctctcactgtcacccaggctggagtgcaatggcgcaatctctgctcactgcagcctccacctcccgggttcaagtgatgctcctgcctcagcctcccaagtagctggtactacaggcgcctgccaccacgcccagctaattctttgcatttttagtagagatgggtttcaccatgttggccaggctggtcttgaactcctgacctcgtgatccaccttcctcagcctcctaaagtgctgggattacaggcgtgagccactgcacctggctggataaatttttaaagagttcttatggctctggaaatttccagtggttattttgttgattgtttgtttgttttaacctgaatcagagctcttaccaccaccagcttgcctgttaatttacagaagttctgcaactttcttttaacctagaaaagtagcatggctgaactggggaagaagtatattaaacttggttcaagtttcatcagtcttaagtctccgaaactcctttatgttactgcaaaccctttagtcaagagtcatcttggccggacgcggtggctcacacctgtaatccctgctactcaggaggctgaggcgggagaattgcttgaacccgggaggcagaggttgcagtgagccaagatcacgccattgcactccagcctaggcgatgagagtgaaatgccatgtcaaaaaagaaaaaaaagtcatctctccaagagttctatttctctctctcatttttaagttatgtagttctttgtgacttccaatataacttgaactcacacaccactaaaatggaaggcaaacactgccttttccattaccaaaatatcctttttggatttggaaacttggcaaagatgcagatatgcagcaatactttatctttttagtgagactcaaatttgggctgagcttagaaacatgctagacttgagagcattacctttgagtgtggttaaggataagaagcagtacttatcagctggcaaaatgaggagaaaaaaataatgatttccttaaatgtgaagctttgatcttgatatcttggtaggactgtgacatctgctggaaaagcagtttaaagtcacctttttaccacctaataaactacattctatcccaaacataccttaattatgtggaatttggtgtcccatgaagtagtaaaaaccattcatctggttgtagagctggaagtttttacacagcttcatgctgtttgaagtcgagctttagagcacttgtgggtgaatacctcaatgtcctggaaagggttctagctgttggtctgagagtctgtttttacttctgggcaattggactccagcctgagggactccttatggtctgaagcactgggataaaattcaaaactgagagttgttgactacattttctcttgaattctttcttaccatatcaagtggaaggtccctgattggccaacgatctttaacaagcaagacggttttgttctttgttccagcaaatgctcgcatttaactcatctgggcctgtctgttggaatgtattagttaagtgtgctttgaggaactgtctaatccaggaaggaatatattggtatttggcgatccagcccttttcccttcaatgtaaaacattgattttcatgccactttaatgtgccagtaggtcacaaatagaatgcaagtaactgctagaacagggaagagtccagggaggcttaaagcatttctatctgtctgcaactaagcaggtggctttaaagtgggaaataggtcttttggctagaaatctgcttgttggggttttttgtttttttggttttttttgaggtgaagtcttgttctgtcgcccaggctggagtgcagtggtgtgatctcggctcactgcaagctacacctcccaggttcacaccatgttcctgcctcagcctcccgagtagctaggactacaggcacccaccaccacacccggctaattttttttaaaatttttttttagtagagacggggtttcgctgtgttagccaggatgatctcgatctcctgacctcgtgatctgcctgcctcggcctcccaaagtgctgggattacaggtgtgagccaccacgcctggcctggggatttttattgtaagggttagagcagaaaagtctggagatgagactgagcagacctgcaagtgagctttcagtttttctcagttgctttaacctgaagtgagatcagcatctcatttcaaaagaggcaggtcatttccacagtgttctgtagggcaactccaaagtgactttcttttctttttgtaatgaacactgcaatttgagcaagagtctagaagagcaaaactttttgattgacagcaaagttgtagctcagaaaagtgctcactgagctcagaaatgtattgacagccaggggaggaaagtctattgacagatctggaggtaatcacaagttaatgaagagctctatttaggcaagggaggcagtttgattatttcttttttgaattgaaaggcatatggcctggactgtctctggcagtgaaatcaataccatgaaatggccttttcctttcagccttgtctgttcttaaagcacaatgcattgaggaatgctcaaccaggtgaggaaattcattgtttcagtatatgtacaagataaacctactaaaggccactcacaatttggaagtatggaaacctaaatttactgaaataataaattagggacttggctattttagaaagctcttctttcaaaaggttcttcgttatagttactatttggactaaaggaacaaggtagacttttaattaacctttttttttctagtgataaaattgcagagcaggaatggaatcaaggagatgatctattcttaacctaatcatttcacagatgaggaaatggaccagaaagataaggccaacagccctgggtccttggtacctccttcaatacactttttattttattttatttattttattttattttattttcaagatggagttttgctctgtccctaggctggagtgcaatggcgcaatctcagctcactgcaacctctgcctcccgggttcaagcgattctcctgcctcagccccgaagtagctgggattacaggcatgtgccatcaagcctggctaattttgtatttttaatagagatggggttttgccgtgttggccaggctggtctcgaactcctgacctcgggtgatctgccagccttagccttccaaagtgctgggattacaggtgtgagccactgtgcctggccgctttatttattattaatattattattattactgagacaaagtctcactctgtcacccaggctggagttcagtggtgtgatctcagctcactgcagcctctgccacccaggttcaagggattctcctgcctcagcctcctgagtagatgggactacagatgtgcaccaccaggtctggctaatttttcttatttttagtagagatggggtttcaccatgttgaccaggctggctagttcatttggctagtttgggagttctgcccgcctcggcctctcaaagtgctgggatttcaggcatgagccaccgcgcccagcctacttcaatatactttatttatttttatttttttagttttgagacggagtctcgctctgtcacccaggctggagtgcagtggcacaatctcggctcactgcaagctccgcctcctgggttcacgccattctcctgcctcagcctcccgagtagctgggactacgggcgcccaccaccgtgcccggctaattttttgtatttttagtagagacagggtttcactgtgttagccaggatggtctcggtctcctgacctcgtgatctgcccacctcggcctcccaaagtgctgggattacaggcgtgagccaccgcacccggcaatatactttaaattatacttcctttaaaaaaatgttaatggttccctaaatttacaatatacattttaatctacgtctaccttcaaataacacttcatgtgtagtgcagatactttataacagggtagtcccaattcctctctcccaacccctatgaagttgctgtctctcatttcacttattcatgggttataatcatctaatacattattactgctattaaacagttacccttcagttcaagtaagaattttaaaaattaaagatttggttttgcctttatttcttctctgacagttgtcctttctttatagagatccaagtctgacgtatatcattttccttctactatttcttgcatggcaggcctgatggcaacgaattccctgtctgtgtctgagaaagtctttttccttaacttttgaaggatatttttactgatacaagattccatatttttcttctttcggccctttattttcacttcacacatttcttgcttgcatggtttctgatgagaagtccactataattcttatccatgttcttctataggctaaacaaaaattaaaaatctgcctctgccttctttgtctctcttaatttttggtttcctacagcaggggtccccaatgcccaggctgcagacctgtactggtcagtggcccattaggaatcaggccacatgtcaggaggtaagcagcgatcattactgcctgagttcagcctcctgtcagatcagcagcagcattagattttcacaggagcttgaaccctattgtgaactgtgcatgcaagggatctaggttgcatactccttatgcgaatctaactgattatctgaggtggaacagtttcatcccaaaaccatctccccgccaccatggaaatattgtcttccacgaaaccagtccctgatgccaaaaaggttggggactgcagttctacagtgtaaatctgatatgcctaggtgtagtttgtttgtttgtttgttttagtttgtttctgttacactgttttttggtttctagcattagattaccagaatttccatctctgtgcttacattatccatctgtttcttgcatgttgcctacttttcccatttgagcccttaacaatgatttttgaattccctgtctggtaaatccagcagccatatcatattggagtctggttttgatgctttgatgcttgcttgatctgtgtttttttttttttttttttgagacggagtctcaccctgttgcccaggctggagtgcagtggcctgatctcggctcactgaaacctctgtctcccgggttcaagagattctcctgcctcagcctccccagcagctgggattacaggcgcctgccaccacgcctggctaatttttgtatttttaatagagatggggtttcaccatgttggccaggctggtctcgaactcctgacctcgtgatcctcccacctcagcctcccaaagtgctgggattacaggcacgagccaccgtgcccagcccttgatctgtcttcttacttgctttttagcataccttgtaatttttattgaaagttggacatgtattgggtaatagggactgagataaataggcatttagtgtgaggatttatgttcatttgtctaggagctgggctttgtttagccctgttggtgtggtggtaaggcacaagggagaggagtgttctcaatcttaacgattaaatctcaagtctcttagtgggcttgagtctctggcctgggaccttcacttgtgcttcgttttggaaagctttcctatccccctcaggtgagacaggaagaggagaaatggctggagcgagaggagtgcctttccccatggctctagaacaagcctaaagcctggttaagtctttcccccgaagagtttattttcttttatcatttttattatgaagaaagctctggacgtatttcataagaatcactcttcccctcctgcaagaactatgatggcatctttctctgatcttcacaatgagaaactggtgggattcctagaggtaatgttcacaaaaccaagaggctttccccaagactgttcccagaagtgagcctaccagtttagagatccaacacttctgctccaggtaagttgatctcagctttgtctctggatttgctggagacagtttgcaaactctggagacagtttgccctgtaatgagtccaagtcattggttttcagtttgtccagctttttcttataaaagcaaagagtgacaacttccaagctttttatatgatgaaactcatacaggaagtccaacgtctccatgtggccttccattatataaataacctaacccgagcatcggcagagggaaaattcctccaaagactttttgtttctgaaataatttagaaagagcagttgaaaaacatagcaagaaaaactttctgagcaaattacatggtcaattgctttttagtaacatttttttctcattataaaagcaacacgtgctgatggtaaacagttgaaaatacgataaggtgtattgaaggaaatgtaatttgcctgcaatcttactaagagataaccagttaacattttgccgtattttatttttcatgactgtgtatagctagaaacacatacctttaaaattggaatcattactagtgttcttttattagcctgttgtccttttcttacctgactgtaatatttaaccattttcccatgtcagttaaatattctttagaaatatgtttggagcatctgcataaaaatgtgttataagggagtgtcattatttaactgttacctgtttgacaataataccacaacgaccatccttgtgcataaattcttgtgtacagctcttaaatttttcttaaagctactggatacaattgctaggtaaagagttatcaatattaaggcgatattaatattctaaggcttttgatatatgccaactgtgttttgggtggtaaaggtcttcttgagagaggtgccctaagaggtgtggtttttgtttgtttgtttgagacagagtctcgctctgtcagcccaggctggagtgcagtggcacgatcttggctcaccacaagctccgcctcctgggttcacatcattctcctgcctcagcctcctgagtagctgggactacaggcgcctgccaccacgcccggctaatttttttttttttttttgtatttttagtagagacagggtttcactgtgttagccaggatggtctcaatctcctgacctggtgatccgcccacctcagcctcccaaagtgctgggattacaggcgcaagccaccatggacggcctcctaagaggtgttttaagagcccagcatcacataggactcatattcttctcacctgcatttgacaccagtgggatgcttcctctgaccacaccttttgttgagcacagcatattttgtgacatttgtatcatattatgagaaatagtacagaggaaagaatgcgagctttataatcagcaacctgggtgctgtggtcagaatgtttgtatccccctgaaaactcatatgttgaaatccttacttccaaggtgatgagggtgggaggtgattaggtcattggggtggagccctcatgaatgggattagtgtcattctaaaagaggccttagggaaaccccccccacccctcccaccatgtgagaac

SEQ ID NO: 3234 - DNA, 4476 bp, Homo sapiens
gtcgtttggagctgcgacgccaaacatggcgtgttcctagaagccgctttcggcatcagtaggcggcggcgtggggtctggcagcgtggggagagggaccaaccgacgccacttcgtgttgggaagtgggagcgggagggccgggcaattcccgaccgaaccaaacggtttccatggatctcaatagtgccagcactgttgttcttcaggtgttaacacaggccaccagtcaggatactgctgtgttaaaaccagctgaggagcagttgaagcagtgggagacacagccaggtttctattcagtgttgctgaatattttcaccaaccacactttggatataaatgtaaggtggcttgctgtactgtattttaaacatggaattgatcgctactggagacgtgtagcacctcatgctctctcagaggaggagaaaactactctgcgtgcagggctcatcaccaacttcaatgaaccaataaaccagattgcaactcagattgcagtgctcattgcaaaagttgctagattggattgtcccagacagtggcctgaactaattcccactcttatagagtctgttaaagtccaggatgatcttcgacagcacagagcattacttaccttctatcatgttaccaagacactggcatctaaacgacttgctgctgatagaaaactattttatgatttagcttctggaatttataattttgcctgctctctgtggaatcaccacacagacacattcctgcaagaagtttcttctggcaatgaagctgcaattttgagttcactagaacgaacactgctatcattgaaagtgctgcgtaagttaactgttaatggatttgtggaacctcataagaatatggaggtgatgggttttttacatggaatatttgaacgtctaaaacagtttctggaatgcagtagaagtataggtacagataatgtgtgtagagatagactggaaaagaccatcattctttttactaaagtgcttttggacttcttggatcagcatcctttttcatttactcctctaattcagagatcactggaattttctgtaagctatgtttttacagaagttggtgaaggcgttacatttgaacgattcattgtccaatgtatgaatcttattaagatgattgtcaaaaattatgcttataagccatccaaaaattttgaagatagcagccctgaaactcttgaagcccataagattaagatggcattcttcacatatcctactttgacagagatatgtagaagattagtctctcattatttcctattaactgaagaagaactgacaatgtgggaagaagacccagaaggctttacagtggaagaaacaggaggagattcttggaaatatagtttgaggccatgcactgaagtattatttatagatatattccatgaatataatcagactcttactcctgtacttctagaaatgatgcaaacacttcaaggacccacaaatgtggaagatatgaatgcactgttaatcaaagatgctgtgtataatgctgttggattagctgcttatgagctctttgacagtgttgattttgatcagtggtttaaaaaccagcttcttccagaattacaagtcattcacaataggtataagccattgcgacgcagggtgatttggctcatcggtcagtggatttctgtgaaattcaagtctgacttaagacccatgctttatgaagcaatctgtaacttgcttcaagatcaagatttagtggtccgtattgaaacagctacaactttgaagttaactgttgatgattttgaatttagaacagatcagtttctaccgtatttggaaaccatgttcacactactttttcagttactgcagcaagttacagaatgtgacacaaagatgcatgttttgcatgtcctttcttgtgtgatcgaaagagtcaacatgcagatacgaccatatgtgggatgtttggtacaatatttgcccctcctttggaagcagagtgaagaacacaatatgttgagatgtgctattttgacaacacttattcatcttgttcagggattaggagcagacagcaagaacctgtaccctttcctgctcccagttattcaactgagtacagatgtttcacagcctccacatgtttatcttctggaagatggtttagaattatggttagtaactttggaaaacagtccatgtattacaccagagttgcttcgtatatttcagaatatgtcaccacttcttgaactaagttcagaaaatcttagaacttgctttaagatcatcaatggttatatctttttatcatcaacagaatttttacagacatacgcagtaggtctatgccagtccttttgtgaacttttaaaggaaattactacagaaggtcaagttcaggtgctcaaggttgtggaaaatgcccttaaagtgaacccaatactaggtccacaaatgtttcaaccgattttaccctatgttttcaagggtattatagaaggggagaggtatcctgtagtgatgtccacgtatcttggagttatgggtcgagttctactacaaaacactagttttttttcttcactacttaatgagatggcccataaatttaatcaggagatggaccagcttttgggaaatatgattgaaatgtgggttgatcgaatggacaacattacccagcctgaaagaagaaaactttcagctttggctttgctctctcttctgccatctgataatagtgttatccaagataaattctgtgggattataaacatttcagtagaaggcctgcatgatgtcatgacggaagatcctgaaacaggaacttataaagactgtatgttgatgtctcatcttgaggaaccaaaagtaacagaagatgaagaaccacccacagaacaagataagaggaaaaagatgctggccctgaaggaccctgttcatacagtgtcactgcagcagttcatctacgagaagctcaaggcacagcaggagatgctaggagaacaaggtttccagtccctcatggaaacagtggatacggagattgtcacccagctacaggagtttttgcaaggattctaagagcacatgacatgtggctgcctcccctttcagaaacaagctgagtaacccagcctgccgtttgtatgtgagagcctgctgagatgaagaaatcacttcatgaaaataagcaaagaccacacattttttactacaaaatgtaaaggataaatgtaaatcctgcataactaaaatcacaaacctattcctcaaaagaatttaattttatatttatgagggggcccttcactaaaaagtacatgtaaaagtacatttgatgacaatagctgcttagtttcctgttaagagaagaaactttatcttttaattatgtgctcttaatatttgaagatgagagttaatacctgagatgtttttctgcaaccaaaattcattaaatttggctgccttatcctttttttaagctaatgaaactacaggtttgaaaaatgacaaagctgttcagatgatgctattaaagaaatgtgtgtactaagcaaaaatatataaatagtgacaaatacacattaccaagcttatcttgcaagggagttattttcatctaacatagaaagtgtgttttatcagacaaatgcttttattttcattctaataatttgatacagaaattagtaaaggcatttttttctttttttttccagtaaatacattgggtctataaatgtgcatttgtaagggccacaaaagtgaacgtgtggtactgtagtaccacgtgggagacctctggttatggtttagtcctagttcctttgttactcctgtgagcaccgagaagaactgggcgactcccagtcccacctgtgctgtgacagtcccacgtggctatgacagactgtttagtacttacccttctcaggttcctcagtgcaggggtgcatcagggcctcaataataggggtatacctgggaggatccagcagtaatccccagggtactaggattactagtactctgatggaactagtcttccttccttattcctcgaacatgcagtacataaaaaggggaaaaggagaaaaaaaaagccttactttgttttacttgccatttattgtaaggaaactttaaagcattttttaggaaatactcaaaagcaaggttggaaaatgttttatctttctatagaaagttgggtacagtatgtaactgcgggaaacccactgcccctttgtaagctgtggaacccaaactgtatggggatatttgatgttttcagaaagaggaagaaaatatggtccaaattaaattttccaaagatacctcaccttggactgatttgtctgactacttttcttgctccccccaaaaaatgagttcttaaaaattgcccagtgacttatagagaattttcttttatactctagctttgattctg

SEQ ID NO: 3235 - protein, 971 aa, Homo sapiens
MDLNSASTVVLQVLTQATSQDTAVLKPAEEQLKQWETQPGFYSVLLNIFTNHTLDINVRWLAVLYFKHGIDRYWRRVAPHALSEEEKTTLRAGLITNFNEPINQIATQIAVLIAKVARLDCPRQWPELIPTLIESVKVQDDLRQHRALLTFYHVTKTLASKRLAADRKLFYDLASGIYNFACSLWNHHTDTFLQEVSSGNEAAILSSLERTLLSLKVLRKLTVNGFVEPHKNMEVMGFLHGIFERLKQFLECSRSIGTDNVCRDRLEKTIILFTKVLLDFLDQHPFSFTPLIQRSLEFSVSYVFTEVGEGVTFERFIVQCMNLIKMIVKNYAYKPSKNFEDSSPETLEAHKIKMAFFTYPTLTEICRRLVSHYFLLTEEELTMWEEDPEGFTVEETGGDSWKYSLRPCTEVLFIDIFHEYNQTLTPVLLEMMQTLQGPTNVEDMNALLIKDAVYNAVGLAAYELFDSVDFDQWFKNQLLPELQVIHNRYKPLRRRVIWLIGQWISVKFKSDLRPMLYEAICNLLQDQDLVVRIETATTLKLTVDDFEFRTDQFLPYLETMFTLLFQLLQQVTECDTKMHVLHVLSCVIERVNMQIRPYVGCLVQYLPLLWKQSEEHNMLRCAILTTLIHLVQGLGADSKNLYPFLLPVIQLSTDVSQPPHVYLLEDGLELWLVTLENSPCITPELLRIFQNMSPLLELSSENLRTCFKIINGYIFLSSTEFLQTYAVGLCQSFCELLKEITTEGQVQVLKVVENALKVNPILGPQMFQPILPYVFKGIIEGERYPVVMSTYLGVMGRVLLQNTSFFSSLLNEMAHKFNQEMDQLLGNMIEMWVDRMDNITQPERRKLSALLSLLPSDNSVIQDKFCGIINISVEGLHDVMTEDPETGTYKDCMLMSHLEEPKVTEDEEPPTEQDKRKKMLALKDPVHTVSLQQFIYEKLKAQQEMLGEQGFQSLMVDTEIVTQLQEFLQGF

SEQ ID NO: 3236 - DNA, 4401 bp, Homo sapiens
acgccaaacatggcgtgttcctagaagccgctttcggcatcagtaggcggcggccgggagggccgggcaattcccgaccgaaccaaacggtttccatggatctcaatagtgccagcactgttgttcttcaggtgttaacacaggccaccagtcaggatactgctgtgttaaaaccagctgaggagcagttgaagcagtgggagacacagccaggtttctattcagtgttgctgaatattttcaccaaccacactttggatataaatgtaaggtggcttgctgtactgtattttaaacatggaattgatcgctactggagacgtgtagcacctcatgctctctcagaggaggagaaaactactctgcgtgcagggctcatcaccaacttcaatgaaccaataaaccagattgcaactcagattgcagtgctcattgcaaaagttgctagattggattgtcccagacagtggcctgaactaattcccactcttatagagtctgttaaagtccaggatgatcttcgacagcacagagcattacttaccttctatcatgttaccaagacactggcatctaaacgacttgctgctgatagaaaactattttatgatttagcttctggaatttataattttgcctgctctctgtggaatcaccacacagacacattcctgcaagaagtttcttctggcaatgaagctgcaattttgagttcactagaacgaacactgctatcattgaaagtgctgcgtaagttaactgttaatggatttgtggaacctcataagaatatggaggtgatgggttttttacatggaatatttgaacgtctaaaacagtttctggaatgcagtagaagtataggtacagataatgtgtgtagagatagactggaaaagaccatcattctttttactaaagtgcttttggacttcttggatcagcatcctttttcatttactcctctaattcagagatcactggaattttctgtaagctatgtttttacagaagttggtgaaggcgttacatttgaacgattcattgtccaatgtatgaatcttattaagatgattgtcaaaaattatgcttataagccatccaaaaattttgaagatagcagccctgaaactcttgaagcccataagattaagatggcattcttcacatatcctactttgacagagatatgtagaagattagtctctcattatttcctattaactgaagaagaactgacaatgtgggaagaagacccagaaggctttacagtggaagaaacaggaggagattcttggaaatatagtttgaggccatgcactgaagtattatttatagatatattccatgaatataatcagactcttactcctgtacttctagaaatgatgcaaacacttcaaggacccacaaatgtggaagatatgaatgcactgttaatcaaagatgctgtgtataatgctgttggattagctgcttatgagctctttgacagtgttgattttgatcagtggtttaaaaaccagcttcttccagaattacaagtcattcacaataggcagtataagccattgcgacgcagggtgatttggctcatcggtcagtggatttctgtgaaattcaagtctgacttaagacccatgctttatgaagcaatctgtaacttgcttcaagatcaagatttagtggtatgtttcttaatattccttaactgttcttcacctgttgatgattttgaatttagaacagatcagtttctaccgtatttggaaaccatgttcacactactttttcagttactgcagcaagttacagaatgtgacacaaagatgcatgttttgcatgtcctttcttgtgtgatcgaaagagtcaacatgcagatacgaccatatgtgggatgtttggtacaatatttgcccctcctttggaagcagagtgaagaacacaatatgttgagatgtgctattttgacaacacttattcatcttgttcagggattaggagcagacagcaagaacctgtaccctttcctgctcccagttattcaactgagtacagatgtttcacagcctccacatgtttatcttctggaagatggtttagaattatggttagtaactttggaaaacagtccatgtattacaccagagttgcttcgtatatttcagaatatgtcaccacttcttgaactaagttcagaaaatcttagaacttgctttaagatcatcaatggttatatctttttatcatcaacagaatttttacagacatacgcagtaggtctatgccagtccttttgtgaacttttaaaggaaattactacagaaggtcaagttcaggtgctcaaggttgtggaaaatgcccttaaagtgaacccaatactaggtccacaaatgtttcaaccgattttaccctatgttttcaagggtattatagaaggggagaggtatcctgtagtgatgtccacgtatcttggagttatgggtcgagttctactacaaaacactagttttttttcttcactacttaatgagatggcccataaatttaatcaggagatggaccagcttttgggaaatatgattgaaatgtgggttgatcgaatggacaacattacccagcctgaaagaagaaaactttcagctttggctttgctctctcttctgccatctgataatagtgttatccaagataaattctgtgggattataaacatttcagtagaaggcctgcatgatgtcatgacggaagatcctgaaacaggaacttataaagactgtatgttgatgtctcatcttgaggaaccaaaagtaacagaagatgaagaaccacccacagaacaagataagaggaaaaagatgctggccctgaaggaccctgttcatacagtgtcactgcagcagttcatctacgagaagctcaaggcacagcaggagatgctaggagaacaaggtttccagtccctcatggaaacagtggatacggagattgtcacccagctacaggagtttttgcaaggattctaagagcacatgacatgtggctgcctcccctttcagaaacaagctgagtaacccagcctgccgtttgtatgtgagagcctgctgagatgaagaaatcacttcatgaaaataagcaaagaccacacattttttactacaaaatgtaaaggataaatgtaaatcctgcataactaaaatcacaaacctattcctcaaaagaatttaattttatatttatgagggggcccttcactaaaaagtacatgtaaaagtacatttgatgacaatagctgcttagtttcctgttaagagaagaaactttatcttttaattatgtgctcttaatatttgaagatgagagttaatacctgagatgtttttctgcaaccaaaattcattaaatttggctgccttatcctttttttaagctaatgaaactacaggtttgaaaaatgacaaagctgttcagatgatgctattaaagaaatgtgtgtactaagcaaaaatatataaatagtgacaaatacacattaccaagcttatcttgcaagggagttattttcatctaacatagaaagtgtgttttatcagacaaatgcttttattttcattctaataatttgatacagaaattagtaaaggcatttttttctttttttttccagtaaatacattgggtctataaatgtgcatttgtaagggccacaaaagtgaacgtgtggtactgtagtaccacgtgggagacctctggttatggtttagtcctagttcctttgttactcctgtgagcaccgagaagaactgggcgactcccagtcccacctgtgctgtgacagtcccacgtggctatgacagactgtttagtacttacccttctcaggttcctcagtgcaggggtgcatcagggcctcaataataggggtatacctgggaggatccagcagtaatccccagggtactaggattactagtactctgatggaactagtcttccttccttattcctcgaacatgcagtacataaaaaggggaaaaggagaaaaaaaaagccttactttgttttacttgccatttattgtaaggaaactttaaagcattttttaggaaatactcaaaagcaaggttggaaaatgttttatctttctatagaaagttgggtacagtatgtaactgcgggaaacccactgcccctttgtaagctgtggaacccaaactgtatggggatatttgatgttttcagaaagaggaagaaaatatggtccaaattaaattttccaaagatacctcaccttggactgatttgtctgactacttttcttgctccccccaaaaaatgagttcttaaaaattgcccagtgacttatagagaattttcttttatactctagctttgattctg

SEQ ID NO: 3237 - protein, 972 aa, Homo sapiens
MDLNSASTVVLQVLTQATSQDTAVLKPAEEQLKQWETQPGFYSVLLNIFTNHTLDINVRWLAVLYFKHGIDRYWRRVAPHALSEEEKTTLRAGLITNFNEPINQIATQIAVLIAKVARLDCPRQWPELIPTLIESVKVQDDLRQHRALLTFYHVTKTLASKRLAADRKLFYDLASGIYNFACSLWNHHTDTFLQEVSSGNEAAILSSLERTLLSLKVLRKLTVNGFVEPHKNMEVMGFLHGIFERLKQFLECSRSIGTDNVCRDRLEKTIILFTKVLLDFLDQHPFSFTPLIQRSLEFSVSYVFTEVGEGVTFERFIVQCMNLIKMIVKNYAYKPSKNFEDSSPETLEAHKIKMAFFTYPTLTEICRRLVSHYFLLTEEELTMWEEDPEGFTVEETGGDSWKYSLRPCTEVLFIDIFHEYNQTLTPVLLEMMQTLQGPTNVEDMNALLIKDAVYNAVGLAAYELFDSVDFDQWFKNQLLPELQVIHNRQYKPLRRRVIWLIGQWISVKFKSDLRPMLYEAICNLLQDQDLVVCFLIFLNCSSPVDDFEFRTDQFLPYLETMFTLLFQLLQQVTECDTKMHVLHVLSCVIERVNMQIRPYVGCLVQYLPLLWKQSEEHNMLRCAILTTLIHLVQGLGADSKNLYPFLLPVIQLSTDVSQPPHVYLLEDGLELWLVTLENSPCITPELLRIFQNMSPLLELSSENLRTCFKIINGYIFLSSTEFLQTYAVGLCQSFCELLKEITTEGQVQVLKVVENALKVNPILGPQMFQPILPYVFKGIIEGERYPVVMSTYLGVMGRVLLQNTSFFSSLLNEMAHKFNQEMDQLLGNMIEMWVDRMDNITQPERRKLSALLSLLPSDNSVIQDKFCGIINISVEGLHDVMTEDPETGTYKDCMLMSHLEEPKVTEDEEPPTEQDKRKKMLALKDPVHTVSLQQFIYEKLKAQQEMLGEQGFQSLMVDTEIVTQLQEFLQGF

SEQ ID NO: 3238 - DNA, 4398 bp, Homo sapiens
acgccaaacatggcgtgttcctagaagccgctttcggcatcagtaggcggcggccgggagggccgggcaattcccgaccgaaccaaacggtttccatggatctcaatagtgccagcactgttgttcttcaggtgttaacacaggccaccagtcaggatactgctgtgttaaaaccagctgaggagcagttgaagcagtgggagacacagccaggtttctattcagtgttgctgaatattttcaccaaccacactttggatataaatgtaaggtggcttgctgtactgtattttaaacatggaattgatcgctactggagacgtgtagcacctcatgctctctcagaggaggagaaaactactctgcgtgcagggctcatcaccaacttcaatgaaccaataaaccagattgcaactcagattgcagtgctcattgcaaaagttgctagattggattgtcccagacagtggcctgaactaattcccactcttatagagtctgttaaagtccaggatgatcttcgacagcacagagcattacttaccttctatcatgttaccaagacactggcatctaaacgacttgctgctgatagaaaactattttatgatttagcttctggaatttataattttgcctgctctctgtggaatcaccacacagacacattcctgcaagaagtttcttctggcaatgaagctgcaattttgagttcactagaacgaacactgctatcattgaaagtgctgcgtaagttaactgttaatggatttgtggaacctcataagaatatggaggtgatgggttttttacatggaatatttgaacgtctaaaacagtttctggaatgcagtagaagtataggtacagataatgtgtgtagagatagactggaaaagaccatcattctttttactaaagtgcttttggacttcttggatcagcatcctttttcatttactcctctaattcagagatcactggaattttctgtaagctatgtttttacagaagttggtgaaggcgttacatttgaacgattcattgtccaatgtatgaatcttattaagatgattgtcaaaaattatgcttataagccatccaaaaattttgaagatagcagccctgaaactcttgaagcccataagattaagatggcattcttcacatatcctactttgacagagatatgtagaagattagtctctcattatttcctattaactgaagaagaactgacaatgtgggaagaagacccagaaggctttacagtggaagaaacaggaggagattcttggaaatatagtttgaggccatgcactgaagtattatttatagatatattccatgaatataatcagactcttactcctgtacttctagaaatgatgcaaacacttcaaggacccacaaatgtggaagatatgaatgcactgttaatcaaagatgctgtgtataatgctgttggattagctgcttatgagctctttgacagtgttgattttgatcagtggtttaaaaaccagcttcttccagaattacaagtcattcacaataggtataagccattgcgacgcagggtgatttggctcatcggtcagtggatttctgtgaaattcaagtctgacttaagacccatgctttatgaagcaatctgtaacttgcttcaagatcaagatttagtggtccgtattgaaacagctacaactttgaagttaactgttgatgattttgaatttagaacagatcagtttctaccgtatttggaaaccatgttcacactactttttcagttactgcagcaagttacagaatgtgacacaaagatgcatgttttgcatgtcctttcttgtgtgatcgaaagagtcaacatgcagatacgaccatatgtgggatgtttggtacaatatttgcccctcctttggaagcagagtgaagaacacaatatgttgagatgtgctattttgacaacacttattcatcttgttcagggattaggagcagacagcaagaacctgtaccctttcctgctcccagttattcaactgagtacagatgtttcacagcctccacatgtttatcttctggaagatggtttagaattatggttagtaactttggaaaacagtccatgtattacaccagagttgcttcgtatatttcagaatatgtcaccacttcttgaactaagttcagaaaatcttagaacttgctttaagatcatcaatggttatatctttttatcatcaacagaatttttacagacatacgcagtaggtctatgccagtccttttgtgaacttttaaaggaaattactacagaaggtcaagttcaggtgctcaaggttgtggaaaatgcccttaaagtgaacccaatactaggtccacaaatgtttcaaccgattttaccctatgttttcaagggtattatagaaggggagaggtatcctgtagtgatgtccacgtatcttggagttatgggtcgagttctactacaaaacactagttttttttcttcactacttaatgagatggcccataaatttaatcaggagatggaccagcttttgggaaatatgattgaaatgtgggttgatcgaatggacaacattacccagcctgaaagaagaaaactttcagctttggctttgctctctcttctgccatctgataatagtgttatccaagataaattctgtgggattataaacatttcagtagaaggcctgcatgatgtcatgacggaagatcctgaaacaggaacttataaagactgtatgttgatgtctcatcttgaggaaccaaaagtaacagaagatgaagaaccacccacagaacaagataagaggaaaaagatgctggccctgaaggaccctgttcatacagtgtcactgcagcagttcatctacgagaagctcaaggcacagcaggagatgctaggagaacaaggtttccagtccctcatggaaacagtggatacggagattgtcacccagctacaggagtttttgcaaggattctaagagcacatgacatgtggctgcctcccctttcagaaacaagctgagtaacccagcctgccgtttgtatgtgagagcctgctgagatgaagaaatcacttcatgaaaataagcaaagaccacacattttttactacaaaatgtaaaggataaatgtaaatcctgcataactaaaatcacaaacctattcctcaaaagaatttaattttatatttatgagggggcccttcactaaaaagtacatgtaaaagtacatttgatgacaatagctgcttagtttcctgttaagagaagaaactttatcttttaattatgtgctcttaatatttgaagatgagagttaatacctgagatgtttttctgcaaccaaaattcattaaatttggctgccttatcctttttttaagctaatgaaactacaggtttgaaaaatgacaaagctgttcagatgatgctattaaagaaatgtgtgtactaagcaaaaatatataaatagtgacaaatacacattaccaagcttatcttgcaagggagttattttcatctaacatagaaagtgtgttttatcagacaaatgcttttattttcattctaataatttgatacagaaattagtaaaggcatttttttctttttttttccagtaaatacattgggtctataaatgtgcatttgtaagggccacaaaagtgaacgtgtggtactgtagtaccacgtgggagacctctggttatggtttagtcctagttcctttgttactcctgtgagcaccgagaagaactgggcgactcccagtcccacctgtgctgtgacagtcccacgtggctatgacagactgtttagtacttacccttctcaggttcctcagtgcaggggtgcatcagggcctcaataataggggtatacctgggaggatccagcagtaatccccagggtactaggattactagtactctgatggaactagtcttccttccttattcctcgaacatgcagtacataaaaaggggaaaaggagaaaaaaaaagccttactttgttttacttgccatttattgtaaggaaactttaaagcattttttaggaaatactcaaaagcaaggttggaaaatgttttatctttctatagaaagttgggtacagtatgtaactgcgggaaacccactgcccctttgtaagctgtggaacccaaactgtatggggatatttgatgttttcagaaagaggaagaaaatatggtccaaattaaattttccaaagatacctcaccttggactgatttgtctgactacttttcttgctccccccaaaaaatgagttcttaaaaattgcccagtgacttatagagaattttcttttatactctagctttgattctg

SEQ ID NO: 3239 - protein, 971 aa, Homo sapiens; identical to SEQ ID NO: 3235

SEQ ID NO: 3240 - DNA, 219226 bp, Mus musculus
  misc_feature (1)...(219226): n = A, C, G, or T/U
tagaagacttctgggtttccctctgaaagaaagccctccatctaaacccgctgtcccttccatccctcatttcggtctcgcaaaccactcctccaagcctttccattgtgctctttcgcctgcataagaccttcatctcctttgtagtggggagacttacttgaggctatcagaacctccggctgcaatggagctgtatggaaaggtaaacagaaaggagtgcctggcgggctcagtcagaaatctagcttttgtggatatgtgtgtgtgtgtgtgtgtgtgtgtgtgtgtgtgtgtgttcgcgtttgcgtgcgtgccgatcttctcaattcagtcttgcggatgaaccgcttttcttatgtgtgtgccacccactgccgttttccccgcacgatcgttgaataagactgtaaaactactccactctgggtaagtataaactttccgggttcaggatagagataaggtaaagcccatttgcattggaaattagaacaaagtgctgcgttttctagccagagagatacagtctggcttccaaaagcgatactgtgaagaaaaagtcctagtttgggatgaattggtgttattgtcgctagcgctctttgaagaaatggttaggcaggctgagagcgagaacaaccggtgtaactggaaagaagggaggtttccaccgcccagtgcagctggaggggctagcccgagggaaatctttctgggtctctgggaattgtagttcacaattttcccatttgagcatttgcctcttaagattagactacaactcccagaagctcacggggtccctggccagaacgcttgtgcggagtcaggagcggacagctccggtgctgatgttggagcgggctacagagccccacgcgtgcggagtgttgcggggagcgcgcaggctgtgcacgcttgaccaggctcccggaccagcgctgtcctagcaagagagaaaggacatttgcctacaatgagacacgaggcgcccatgcaggtgggtctacaaagaaagaaagaatggtctcggagaaactgagagggtctctctagcagctcaggggacttgatgaaagatagatagggttgttcattttctttctgggctccctaggaggttgagtgtggaaaatgaaaacacgagctaacaaagtgaggacagcccatctcttgttgtctttgatggtcttggcttcctgggttagtgatagcggtgtgaactggagaattttctcacgaatttactgagagttctccatctcgactgggtagagcgaattcagcttggttaaggacattaagaaagaaatgtcagtgtcagtatcccccaaagtggtctaaaaaacaagaaagataaaagaaaagaaagggcaaaaaagattagggtcctagtatcagaggtaaagagcaaacacattcacagttatctcagagctatgacatccttgatctatgtctgcttaactggccggaaacgtttcgaggaccctctcttccccagcattcctgtgatgaggtggccattcactgtaccactagattccccattttaatcacattcttcgggtttacttccttcagaaatgaagagtacctcttttggagctagtcacctaagttatgcttttaagtaaagactagttttgtttctcctatctgtgtacaattgattaaggctaaacataagtctatgtttgttagccaagctaaagacttgtttctcctatctgtgtacaactgattaaggctaaacataagtctatgtttgttagccaagctaaatgggctcattgcataacagagcggcgttttatgaatgggatgagaagattagaaagcactccatttggaatgtgttgcttcccttcagaatccacctctgttggtaaactcagcaacataaatatttgactatccagtctcaaacattccccatggtttcctcctgaatcaaggactttatacatctgctttcatttacttttaatttattttatgacttttatatacgtattaaggaatcctaactggacggttaaatgaaaacactatagaatttaattgttttcaggagtattatataatggaagacctcaaattacattaagagttattgaaaaattgattcgttcccaggaatagtgggccctttgtgtgacatcggatatttctgtttgtgagttagctttttattatagaccttgtgtaaaatgagtgtggacagacaataaagactgttgcaatcagggtctattagcttatgataatttccctttctggaggtgttgctaagagccaactagctgaattaataatatttgatgataagtatatattagcagttgtcttaaaaactgtgtttccatacttcactgtgcacatttacatcaaaatatgttatgactccaaaatttatgatttttcaattatttcaaaaatgaaaaataataatgtacattagaatttaaagttgatgctctgaaatctttctgtcaaaatggctattgtatattgatattatttttctgtgttgcttagactgtttagaaaggtaattaaatgttatagaactatatggagttattgctttaggacatatcttaaatcattgtgggtatgcccactagatatatactaggtattgtaaaaggtgtatttcaatgaaaactctaatggcaaattaatgtaaaaattaggtaatgtggacttaattttctgatagatacaggtacttttctatttatggaatattttaattcactgaattatatttttggaatttaatatatagcctccccaaagctattgtgattatgtcagacttgtgaaaagtgtacttatccaagaacacacattcatttcaatagattattgttatagtgacttctatcattttcatattttttaaattatgtaataattcagaggatgaatataacttaggttttcttaagcagcagttactctgctaggatccatttttctaaactagaatcatattccatgtaatgttgagacacaatgatgcaacattagaaatactggaaattccttttttcctttcaaacaataagctgtaccatcattctaaacatatgccccaagtgtttcttaacttacatttacaaaggatgagtcacaaggcaagcttcattttatacttcccttatctcagagtttttctccttttttggagtgtttagttcagttggtaatatgaaacagagtgagcttttagtttattggctagcttcctaagtattatggggatttttaaattctgaaataaaattatttgaaaaaaatgcacaaatgtccattataaagcatccaacattcttatatagatgcctttgtgctcagctcattatatttatctttgatatttggatattttctgcagaacatttccccccaagctgatagaaaataaggcaatattgtttctcgaagtgacgaccacaatgatgtgtgacgatagccttcagtgcttgcattgtctttctaattagataaccatggatagaacttgccaaatatgagttggaaacattagtatgggaggtggtcatttcagtcctctccttcagcatatcaataatttctgggagccaaatgacacagagaagagtgggcctcgtgattgagggcaagactttgagaacaactttaatacaggagccaaccaaaaaaaaaaaaaaaaaaaacccagtctagtcagtgcttggagtccagatgctactaatatgcatgtataaaccctcaaatgaattatgtatgagggccaaaatacaaataaattgtaaaactttacaatccaccattaccgactagaaaggaagattaatagagtttatgaagattaaacaacttctctaatatgaaagagttcatattcttccagatctttataaagatctcttatcattcctcctattattctgatttctcctgaagggataaatgtgtggtgtaaaaaatgaggacactgtgtataaatgctactcagtcatttggttgggaaaaaagaaaaacatattggctctctattttatgtttatagaataagcttgtataaactaaactaaatgtttgagaagggtcattgtgttttaaaggttttgctgtctatattctttgtaatttctttagtcccttatgggactaaagtggaattcatttgtcttttacatttagcatttagcttaggtctaggtttatctgatagaagcagagcctttgtattattcaagaaacgtatatgctgaagcaatgggacagagtggaaagaatggattaaaggtaagcagaagtgagaaaagaatgtagacatagaccaaaaatgataggtaatttgggtctaagtattactgttgcattgtctatagaaaggttgtgatcttcctgtactttattattcatgaatgtctcattattttcatcctctgcaaccattcatctcatttgtgcaatgaactcttagtccttatcttttacaggcaccaagatttgtggctgatggtgggggagacagtcttctctatttctttttggcttgttgcttaggtagcatacttacaaaaataggaagcaaagagatttaacttaaacagcaaataacttttggtgccacaaggatgggtttccatctttactcttttaaagttcaataacttttggatttaatgtgaagtcacttctcaggtgaagagtgagaactgcattagtctatgggtaaagaaagaagtgtttagaagggagttgataggatgcttatttagcaaaatagtagtagacttacttctagagctccccaagtacatgttcttggccagatgtacagcactagtcattagttccctgcagtggactaagccttaaagtcaataataaaaagctgttggttacatctataacattcacaccattattgcattcatagatgcttcttgccagaccagttttgtggtttgtaggactcacagatttatgagatggataatgacttcccttctccagtagcctgagtagtatcttccagtatagtgaaagatatcaagcagggggaagctacaaatcaggattagcttggttcatctaagtctttataaaaatgtagtatcttcagcaacaatcgtcttaccatcaagttcttatggattcagaagagcaatgccaataatctgcattgctttgcgagcccctggacctggccacatgaccagttagttgaagggatgtgtcgcatatcttgggaatgaccaagatctcactatggaacccagagatgtcttgaacttgagagccttccaatgcagggtttgtaaaccacagtcttggctttgcttgccaattttcctggatagctcccagtgttgttgatgttgacttagaacagcccactgcctttagccatttctcttattttgtattttactgatgttagcttaaaaataaactcatatttcttatacttacattagtagaagtttagctttttagggtagaattaacatcactgagtttgattatttctttcctgctgataaatataagcatttcaatgattaaaatccctctatggatttctatgagctgactcataggtttctgaatacgttgtttggtttgtatatcatttcaaacactgctcactttcttagagtgttttcatgacaggtttgtatatccagatcttgcattaatattgacaattcactaaattttacttctatatcaatgaaaagagtagtttttaaggaatgcaatctttcaaaaataaatcaagcctatttttagatcagcatgagctataatgtgaacattctctctgtttttatgtgggccatacttgtgaagtgtagtgtctaaatgccagtttggtcatctgtggtgtcatgaagatcttaaatgtcctgactgagtttggatatacttatcatatcaacttctgtgaaatatattttccaatatttaaacacagtaatgtttctcaccttttcattttggtttcagttttcatgtattctgcacctttgttactaaatatacaaacatttgtaattattgtgccttcctgaagaatttctctatttatgtctatcatgtagccttctttatttctagtaagactcgttattactctatattatcaatgcagtttttgttgctttaatggtatttttattttatgcatgtatttttcttttgttgctttcaacttttatgcctttatgcttacaatacgaatcttgttatcaatgcatagttgggcctcacttttgtatctagactgagcatttattatctctgcctcttattatcattttgattcattttatgtattgtgatgattgatgttgttggatataaaccaataatttggctatttattgtttatgtactctgtctttttatttctcagccactcctttactatcttcatcttacttaaatattcttaggtatttcaattcctttgtatattttaatgcatttctttgcatttttttagtctttattcaaaggaatacatagcacacaactagacaacatgcctagacttcatatactgtatagtgaatttgctatgataaaatttcatgtgaacttcacttgcacttattataattttagctttaaacataatgtgtagttttcattaataacacacgcacacacacacacacacaccccacattcctgctgcctattaatcatgcctagtaacttcctcttgatttgaggttctatgttatcattttcttttgtcttacctatagtatagccctgtcagaagattctctcttgggatttctttctttctttctttctttctttctttctttctttctttctttctttctttctttctttctttctgtaaatcttgccttgaatttagaatgggagtttttaatgcctctgagaatttgtgttgatgcttttgttccattgctgaatttcgggatgcaatttctctgtcttctggcttatgttgtagaatcatcttctctttatactattttgccttagtttacatatgccattttgtttgttttgaatatatttctacttatctttgatatacatatttttcctttgtaatttttcaagttagagggatgaaatgaccatttcccacatgaacacttatatattccaaccaagtagaaattatttagtcattacatcatcaactatattctcatttcattgttctacacctgttcctttaaggcttcagttacatggaagttattgttccaatactgacccatcaactacaggcattctgcttatttttattttcactttttctttgttatactgtatgatttctagtgattcaccttcaagtttagtgactcttccgtgatgtatagtattttgttaattcaaatccaggggttatccatttcagtcattatactgtttcatttaggctcacaattggctccatttagactaaaaacatgatatgttacaaaccaaagacaaatgagcactcttgggttgagagattagagtattagaagagtttaatggggatcatttgtagcattgttcagaaaaaccaagaagaaatatgatgatctgagcctcttacagaaaaaagatacagaaattaaaccacagccctttgattatactttgttaattttgagtgtgaatattaacatttgaattttaatattttgtttgattatttctctattgattcatgtttctctggtgctgtacttgttatgccttaaaaggtccttataaagtctgaacaaggtatataattctaaaacagattcaaaatataatttcctttgctaacttatattttctttagtagctgcatttctatagacaaataaaactttatgcaatgttgatatatctcataacagtttgaagtgtcatgttgattttaatgagatcatgaaacacacacacacacacacacacacacacacacacacacacacacacacacacacacagtgaataatcaaatcatagaggtgaataaccatgtgtcctggccttcagcagatgctggcaaagtctaagttagatagagtatagtcctatgatcttaaaaacaaacaaacaaacaaaaaaaaccaaaaaaactagtaatttgtgtgtacttggcctcatgagaaaagtctgaaaccagtgacatttagctcacataccgttagcttatctcaaaacaaaatcataatgtaacctaaagagaagctggaagcctcttatctgtcttctgctattaggttaagtgtggtccatcgaagattcttatgtgacttgtcatctacccagtggccttgatgcatatctgatcttaccaacccgagaatcttgtcatctaatacagatagataatttctgccctcatggccatagcctgatgagccttaacaagcttgatgataggatatattaagtaccagttggcaaataatgattctcatatcaccctaacgtatgatattagaattaaaatatagatattccttgaaagtttgattcagtgaacacctgtctgagaggtggcactgataaaaaggatccagaggtatgggcgggtaggtgaacaagcctgcataaatgtgcacagggagatgtagactcattgtttatagacacagagtagccatttttggaagagaagcaagcatgtcttcttcagtctggaacgctacaatctggaaatgcaagtacattgaatattgattccttcagggtggtcagatagttctttgtcttagaaatgcatgggcagctaggtcctgacctcatgaatgtccaacacaagcgctgccttgatgaacggaatatggaagagagatgcccagaaccagaaggcataggtgctctcccagggtgcacctgactcttttaaggtatttaacgtctgtaatgccttaaagatgcttaaaggctaaagtttgttgggaaacaatatacgagaaataaaattcaggcttatttcctctagcaaaaaggttttccttagaatgcatagtggtgactctatctgtcctgtcttgcttcttatggtttaaagaagacatactctttttataagaaatatttgttatttcgccatctcaagttggacactatgtatcaacttttaaggctttttaataaaaaatgaggtaaggtactacagtgttattttttaaaggctcctgctgaaaaagctttggctaccctctgcagagctcagtggagcacttgtgcgtgctctgagaacatgataactgattcttgcagggtcaccccctcctattctgatagtgcttacagtgacttaaaacacaagtgcacagaaggttctgactactacagagcaaagataattgaaggagaagccatttcccagaatcagcatgtctagataggcttgacactgtagggtgctgagcattctctgacacagtcagtcttaaaagagtggactgtcactggcaccataaggggtaattggtcaagacaggagctggtaccgacctttagaatcatatttctgtggtcctagggacctcagattaaatgacaatttactcagtgtccttttgtgcagacacctgagaacttgaccacgtgagcctgccctggcctctgtgtgaaggtttttgcaaatgggttacacatcagactgatcaaaagaaccatgctgagggtcttagagatgaccatttcttggccccaccctaaacatcttaatcctacataagttaggattcatttacacacatctgttgatcttaaatctagtgtagcttataaagatttaaatttagatacaagaataaaaatatatcaaacaagataagcaaaatgctgtgtatgtgagaacacagcattagataatgctgccaaggaataataaggaaacttatatggccgggaagtggtggcacatgcctttaatctcagcacatgggagacagaggcaggtggatttctgagttcgaggccagcctggtcaacagagtgagttccaggacagccagggctacacagagaaaccctgtctcaaaacaaacaaacaaacaaacaaacaaacccaaaaacccaaacaacaaaaagcaaacaaaacaaatcttatatgaattccatccatgtgtacaagaaaactttttcatgtttcctttacattttgctgctgaaatgtattttcatttttaagaattgacatgtgtctatagaaaatataactatcgagattacttgaggaatttctcttttttaagctttatattcctctctcaaagttgctcatgaggaagatatttcctggctcttgggaagaatttggagtttggaatcacaacatctcttttgctccatgccaaccacaattggagtgactagttatatgccgagcttggtggtgttagcgtcaaaacaaaacaaaacaaaacaaacaaacaaaaaaaacagaatcaaccaactaaccaaacaaacaaaaaaatccaaccctgcatgtcacaaaaccctttagttataggtaaccaggtccattggtcattaaggccacactacaacataatattgtcaaaatacatattacatagaaagtatatttcaagtttgagttttgacctattcctggactagtgatagcattatgaggtgtgatgtccttatgacactggtcaatagcacctctgctcccttgtagccacataaacctgaaggtagacagccaatgtgcaagagactgtggttgctgggtaggtttggtatatttcatgtagttttcaacctaagtatagtttaaatttatgatgtgtttatcaatatacactctactgtaagttgtaggacctagcctcatgtgtatattatactgtgcatgcatgatatatgcctttctttaacaaatgaatccatgttcattttcagaagttcatctaccttttgcaatattctttgtcatttaagtttcagatttgatgaagataaaatgaactagctgaggttataatgttgctaacccttgaaggacacatttagtccaggcagtgagggcttagaactcaggctgagaagctgagaaatcctataaaatgtgattgctttcacttggccttccatgccacatcttaattccatcctcaaaattggaatgataatttctgctactagagagaagaagctcagatgtcattcttgtctttatacaacaaccacgttgaataaacttgcattattcagggttctgtagagaaacagaactgatttaatgaatgtatatatatatatatatatatatatatatatatatatatatatgtgtgtgtgtgtgtgtgtgtgtgtgtgtgtgtgtgtgtatatgtatacatatatacatatatatatatatatatacattcagatatatatgtgtacacacatacatagacatacatgtgtatatacatatgtatatacacatacatatatatacatagacatatatatatatatatatatatatatatatatatatatatattatttattagagtttcttataggctgtaatccagctagtccaacaatggctatctaccaaaggaaaattcaaaagaatctagtagttgttcagttggcaaggctgatgtctcagctggtctatagaatacactggaatcccaaagaagtaggctctaatgtcagtgagggaatgcacttgtcatcaaggccaagagcaaaaagacacagaacaaatgtttccttctcccttgtcctttatataggctgccatgagaaggtatggcccagattaaaggtttctcttctgtcctcaagtaatagggatttaaggtgggtcttcctacctcaaatgactcaacaaacataagtatgcccaacatcttgggtttttggttaatcccatgggttagtcaagttgacatccaaaaataatcataagaacactgaaaatcaaaatctctttgtcccacgaaagaatttcagcaaacagggtcatctgctgtctgtgggacaaaatagaaagttggacacagagaatcacaccttcacagaatgaaaactgtcacacaaaacattatgtagatgatagttgggggaggatcaaaactacatctaataaactgctggatggtcagtgctaagacgtacgagagccgaatgccaaagggttcccatcttacccatctacagttgtatgaacgtcgcctcagagtaaagatcagagaaggacattctcatggttccagcataggaagggaaacaccttgaaccatgccaggctgcctataaaatgggtatgctaatgatgaaaccttctgggcatggtgaagggcttaggtgtgagcatgtgtgaagcacgtggtacagcgccatgcttccaggtggtgctgttatcagctatgggctctgtccatgaactaagggctatcagtatctactcaaggagttattcataagtagagaaaaacaagggcttaaagacaactgtaaaagaagagcacagggatcccttaacatgaggggagatttgagtcctggaaatgttatataagttggcaaggtatcagagacattatcccaagagtcctgtgggaaatgcattctctgcttaagtaaagagacaatgatttccaaacactgccaccgtttccctgagctctttgctttagaaccagggtaggagtttagtcttctgtgccctggctacttcccatatcctggaaagcattcagatccgtgctgaattgtgagcctgacactgatagtgtcttgcctcttttcagctagatcccagtagagcaaacagtacaagtcccattgataaagaactgctcagagacggcagagcatgacaagtctaacccattctcagagacagactgggaaacagagccatttgtacacaaaggagagctttcactttgagagacagtggtctccaataacaggtctctagaaattctgttagtatgcttgacttcattcgtttttttcagtcttttccttgaagttgcctggaatgatagcatcatagggctactaacgttaatttttagtgataatgattgtgatatagaactactctgtttctaaactttgaatgttaaggttccatcctcagatttacctctctaatgtcaaaggtgaatttaaaacatccctctcacataccaccaggccattatcaatagcgggaagtaaacaataacttcaggatgacttcattttgtttttctcaccatattcataaaatgtcttagggtagtttaggtgttgaactatgcaagcaaatctttgaaagtaatttgtttttctcatttgtttttacaatttcaaatttcaaaacttttgacctaggctgtggttctttgtggtgatgagaagtcatttcctgggtctctggtcggtaggaattgtggggaagtgagactgagatctacaatagcatgtcagtttagtgcatgatctattctttatcaaaccgtggaatctcaggggaacggtgcggtgtcttcttgaaggcatcacctcttaggagtgcaagatgtgcatcaaacattctgagctccagagtgatgaatggtgatggttttatctgaatagttcattgttctttatgtacaaactgaatcatgttttgattattgtggtcttactaaactatgctagtgatagaatttagatataaccaaatctgcaaataataacattttttgagtgaagtgacataaaaattatcagatcgtaattgaattttgagataaagaaaataggatacattaaatgtaaaggttcaccaataatagtaaattaccaagtacaatgagaagatagagagaatagtgatcataacagttaacaacaaaacagaaaagcatgcagtgcacttcatgagacttttctgtgatgtgtggtgaataggatataaaactctcaaactggagcctgggagccgcactagggagccagacaatctgcagaaatgtcagttttagtcatgcaggatgtgcgggatttttcaggcctgtcctggagtaggaaggggggcaaaaggagctgaaattgtcaagcagtgtcttcgttagggtttccactgctgtgaagagacactatgaccaaggcaactctccccgccccctttcttattggatattttctttatttacatttcaaatgttttcacccttccaggtctccccttcaaaaatctcctatcccattcctcctccccttgcttctgagggtgcttcccactcatccacccactcctgtcttccccccatagcattcctctgagggcatggaacactctcaggtccaagggctgctcctcccactgatgtccaacaagaccattctcagccacataagaagctggagccatgagtccctccatgcatattctttggttgttggtccagtccccaggagctccatagggtctggccttttgacattgttgctcccctcatggggctgcaaatcccctcaacttcttcagtcctttctccaactcttccatctgggacccctgagttcagtctaatggttggctgctagcatctgtctctttatttgtcaggatctggcagagcctttcaggagacagccatatcaggcttccattagcaagcacttactggcatccacaatacagcccgggtttggtggctgtatatgggatgggttcgcaggtggagcagtctcttgatggcttttccatctgtctctgctctacactctgtctccatatttcctcctgtcagtaatttgttcacacttctaagaagcactgaagcatccacattttggtcttccctcttcttaggcttcatatggtctgtaaattgaatcttgggtatttcgaacttctgggctaatatccatttatcagtgaatacatactgtgtgtattttttcatgactgagttacctcgctcaggatgatattttcaagttccttccatttgcctgtaaacttcatgaagtcattatatagctgagtaatagtccactgtgtaaatgtgccacattttctgtatccatttctccattgagggacatctgggcttctatgaacacagtggaacatgtgtccttataacatattggaacgtcttctgggtatatgcccaggaatgatatagctgggtcctcaggtagtattatgtccaattttctgaggaaccatctgactgatttctagaggggttgtaccagcttgcaatcccaccaacaatggaagagtgttcctctttctccacatcctccccagcatctgttgttacctgagttttttatatcaactattctgactgctatgaggtagaatctcagggttgttttgatttgcatttcttgatgactaaggatgttgaacatttctttaggtacttctcagctgttcaagtttcctcagttgagaattctctgtttatcactgttccccattttcaatagggttatttggttctctggagtctaaattcttgagttctttgtatatattggatattagccctctatcagatgtgagattggcaaagatcttttcccaatctgttggttgtcatggcaactcttatgaagacaacatttaactggggctggcttacaggttcagaaactcagtccattatcatcagagcagaaagtatggcagcatccaggcaggcatgtttcaggaggagctgagagttcttcatctgaaagcagctaggtgaagaatggctcccaggctgcttggaggagggtctcaaagctcacccccacagtggccaccatcaaggccacacctccaacaagaccacacctactgcaacaaggccatgtctccttagagtgctgctccctgggccaagcatatttaaaccaccacaagcagaaagaagaaaaacacatagaatgagtgctcattttttcttaagctgtctcaagtttcctcaagtgcaaaagaaactgactcttgattcataaggcatcatctaaaactctgaggcagaggctacagggaggtgtgtttcaactcaaagcaaagaaaaacttaacagtgtgtagagctattctgcagtacagcacactgtagcagtggacctactgcatgcagtgtgtggctaaaacactgactgagatctgaagagatcacagaaaggtcagatggcattggtggtgcacagcctttgtaaccctatgattctttcttgtttttaaacttaaaaatcaatgctgtttgaggcattagtaatttatgttttatgaaaactgacttgttgtctaataggtaatttgctgcctatccatgttttcaagtttcagttctatattcccataaaatttctagaacatctacacagcttagtatttagaaatgtcagtaaattcacatagcgactgtggctaagccccaatgacattcaaatgcagctgtagactgagcaaatgaatttttgttcttagcaagattaaagatgtctcgttctcatcttttgggccagaatttatttcattagtctaaagttttagaaaagatatgtgtttctgcagatatttatgattttgtatgcttttcttatggtataaagcaggagagagagagagagggagaaggaaatataatctttaaagtaaagtaagtggacttggaatttttttttctaattaattcctcactgggaaagctaaggcaggagaccaatgccttgaagccaggggtnnnnnnnnnnnnnnnnnnnnnnnnnnnnnnnnnnnnnnnnnnnnnnnnnnnnnnnnnnnnnnnnnnnnnnnnnnnnnnnnnnnnnnnnnnnnnnnnnnnnnnnnnnnnnnnnnnnnnnnnnnnnnnnnnnnnnnnnnnnnnnnnnnnnnnnnnnnnnnnnnnnnnnnnnnnnnnnnnnnnnnnnnnnnnnnnnnnnnnnnnnnnnnnnnnnnnnnnnnnnnnnnnnnnnnnnnnnnnnnnnnnnnnnnnnnnnnnnnnnnnnnnnnnnnnnnnnnnnnnnnnnnnnnnnnnnnnnnnnnnnnnnnnnnnnnnnnnnnnnnnnnnnnnnnnnnnnnnnnnnnnnnnnnnnnnnnnnnnnnnnnnnnnnnnnnnnnnnnnnnnnnnnnnnnnnnnnnnnnnnnnnnnnnnnnnnnnnnnnnnnnnnnnnnnnnnnnnnnnnnnnnnnnnnnnnnnnnnnnnnnnnnnnnnnngaaaggaaaggaaaggaaaggaaaggaaaggaaaggaagaaatgagaaaataagagtaagaaaaatttccgaatctctgccatcaggagaattcctctggatctacaaagtctaccagggctactgtgctcaccctgaatactgtggttcacttccaactcacagctatattaattatcccttgaatttattgctggtacttcccagataaatcttatgtccccccaactaaatcctcacaattacatttaaaactctctatattcatgatgcctatattgcttcagttttagaatcaataagactttattaatagtggtagcttgtaccatcctttcttttaaggcattctgagaaacacactaccttgttgacctgcctccttactgccataggctgaagaatatggtaagcaaataggccaagctgtcctgtgaaatttacactctcatttctgactgtggcttggctgagtatcctgaatccttatctagaatttaagctggtccatgacaagacatcaaaggacctcgttaatggaggctacttgcagacctgctggaatagcatctcagggaacggtgaacgggctttatttgtaggaatggcagcgaccaaaccaaaaatcaagcagcaacaaaagccacaatccagttaccttcctattaggatgttgaaaaccattcattgtttcaaaagaatcttctcttaaaaatgataggttgtgagccagtgctaggcgaggcgtgtatgttgcacagctaccaaggaaggtgatgctgcctgtttatgggccgggttaacacactagcaaacactccctacaagttttcatctttccctgcatgtgcccttgggattatatggttacatttgtattactctaaagaatgtgaagtccaatcagaattttgtcacctttaacttttgtgatacgcacagaaattccctttgtgttacttgtatacaaataattgcactctcctgcacacaatgagtatgtggagaagggtagtatgtcctctcattatctcattccctgctttctgctgtgactccctcaattctgtctctcgctacaggcgattaacataatcctcaatgtcttggtgtcttagatgagcccaaatgctaattattgttttgacaatctacccactactggagcttcttttagaccttcttttgggattattccatgtctgttgctgccacaaaatacctcatgctggatactttataaagaaatggagcacaccttttagaggttcaaatacttggtgtcagcttcttgtaggtcgtctagaggtcttctagctctatcacagaatgtgggatgacatcatgatgtgaatacatgtaagagtcagagataattgggtgagataggaagccagagagattcaaggccaggtttgtttttgttgtaacaacattttgttgtggaaattaagcaaggttccttgagagtttgtgctattcccttctgagagtggtgttcacagtgacctgttttgtactgggttccacctttaaagttcttaccacttcagatggagaaccaagcttccatctcagcaatgccaaaccatcctgaactcagtgtttctcgagaggagatgtaatgaatattatccaggttttatgggaaaacagagtgcctagcctagcattttcagcagaacttgaagccatggttcaattgttttgtatataactgtccagtacattagctgctgggtatgtgtggcagtttgtctgcttgaaatgtagcaagtgtgactttaaaaactacatttgaaattctgtttaattttagtatagtttaaatcgccatatgtcctttgtggctcgcacattgactaacagagcaattgccatataattcatatcatcagaaaggtgctgaagcaaatcagctcaccattcagaatgcttcctttccctcccgagccagactggtacttagaagtgatacaatactgctttgatagatagtaaaatcatcaagaaaacagtaaagaataaacatctacctaagccatttatacttaacagtaaactaatcttgactctataccaagttacaaatctgatttacagaggtattttttctatatctttcatgagaattctaggtagacactgggtcacttttattacatgtgaaaggggaaactgtagcatatcaattaaaataagtccacaaaatacataatgttcatgtacatgctcttagacagtaaaacaactatacaatgaagaaaattaaaaatcaataaagctaaattcacagagacggtaagtaacagaatcagtgcttgaaaccaggaaggattcaccatgctgctgtcaagaaatgtctcccatatgcccttttggagtgccgtgtttatcatatagatgtcactgggaaatagggcagaggtcaggaatgtgttccctagccccgattgcctggttttagaagtctgcatttattacttactgtctgaataaacttgagtgcattatcccatatttccacggctcattttaatagggataaggtatctaccttatatttaaccctcgtatgagggttaaataaatgagcaatgcctggtacatttggaactgtataaatttaacattatcattatttttaattttaaggatgctgacgtgtaaactgggatgctgatttgatacaaagttaatagatgaaatagagatgtgcttagaatttatttttttgtaggcaagactaataagcacatttgtagaagagaagccctgttcagtcagcttggagcccccctaactgagattacaaagtttcagagccctcatgccctgcagattcctcatagccttgcttttcatgttactttgagagaaggtacctttggtgactttgattgcttgtgaatgctgaagagtgacaagcaccaacacagctggaaagagctgtaagatttgctattctgttttccagctgggaattgttgtcatggataccagcatcagaggggactggggagtgctctctacttgcttcctgagtctctgacatctgtttctggcaagggcaataatgagtctgcttcaatatcaaatgggaaactgatccaaactcactttcccccacagatggcctctgcacaagatgccaggtttggtcagaaagactcttctgaccagaacttcgactacatgttcaagttgctgatcattggcaatagcagcgtgggcaaaacatctttcctgttccgttatgccgacgattcctttacatctgcattcgtcagcacggttggcatcgatttcaaagtaaaaactgtattcaaaaatgagaagagaatcaagcttcagatttgggtaagtgactttgaactgacatcattcttcactctggggctgttagacattcaaatctgcaggggaaaaaagtctactttgtcaggtctccatgggtcccttgagctttgatttctagcctttttgctggagaacattgtgtttcagagtgtgaggtgatgcttttgaagatgtgggtactgacatactttttgtcatatgatgctgttcagcagtctttagaagagaagaaatccaagctcctgtgtttggtggtggtggtgagtgggggtcactcaatgagagtgcggctcttccttgatctgcatgcccttgagaaagtctgaagccttctgtggtttgttttataatatgtacttaagcagataatacatatatacatatacatatacatatacacatacacatacatacatacatacatacatacatatatacatatgcatatatagtctttcagggcacaagggtcagcctgacttagggattgctacaagagaagatgatagaatatggggaaaatagagctacttcctaggaagtcctcaacctaactttgagagtaacctttttatacttagaaaccttggtgtttcagctctgaaacccatgtttgtatgctcaaatagcagaaatcccaagaaacaaaatgcataaaagaaggctcctcacaaaattctgaaatcagttgtctagatttctgaccctcccagttcctgaagaccaaaggtttcttaactaaattgttgatgtaaatttaaaaaactagagagtaagaaacaagaagaatatctgtgagtagcagtcccaagtgatgaagtaaccaagatactagatttcataagacaaattctatatagtaaatatcttatgaagatcccagtgttcctaagttcatagatggactggagtcagtttggacccccttctgccactcaaattgattgaagcaatagacaagtatttcccaggaggtgttgtcggcctcctttggagacagtatcatttggtgttggtagagggcagatctgcagacctgatacctcttccattaaatatagaaagttaaagagagacaaatcccagactgtggcatttagacctttaaaaaatagaacagcccatattaaaatgtttatataaactgcatgaactttaaccgtcttaaaggtcttagtgataaaatttaaagaggcaaagatgcaggaatatacatgaacaactgtctaacagcagattatgaccatttgacttatgctaaatctggaatcttctaggtctaactagaactcatataaaagcttggtgtaggtcagctccaggcttatcatctcgccaaagtcactttagggtacagtgtgtgtgtgtgggtatttggttaggaacttgcattcagttgatggccacataccctcagtgcatgcagacagaaagatggaatccacggcttcacattcagagcctgtttccttctctaccttcttagccttgggcaatcaaagtcataggataagtttcgtactcaagtttaagaatgttcccttgacttccagggccttctgtgggttgaaaaaaactaagttattctgatagccacacatctcttaacaccatattagcatacttcctgctcatcagaaagagcagtcattttcctggcagatactcccaacttcctttctcttctttgtcctctagagatatttaaaatcaatccttatacacagtatactagcatagtatgttacattgcccttgtggtcattactggtttcctaaatctaggctgctgacataactatttgttgagctataacattatctgtccttagtacaaaactgatatatctcaaaaaataaaaatgattgtttttatacttacgtgggtgatcttcttaaaatagtgctgcttctgggccagagctaacttactgcctgttcttgcctcctgtgttttctcactctggggcgatgctgccccacatggagctcgctgagcccagctcaggtgctgcagtccctcctgctctctctcatgagtaccaatttccgtgacctctgtgtagcctctgacggtgttcttctcccccttgtccccaattccagaagatgtgtcactgtttgtgaagctgccgtgtgtccttccaggcaacccaacatcctacttcatttcagaactctactacctcattctagagacacccacaccccccaaaccagccacctcggagctcttaacctttccttctccttattcctgagaggagtttactcttcatttgtattttcacaattaaaacatattcttgtttcccatggggagcatacctcaggggactatggcagtaggattgtgagtttgaggccagcttgaactacaaagtaatattgtatgtctctttagaagaaaaaaaaaatcacaaaacacttaactctcaaatctctccaagccaaccaaccaacaaaagcaccaccccgtttcttctcttttggctatgctgggggctttcgatgcatttacgattttagggttgtgtaacttagttttactcggatctagcatctggtgtaccgaataggaaatatgcagagggtctatagaaagatttcgtgcttttgaacgtgcactatagttagagaatttaagacacatacagaaattaagcgcgtctataagcaaacactgcagcaggtaaatattatagatatcggttgttgggtgagaattgtccatgtattctctctctaggctcctggtgatcccacttcatgttgcctgtctttcctgggtgatctgaaaatggcatatgctaagtagctacctcagggtcacacacggggatcaccttagggtcacacctaaggggattttcaagtttggtctatcagcttctactgttgcccttgttgaaccaccctgctgtggtagactttcgtgaagatgaccgtgataaccttggaccacacatcctggtatactgaagacatttggggaggagtttgattgtcatattggattgaggtttgggatagaagttatgataaggagtaacacagtctatgcttcaatgtacatattcctccaataagttcaggaattcctgttctatgctcagagcacactggtaaatactgccttatatatagttactgctgcgtagcaacactgatcgtttatttgtgactatatttaacactgatgtgttgacatctcttggtggcttaaaaacaatttactgcccttcacagcctattttaggcacttattttaacgtctaattaatttactaagacatcaaaaaatatcatctcaccatattacatatttcaagacaaagaagggaaggaatttcacagtctgggagccactgaggatcagtccactgcactacaccctttaccaagacaggctaaaaagaccgtggccctctgaggtgctagaaaataccctggggtgttcagatagtagggtggttacccagagctgaagagagtatacattggacaagggcaccagccaagaccaagtgaggagtctcttcagtcaaatccctatcattatttaatttccaacaaagatacctagttaggaaacaagatctagagaagttaagcaagtatagtccatgccagagcagaaccttaaatctgcatttgggacttgggccagtctgattttctatgctgaattcacagtccacataagggttgcactctgagaacactgacaaacttcatatctgattatcagtgaaataaatgtactagacatagacaaatcgaatgaggccagatttcaggtaatattcctatgtcaagagggcggagactccgcgagaagaggcagaggaaagtctgctttttcaccatgctggtttgctgtctcttcatgtactgtgtgagatttcctctctctacaaactgcctgctgaattgtcacagctgaccatttaaataaagcctttttttattttagcctttgaagagaaatgttggccactgttcctggacattttatacctcttctccatgaaacttagcactttaaatatacttgatatatgttatccttcagttccattcacttacaaattttagatattagcatatttaaaaatccctttattcttaatcacattagccttccttattgcagtttcatttcagtatcccttttgagtctcaagttttagagagataatccaacatttcagagattataaatgtttaagttggctctctctcttcttaacatatgtgtaatgttaatgttagtctactgggaataaactagggatgtatttatggtattttggtttaggtttgtaaagggctgtctggggtgagatatgagaaaaagggaaagatgaaaaagtgtgtggtatccatatctgagaaaaccataactcgtgtttattttcagggtctagaaataaggcagaaactcagagcgatgattggaagctagagattgctgggagtttgaaattagacatggagtcagccgcactctgactgtgggatctgtgaacaaagtacagctccgtctcactctgtccaattattcaagcccacaactcacatgtgactctaatggaaggctaactgctcagttagggaatatggttcacacacaggaaaggaaaggttgggagacagggttactatttcctttaaagctgctgcaagcatccatgacttccattctccttggtactcttggtgttcccaactctcataggttttgtttgtttgtcttggttggtgggtgtcttttgctttgtttttcttgtttgttcgtttttttagggggttggcttggtatttgtttgtctttttttgtctaccttgagccctttctctctgcatattggtatcattttaaatgtggaacgtctctcgtagacatctgtatctcagtcagtgtaatatttggggagattctggaatgtttagaatgtagggacttggagagagtgctcagggtggcctcgagaggaataagtttctttctgttccagtttattccatctgctttctgcattcatttgaagatgtgtccatccccgtgctccagctgcctgctgtcacacctccctgcagttatggactcctccccctgaaaccataagccaaaagaaacgcttccagaagctgatttttttcataatggcattttatcatagcaggaaaaagcaaactagaatgctattcatgatttctggactgctgtgagttattggaaaacatgttttgagtgtttggatatcaggctaccttccagagctggggacattaaaaactggcccagggaaccttgatggaggcttttcttcagccagtcctccatgttgacacctggtgctgttgctcagatctagtctgtttccagagaggttgatattgatgttactattacaaaggcactgcggtccagcaagcaacaaaatgattggggttcataaattgctttatatactagtaactgttctggaatctatggtggagatagtgcagacccgttgagaaaatgatggtggtcctgattccgactagaggtcagggaaaatgacattttaaaacgtgctttattatttaaatgtgacaaggtcaacagaggagaaggtggctctgcctttgaagagatagtttgttgtatccaatgatcacaagacaatggcacttagtttctgggagggagaagcaggtgtatccaaatacttaaaaaaaatcatcatatggtcatgaggaggaggatgggagctgtaggcacaaacctcactcaagagttctgtcaaaaaaagaatggggaaggaagttatagtttctggagtggctggttaggattgtgtctgcactttctgagataatcctaatggtctggctgacaggacacatgaatagaggcagagatccgcataaaggaggtgagtgtgcagtgagctctggactggttggcctgccgttgtaaagattccttcaataagttcttggcttcagtgttgaccgacccagagaatagcagcccctctgggatgagtggggcctcagaatgaaagggaaatgaatgaaatacatgggcaatgcagaggaaggtttctactctgacaggggctggaattctgaatagtctcacacaggattcatgtatttctgagtgtttgtggacctggaaagataactcagaaaaaagatattgcaaactgtcaagcaaacccatattgatattaatttatactagtagtattactgaaagcaatatttttgagcccagtactgagcactgaaatacaataaaacacatgcatgcacatacatatacacatacacacacatacatacgtatgttaggattacttaacacaggcttttgttttgaatttctgtcttagactggaaatccctatgcagcctcggtggtgcttaaactcctaagtactaggattataggtatttggtataatgacactctaggtttttattttttgatataacccaacaaagatgggtagcattatagctctattccagagataaggtaaaataaagacacaagcataatgccatttgcccaaggacacaggtgagttatgccagcagccatctcccagccttggtactacattctaagcccaggtatctgaccatacagtataaatgaggtctgcaggcaggacaaaatatgtttcactccttaggacatctaatattagatcttgcatatcttaatgctcagtgactacttttctacactgcataattgcttattatctttcttacttgttccaagaaatttatagttctgggggtggagaggatcggttaatttgcttggaatttaccatctgagcaggagcactttgtagacgatctggtttgtgtttaaaacacatatgtatgcacagcagaagggactggaacacattcgagtggctccattctttgctactgctggagaccacggatgtcatcgggggtatgtgcaatgggaagtgggcgcctgggcgacagcagcgctacctcccagtttttattcaacgctcatttagtccagtctttctgctcatcagtttgaggctggccttaaagtctttagatttattttaaggagccaacacactctgcccagacaaggtccttaagagaatggcaaacactggagacagctgccagggccatccttgctgctgtcatttgtgtgctcccctccgcaccatgttgcttttaacttagcacttgcttttcctctgaggctgagagaggccagctttcatttttctcctgagaggaaactgatgtggtgtgtgaaatgtcaagatacacgaaaccgttcactctgttggtggctgaaagcaacatccctgtatcccactgtgttgaaaccaatttccagctctgaaaagacacagaaagtggcaaggactctgttctgccctaatcaggtctgcctgctacatagaaaacaactgaggtagaaatggcagcatgttgcaatcagtaacaggttttggcaatggaggtggaatggcccaatgaataaaaggagtagggattctggagttaagtgatccaggttctcaattcttcttcattctcagcagctgggtgagttcaagtcccaggctccctttgtctccagttcatttcatttatgaaatggtgtggcgtatgtctgagcccatatatatttgtacttccttcaatcgaagcatgaaagacacactcagtaggtgtcattgtgctgtgtttctaaaagtggtctacttccactacaacttacgtaactgatttagttaattttatagtatcgaatgcttgtggagggtctactgtgtaccccagcgggttctgagagtacagtagtgaagggtacccaggaatcatgacagggtccaaccatctgactgggctgtggatattatctgatgctatgaagaacaggtaatgtgtcttggagattccgagaacctttattgtggctatccataccagaggtgacaactgagaagtaagccaagaatcatttgttcattcattaatccagtggcatttattctgtgcttaaatgcctttataataggtgcttgaggaagaacttggaactgaagctaaacacacaaaaatagcaattatggtaaacactaagggagagacggagcactgtgataattggaaagcacagtagggggcagagcttttaggtaatttcataggaggtggagagtttatatgaaaagattcctgtgctgctgaggtctggaggcatttagagcaggggtaagctttcaatgtgaaaggaaggagagttgtttattgattgattgattgattgattgattggtttttcaagacagggtttctctgtataaccctggctgtcctggaactcactctgcaaaccctgctggcctcaaactcagaaatctgcctgcctctgcctcccaagtgctgggattaaaggcgtgtgccaccattgcccagatcatgtctacttcttatttatcaaattctgacttcctttgatttttgccctctctctgagcaacggtggatttagactactgaaatatgaggcttttggcaatttgttgatcctcactaagacaaaaaaaaaaaggatacacactcctatggtttgaacaagattcagaaagtagatgggcaagcaaatgcattgctgggtccttagaagactccaggagcccaatcttcaacaaccttcatgatcactcagtcttgcgttcgtttgtggaaaccttttaagcctggctacggggactgaagaggtatgtgagtggtgagaagcagttacagactgtgcaagatgtgtacagagtaaggcatgccagccaaggtgtcaagtgagccaagaggattagggcaggaggctggactctagggctctgcgtagcctcagggaaatatcttaaacgctgtaagtctgatatataaaaataaggggataaatcagaggaaaataaacaaaaataataactagtattcagcagtctcttatgagctagctggagttgtttgtgctaggtggacccaatactcaaaagaaaagtctgtaaggtaaaaataaccagcgcagaaggtaatgacttcaaccaacttcattgctatcgttttgatataatatatctctcaaaagtctcatgggtcagaggtttgattctcagctaatgtttttattgagaggggattggatcatgagggtagcaactgcaccaatagattattccattgatgggctcatagtcggatggactattaagtggtgcctagccaccagaggcatgccttttaaggaagagtgtgtccactgatccttccttttcgctctctctccttcctgcccaagcttctttgtttgccacaccccattcctgtgcctgcctttctgcaggccccaaatcatttgaaccagttaatgtggagtgaaacctttaaagtctctcttcctcgttgtggtttttctcatagtcataaatgtgacagatggtttacagtgttttctctcaacctattcttctaagccctttctctagacacattattctcgaatcaactgtggcccacgcaatgtagcttttattcttaatgcttataatagacagcggaaatgctgctgtggatactggtcctttgaaagcaaactaaacctctgagagggtgagtgacttcctccaggtcatagaattctttctgtgacatctggagtggcatcagacatcattattaggactcacagaaagattaggaagcatcaacagtcaatgacagaaagaaactgatactgtacccaccagattggtgtctcccatgatactccagccaatgtttgacgatacttctatcgcaaggcttctcagtggctctcacatcttctaaggattgcaccttccataaaggagaggcaattctgaatacctagtctcagataaaggaagttttaaatgatcaaacttggaaaaatcaaaacttgaatagaaatcttttcatgaaaccataggtaggaacgaggaggttaaaaaaaaaaaaaggaagaacgtggaggataggcaattgacctccagaaccatcaggagaagaactctggaaagaattcttcatttcctggaggtccaatggtgttttctgaggtcttgggtctaccaacactttccttttccttttacagtggcagaagaccccctgcatgtctctcaagcatttgtctctcactacatttccttttcactttgattgtaattcttccctacaaagaagcctcttgtcttagcaaccagattgtaaggcagtgtctcagggtaagcataggaactgttgatatgtacagactccatatctgaatactttacagagacccctttcccctcctttgctactgtattataattcaactaaaatgttgaggatgtctgaacatgcgggttagtttaactggaattctgttctagacttacatggatccaaattcccctaaaacagtagtatcatgtagtcattttgtgatgacggatattcttcaaaaccagctctcagagtctttacatattggtttcgttaattttgacaagttaatcagctttctcatacctcagttttcccaactgtaaaagggggacaacattaactctttgggtataatcttactgtcaaggaaaagtagaatatttataaagttcttatcataatactgatcgtaagttctcaattttaaaaagtcattattccttatagcctttatcttaacatcatgaatgtcatgcaccaacttattttctaggccagacatttccaggtctaaagcatacagacatttacatgaagtagtttgattttgatgttctggtatataataagacgaaaaagatgtaaagataatgatgagcaaaacatctccaggacagtggtatgttctgtctctgtctttgtctctgtctttctctctttctcttcccccgcccccctactctacccaagttcagtcatatgcaatgttgaggtatgtcctggtgcttttgaggcatctgtgcatttagataaccattagctacacaaagaagtgaaacccatacagcttgtttattaaatacccataaaactgatggcctaccccagagcaaaacagctatacatcactgggttcagagaaagatgttattaaaattctgagatgtgctttcttctcaatactgcctcatgactctggaagtttttaatctaatatatgaaccgagctgtgcctgtgtcactatatcacctgttggtatttttctacctggaacatttgaagttatacaggacttactatcataaaacagagttcaaattatggtactagttaaacatttaattacccgatatatttttctagtcatatttaaggaaaaagcactgcactttcctaatgggtagtagttaattttataggaacaatattttttcccttctgctcttattcccataaaagtaattctgctgaccctgaacattctcattgtgctcaagataaagaagatagaaagttggggggagtgtaaagtcagcctatgcaaatcattctattctagatgccagtgagtctgaaggaatggagggcaggtcactcacagtttgtatttttttgccaactggacacacacctagatgtgcctggaaagagggagtctaggctgaggaattgcctttatcagataggtgtgctctaggacatgtgtagaatctgttcttgcttcctgattgacatgggagagcctagcccaccatggacagttccattctggaacagatctcctggtttgtaaaggaaagacaacagagcccactagggggtaagccagtaagcagcacttgacctctgtttcagtttctccctccaagccttgagttcctgccttagcttcccttggcgacgcctctattaatcagacattgtgttttcattttctataaaactaacctgttatatttcaagaactattttccattcagatggacattattcaggttccttaattctttcctctctccgtcttaatctgtaatcttaaacatcttggcatagaaaacatgttgatcacttgtcaactactcactagcatttatcatttgcattgctttaatcttgatacctcagatgtctgggaactagtgacatggaataggtagtgatcctgacctcgtggacaatttggggaagagagccttccaggggttgtgtatagtgaaataatctgacaccaatatcttgaatcagttatttctgggtaattgctatgtggtatagagaataatagcaggttctacagtgagggcaccatgggctttcagattttcttttatctcccagtgatttacactagaatagcactgaaaacaaatgtggatctaaagagagcatgagagaacaaccatggcaaaggagttggcctcatcatttgtattttataaacaacaaaggcagctaatggtgcaggccttctgttctatgggaaatggaatctttgggggtcctgtgatggtaatccattggcatggtgatgctgtaggaggggtgagttgagagctgagcatcctcagatctcatgtgattggttaagggcgtaattagtagtctttctcaattggtcccaaaatgggaacaggagaaaaattaggagatttaccagtatgatggctatttctggttgtcactttgactatgtatggaatgaagtgcaatacagaaatggagagtacacctatgattcagatcttgaagctggaagacacaggttttgtttgtttggttttttttttttttaacctggatcttgacatggcagagtggtcatgaaaaatttagacctaggcaaggttgtatggacctttaatctcagaagacgagggcaagcagatctctgagttcaaggtcagcctgggataaagcaagttccagatccaggcatggtggtgcacacttttattctgagtcacaccttctgctggagacctacatagggacattggaagaaggaagactcattgcccttcacctgtctgtacttacttgccagcacatctgttggaccctacttcttcaggattctagtttatacagagcatgtgaaacaactagcctcatgggactgagcaacaattagaattttggatttcctattcacagctgcctattgttgagttagttggactatagactgtaagtcattacaatagattcccttaatatatagagacattccataagatctgtgactctagagtgtcttgactaatacaaccagttattaagtcccacaccatttggttgattgatgaagcttctgtccagctttctaggctatatctcagtaataacttgagtagttttacttccttcacatttgacctgcagccagtttgcttcctggtttgctgattatcatagagaaagagatcagtttcataggcaagttaacgtaaatcgtggactaacgtctgtttttacatttggtctggtgtgcatccatttgtatattaaatccctcacaatatcccaagcacaagggaaactcaagagcaatgagaagaataacacaaagaaatgcagtgagtcctgtgagttggatagtttgattttagacaaagtacctgtgataggatttgtttttatttcctataaaatgtggatattgaatttgctttgtagaaccatttggagaagtaacagcatgtttaatgcacctctttgagtgttctcacactctttggacccatatatatagctataaaagctattcagagtccagaagaatttatatgtacctgaatcatacctatagctaaacccattattgctattgtataagaaattaaacctgaatagtatttaaaatatcatgaaaatgctaagcatatacccttcatatctacccactagcaacaaggtagttagttgttagtcttgagactggaaggctgacttcttattcttgtcactcaaatataattacctggagcaaccatcgccccagttcacacaagaaaggaaggtagtgttcatgccatcctccttcagccatcctctgtctctacttggcaccactggctttctccattgggatgtccagaaaagttctgagatgaggtcagctaaggaaagcaaactcctggatcctgaaatttgtaggcataaatattttgcaacctacttttaataagcattcaatctgtcctctagcccaccaccaagcagaggtagtgaaagaggaaaagtgcatggggaagtggacctgtttagcaatagttctttggtgcaaggctgatcttctttggcagtagttcagtcttgtagcaaacaccaaacatgaaccagcagctgtagaccagttctctaggccagcagacagcgcacatgaactgtcagctacagaccagtcctttcagccagtcaacaccaggcacagaccagcagccgtaattcaatcctgaatgaaccattaggctcaccaaccagcctgaggcaaggctgcagaagcagtaaactgctgcaggaacttcacaagctgttcttgggtgagcttctctcaatgacaccgttaccacatcaagaacagcatgtaaggcaaaccaatacatgcctgttgttagcagagaatagtgaggcagagaaactcaaaccaatacgcagtgctcctctcccactgtggtatcatatttatactccttcatcaagcatcctttcatatgtttgctatatccaaacatcacctgtctctgcttcaggaaaaggttctttcacatgtctgctttagcaagacttcctttgacctatgtgccccagcaaaacatcatgtgacataactaactttccaaagaaactagaagtttccacttcagaaaatctttcaaagtttttcagttcgccaattgccagtctgtgggaggctttacacgagtgaaggaacaatgtcccaatttttctaatgatagtcaaattgtaaaacattggtttgttcatcaagaaatgaatggactttcacaagtgaatgatgaagtcactctccctgtatcctttaaactcagtcacccacagggaaggctgatccagacccctaaagcataccattgactattttatcacaaaccagagggaaagtgagatgatactgggtatgctgtttagctgaacttctcctctccctcagtgctggccactgcatttagtgctgtgtgcacaggtttgccctcacacacttaaccttcccttatagtaaagtaaatgtaaggaaagactttccccatgttcacaccaccaccacccccttgaaaatttccaaggcttggttaatgaaagactcataaaatttcatctctcccataaagtcaaccacaaattcacaatccattggaaacaagaggacacagtttggaaacattttttcttacttgctgtccagcgagcatctttggatactaagaagtgtgaagctgtgagttttacaaaagagttaaattccagatggagttgtgtatgacacacccaccaaaggctgggtgtgaagattagagggggaaaggcttcatggtcaggagctggtagaaatgatgtgaagtttgcagagggcttctctaggagtgagagggacatgcagggaacagaggaaggggcagcctcggaagacaaacttattccatggggtgtgtgagcacccttgtttttccaagggaataggctggtctataacttcagcatataccatgatctttccaatcatcaagtccctgagggtcatgtttcagatgcagattttgagcctcttcccacttctaccaagtcaggattgctcttcaaatagaagcaaggactcgagatgtttaaaataagtttttaattttataattgccattctataaagcaggtgctgggtggcctgacatatctcctcttacgctgtgttcctgatgagctgggtaggcacttgatttataaagaccacataaatctgggaagtggggcagcctcttcgcagaactcctgatttctggagccagagagcagccttagcttggctcagatatagctgccagctgaaagccttttatatgaaatagctggagtcagaggtttgtgtggcaggaagaacagcatcaatgttttaagacctcaacataatctgacagacagaggatctgcatgccttttgtcttttcttgtcaatgtaccactgtttttctgtccctctctttaagactagatatagcttcttttcctgtgggttactaactttgctcttggcctttgttcttttctctcttacttatgttcttcttagacacagacatcttgaaggattttctctaaactcccttcagcctacgtttccattttgtatcatgacatgaaggaaagcaagcaagtcccaataccatctcaccccaactcaggcaaagagaggctgcttctgcaagctcctacttttgcaacagctagtcccacgtttaaaaaggcatgctaggatgtcttcacaaatcctactgagtaacaaaccctgacctctgtggaatcccagggcagcattgatccaaattcctaacctttacctcaacaaaggcaacataagcctaggaaacctacatcatatcttttagagagtgagttaaggaacataggggcaacatagggattccttctataagatggaaaatcttacggtaaaatcccagggcatcttaaaactggatgatagaaaggaaagtagagggcaagacagaggtttaagacattacacatacagtaggttctgccatgacctgatagcattttttttctgagaaaaatataatagtaattagtgccaggaaaaacatttaatatatacactcctgatagagaaagggaataaagaagatgccagaaatagttaaaacttgccacacctaagtgaagtcttgttgttgatacagacatacaagtaagtatcatttagatgttgttggcaacttcttcttccactaactctgggctccagaaagcttcataatagggccatgggagcttgtcatttggttgctggctatctgaaggccatgtacgtgtgtctgatggtgtgaaccagtgctcattttttctgtaaagatttagttgagaagtgtggttggcttccctcctaaattctattcatgtatttttagttctcttattaattgccattattttccccattatttcaatcgttcaagttgacggctatttattcttatctttgaaaagctggaaagagaagatagcttaacaattcacctctcaagaaccggtgttgcatctgattaggaggccaggccctgatatccagccgcttgggttcagcttcttggcagttctgtcccacagcccaaccaactcctctcaactccactttcttcagccataaaataattacaaatagaacatctaccttgaaattataaagagcaatcagaggaaaatgtgtgcctcacaggcagagatactcaagagatactagtttttcttattggtgtagctcggatcaggttatatgccaagttatgctttgccattctgaaactaccccctgctcacacaagtttcctaaggcatggtcccccaccatgggggttccttcctggagatatggaagcttttcccactgctgggtaccttttagttgtatgaactcttaggccccacacgacctgggtccatgctggctatagagcagtgaggcaaatgagaaggcagtgtggtaggaggatgttggaggctgttgcttctctttgcagaaggactgtcatacaaaataaagatgttcgactgaaagaaaatgagagaggcaatgagagggagggtggggaaatacattattaagaagggcaaggtgcttgtgaaagcacattgctgaatttaactcaagcttcacagtaatggtaaggtttgatgtaaggaaagtttattgccctgccaatcagttgaattcctatttgatataagggaggtcaatgcaataccttagccatctgtcttagagaaaccacaatggattgcattcagcctcagtagctgaaggttctgcgtcctcaaattcaaatcactctgctagaaaatatctgacaaagaatttcggttagtactaaacatgtagggtttttctccttagtgctatttccgaaacaagacagtcaacaactgtacacgtagcatttagtttgtatatggaatttggcattataagtaacctggatatgatttaagcgtatgggataatatgcttatgttatagagaataacattgcatttttatatgagatggaaatattggcagagtttggtatccacagacggtcatggaagcaaaccatcttggatcccactactaagaaatgcacttattggtaaatataaatggttaattcttctcttttatctccagaggacagtatattaaaggtaaaggaagcaaacttgatggccagatacatacgttatggtgagaacctggcctctgttgtccaaaacaccatgggtgggggctgcactctgtccttaatgtgagctctgtgaacaaaaatgtctgcccctatgcctctatgaacacttttggtgtcaggttgtatcatctggaatgaagagtagacccctgggcttacagtaatgacttctagagaactggataaatttaagtcagacagagattgttacttgggatcacattcagactcactgtgtctagacctggaaaccttctgggactggactggtacaagtgcctttctggaccagggtttgtatgtctgtggattcttgttggtctccccttccagcctttgcactaactctgaacagtttgccttagaacagttgtcacttaatgtttgcttctttttctaatgtagaaaagaaaatgaacgtataaaatcttaacacagcttgaaaactctttagtaaagaggacttcattagattctaggcagtgggtgggagttgacattggagtggagagaaagacgtgagttttgtttgggttagcatgctattggattcttgttatctaatcggtagctattatattctaggactctattgaaaaagatgttggaactttctgcatacgttaatgatgaaatgtctattagttttagaaatctagacagaggaccaaagagaactcattatattaattatatttctttcattgttttcaagtcaggaaaatcagttcagttgaaatatctacttgatattctggctgcagccaagcatgagttcttcttaaattacatgaatatatggaatcaggacttacctgtacataggcgtgcatcagtgtcctgaagtttctggtatcccaatttccaaggaactggctcattatcatagcttctgccctagcatctcagtgcctctgaaaacatccccccacacactgagtctgttgattaatctctctctggagtgtaggttccagttgagtctgtgttatactgtaaactgtgaaccctgtcttccccctgatgtcctactgcagtgcatcctcattaaccttccctttgctgtggcctgcttgtccctgcacttcttcattgacctgcctacactcatgctcttgagctttctgaagggactcctgggttaaactcaacagctcctaactacaactttcaatctgttttcaagtttgctaaatcatcttgtttagtctttttttattattaaaagtttgaataagcaggaagaaaaagtgacaggggaaggagaaaagtcaaccccctacagagtgctgaggcaaggtctttggtgttgtctccttttattgtgcagggatcaccatgggagtgggcgggtgaaagcagaccacctggatgaaaggaggcacagggatgtctgtttgggtttggggcatgtcaattccttccctgggcatttttaaacccacatctttgtctgcttttggaatattctgcatatattatatacaatattaacatgatgggggtgatgattagagatacatggagttcagaagtatggttaagaaaaaatggaatacattagaagaactctgacatgtaagggaagtattatatccatttttccaagaattttttttccatttttttccgttatgagtggtttttatacttctatttcaactaatcctggtgttgtcttatatgcaggaaaccatatcaaaaacaaaaacagaagatctactaatcctttagtgacttttttaagactccaaagggaagacaaaatgggtattgaacaagtgagctcagccctggactttctattcatcagtatatttcttcttaatgtctctcctgttctctctctccctccctccctctccttgttttttttcacaccacctttttatacttaatctctctctcctttctttcacactctccacaatacccactcttacacaaacaatgtgtatttatttgtgtgtgtgtgtgtatatatatatgtgtgcgtgtgtgtgtgtgtgtgtgtgtgtatttggattttagtttacagctcatatatgaggaaaaagtttgtgacatttctctgtctgagtttgacttatttcatgtaacacaaaaatttcatcatccattttctcataggatatatatatatatatatatatatatatatatatatagagagagagagagagagagagagagagagagggagagagagagagagaggagagagatttcttcttaccaatttgtgatacttttcttcatataaataggcttgttctccctataaatatatcttcctaatcgtttgcctttaattttgtttatatcatgttttaaacacattaaaaattattgctctcacatctatcattttttaaaatctgaatactttcaaaagatgggagacaataatagtaaaccatgaagcaataagtacatctttattattttgaaattatagtccactttacaattcaagtaggtgttgcaaatataaacaccgtgggaaattctgtgaaaactaacaacctgttagaacaacaatgtcagagcaaggacagaattcagaattgaaaatcataggaagcagaaattatatgtcacttagggcttcaagtgtttatcagtctttaaagggaagaaggcgagacgctgttggatactgtcaaatcaatttatatcaccctttataaatgtcctttctgtattcagtagccttggagggaggctgcgtttctgaggcccctgcagactctctaacctcctttggatgctcaggccctgcagaagcttgcagcctggtgatactaagtgtttcccctcccccaaacaaaccacataggcttttgtgcattctgcagggatgctcctggacagcccagctaactgcattcagggccataaatctcttttcctgccagacatagtagctcccaattcagagagaattggatccaatggataagttcaccagccttcatgttattaaaaataaaaaaaggaaattatagtgccattgacacatccttacacacacacacacacacacacaggaaaagacaacacttgcaaatttatcttctatcactttggtaatagatctttatgaaaattcaatgggacatgtgtttccatttcccttttgtcttttcctggtcaattcactagtttgctttttctgccatggaaaatgccagactaggtgctgtaaccacagctattaattaattaatatttattgctattcaagaatctggggagtccaaggtaaagcatgctggtgaaatcgttcttcctgacttataatgaactctccttgcagtgtccccaccccacaagagagaagtagggaaaaggtatcaggaaggggcaggggtgggggctccagggagcattgctactttctttctcttcccataaggatactaatctcattacgggcggggctaccctctcacagtgtcctctaaattgaccaggtcctagagacaccactaccacatactgtcagaataaggattaaatttcaatgtctatactggagaaggcataaccaatcagcacctagtattccctgagagttaacttgcatgccattatcacccaccaaataagctacctcctcccaaaatctctcttcaggctgatgcataggatgagcatgtaagcacgacattcttttagttgttgcgttgtccttggttgttcagttttggagcatgatctccttatgtgtctctccccaccttgtatactatactgtggcccagattgcccgtgaactgagaatcttcttgcctctattgcctgagtgctaaggttacagttgtgtgccacgaagtttgagtacaatgtcttcttagtgatatatgtgctaacctgacttggatgaggtgaaattgtatccccctaaagctctgtattgtaatcataacacgttacctctttctttcccagtcatatttcattgtcagggtttcacaggacttccagtccgagtgttccatatcctattaagtaattaatggttttcataagacagacacactgccaactgagtcaagagggtcacaagggttttaaaaagactagagaaactccgtacttagaagtcatctcctgtgcagacgctcccttgtgccatgcattccttctgcgaagacacattccatccctgctgccttctggcaatgtgcttcatttcttccctgctcccttatcagccaaccagaaagaatgtggggaaacaggatgcagttttctcagtgcattgccaacattaagctcattcctgttggaatgaaggaccctccagcagctggcaggaacatgtcctgcctgcactggaactcttctgcctgcttctttgccaggaagacaaatatcaggaattgctgtttatataacagaacttgcaacactgggcagcagccgcttctccctcccccacccccacccccaaacctacaccgtgaaaataacctcaagcagagaatgagaaaggaagactgaccagggcatctcttcagtgtataattcctgcttggataaacatttattccacagatgctaggaagctggcaatcgccgtcacagagagcacttgattaaaatgtatgagccaacataccgtgaggaagtaattataagtaataattacttccatggaattcgctgctgcatttatttcaggctgccttgcttcaggtggtggataagacgagactgaaatatctgactccccaaactactctcacaggcaccaaaagataccaaaatggaagaagagagtataaatctttgggggacagtgttgccagataaggtgccttctctagcaggatgcagggtcatactttatattattataggatggtgacagcaaccctttggctaggaatccagtgcagtattttaattatcctgacttcacaatggtgactttataagagtcacattgttagcattttgcatcctgcttctagggaaagggtctttcactgaatttagatatgccccactaaatgaggcatgccccagtcgcatgaacacataagcttatgttgctgttctttatctctctaacaggtctattatttgcaattgaaaccaagtttataggctatgttctgacttaacatttttatcagttcaagtgacaaacagataagcaaaacttaataagtagttgatcccttccagaatgcaaggtagaaatttgctggtttggtaggggaatcatgtgaccattgtgccattcatcaagctttctcacctcttcaatgtttcctgtggataacacaaatcaacacttccaactactctgtaagtaaactcaaacaggacttcaactctctgtagtgatagaaagggttatgggaccacattctaattattcttcacttctgtgccatattcatcaatgagcctcataattccaggtaaatgaaacacatattctcctcttataatacagtagcattttgtgagcaagtttcatatatttctcttatagtctgtcttgtaaatgctcactaactttgggatgttaattttcacattatcatttgcaatttgcctatattttatttttaaatgttgcaaaggatgatgagtttccgggtagctctacaccacactatataactgatactttctatagagataaaattagttttgacagaatcagaactgtgttctacctctcccgggagtgtgcatgtatggtgggagaatgatgattttacatatatatctatgacaaccaaagctgtatgcttcctaaggagcctttctccttaatgctaatgtaggagaagctacggagcttaaaggacaaagagcattcattacaagtaagcagccacagcttgctggaaactgtggtgaaaggcacttggtttttgagacaatggagaaggcacatctgcttccgtgatgatggtttttactgtccacttgaaacaatcttgaattgcttggaagaaagtcacagtgaaggactgtccagagtatgttggcctctgaatatgcctgtggcagatgattttggttaccttaattgacatagaaagaccagacaactgtgggtggtaccattccttagcaagggattctgaacaagtataaggtggagaaagcaagctaagaacgagcatgcattcattcatcactctctttcccaaatgtggatatgaggacacctgtgtattggctggttttggtgtcaacttgacacaagctggagttatcacaaaggaaggagcctcccttgagaaaatgcctccatgatatcccactagaagacattttcttaattagtgatcaagggtgggagggcccattgtgggtgggactatctctgggctagtagtcttggattctataagaaagcaagctaagcaagccagtaagtaacatccctccatggcctctgcatcagctcctgcttcctgacctgcttgagttccagtcctgacttcctttggtgatgtggaagtgtaagctgagtaaatcctttcctctccaacttgcttcttggtcataatgttttgtgtaggaatagaaaccctgactaagacaacctgcctcaagttcttcaatgaccttcaatgttctacagtgaatgactgtatattgaattgagagctaaaataaaccctttctcatgtaagttgtatttgttggggtattctataacagcagagggaaaacaaaatgatacaacattttaaaaatagccctggtctgcacccgcagctgattctgtgccacagtagtccttacccaaataccaccagaagagagctggtctctcaggagtgtggacaagactgtgagctcaggtaagaccaccacttctgctcagagggtcccacccaggacactcaggacataggaaccaagaagcagcctgggacaggatctttccagtctctctctgcaccctgagctcatcctgtgccacggtgctccatacccaaataccactgggagagagctggtccccaggagtgtggtcacagctgtgagcacaagtaagaccagcacttctgctgctagggccctacccagagccctcaggacataggaatcaaggaaaagtctgggacaagatccttctggtttccatctgcaccctggggctgaccctgtgccacagctctccatacccacattcctcccagaaagaacttgtctcccaggagtattgacatacaggcgttcaggagagacaagacacagtcagagacagcaaaactagctgacaccagaaataaccagatggtgagaggcaaaggccagaacataagcaacaaaaaccaaggctacttagcatcattagaacccagttctctcaccagagcgagtcctggatacatcaccatactagaaaagcaagaatctaaaatcacttcccatgacaatgatagaggacttcaagaaggacataaataaatcccttaaataaatacaggagaacacaggtaaacaggtagaagtccttaaagaggaaacacaaaaatcccttaaaaattacaagaaaacacaatcaaacaagtgaaggaaatgaacaaaaccatccaagacctaaaaatggaaatagaaacactaaagaaatcatgaagttcatagaactgacagtctgctgacctggccttgcatctattgaccacctggagttcttctcattcttttattccacacactctttcccaggagactaatcatttgtgaaaaattaaaatgtatcttgctttgacaatttaagcatattttatatggatgggatccataatagttgtgtaactatttcattttctacacttagttttatgacttgccaccaagggaccaatttaacttagttcttgttttatacctaaaaaatattctccagtgggccaaattagtaaaggcatttgctgtctaatgctatgatcagagtccattttccctaggacccacatggcaaaaggagagaactaatatcagaaagtatcctttaaccccacacatgaatgtggtaaattttcatttttttcactaaaagagcaacttctagaaatgagaaaatagagggcaaaaagttattccttatttggatcctaaaaataaccacaggttccccccagaagtagagtatctgattatgcacaaaaataagcctgtcagctaagatccatgtcatttatcctaaaatcactgagaatgaatccttctatattaaaggaatattaggggttgtaaaaggacagtgatcttttaattataagtatcgatatgcttgttagttttaggactcctgccctgtactacagaagtctcaggctacacttgacagacagcagattactagtgatatgtaattggtagttggcggcacaggcaagcgactagcaaatgtaccatattttccctttggaaattcaggcatattgtactgggctgaaaacatacattaaggtgtctgatttggcttccagattgatgtgtgattgaaagtaatgattttctaacattcaagctattacttgtgaccctctgaaccctccgttgtgaatgatctacttcacaatgcctaccttcaggcggctgcatccaataaattgccacaccactcctgaaaagattccctgcctcgctttccatgaactcatttattagccttgtggggattttgcattgctagtatacttactttgcacaccctgggatactgcaaccagaagaatggcctccccgagggagaacagtggggttagatgaacaatcaagaaataaatatccagctttcaaaatgtgttggttgtgaagaagaaactggtagagctatgctagggtcaacagcactattcttctaataggccattttttttatttcctctaggcaaatcataccttagctctctgccacaggaaaatgtgatgtgacgttcaaggcacaatagctgctattatttaaaattgtattgaggcttggtagtgaaatagtgagcataaggttgtgatgaggtttcacgtgggttaaatggaagagttgagtaagttggagaactattcaataggcttcatagctatggaaagcaaccataacggagaggaatctggtcagatatcttgtcttggtgctgccatataaaatctcctgtgcattacatctgtcttcagagatttggttttatattccattgaacttacctaaggcaaagatttctcaagacatcatctcgttttaggattctatgattccttagtagcttaagctaaatggttcactatgttgacaaccaacacgtggctgacagccattgagtcccatcaagcaaatggtgtgatttagtaataacaaaaatgactgagagaaaggagggctagcctaccttgggtgtaacatgcttaccacaggcctattgcattgctattacaggctccattgtgtagtcaggaacactgagacaccaagaggttacaatatatgcccaagagcaccttgataaataataattaaaaaaaaaagccatgatagaagcctaggttatctgtactgttaatatgcattcttcccacaagccaattgtgatggccaatattgatcgtcaacttaacaggctctaggatcaccgaggaggtagacctctgggcttgtttgtgatggaatttgagattgggtaaactgagatcggaaggcactagatgtaagtgatgctggttgatgagctagaatcctggtcagaataaaatggagaaagcaggctgagcaccagtcctctcttctgcttcctgactgggaggtcaccagctgccttaagctcctgccttcgtgacttttctaatttggtagaagctattctcaaactgtcagttaaaaaaaaaaatcaagccttccttttaaaagttgcttttgtcaaagaacataagaagtaaataattcataaacattgtccagaaaggtcacagaattgttatagtataacgggcataattgcctctttacctaagttatcaaaagttgtttaaaagcccaaacactgaacagctggaactttaaaatatttattacttatatataaaattagaaatatagtggcttaagtctggaagccccagagatggtgagatgtttctccaaatcacagatggtactaatcctccatgacctccttgaagcatcagattcttctgtaccctgaacccctgcagaacagagcagaacacaagttctgaaggatggtggggattctgttagcttgtttcggtctccttcatccagacactcatcacccgagttgctatggatattgtgagtgagaaagagattctcatcactgattaaaaatcaggaattgaggatagatagtctcctgtctttctcctggccattcatttacaactcttcatctccacgctattgctgatgataaaattgttcagtctattttgacttagatggagagaaatgattacaacccacaggcttctgtgcctccttctatcttttccacatcaataagagccctgtcagagaggctgggaagggttcccaggagcacagtgagaaaaggctgtccttgaaatcatagctgcagagtacatgggagccctgacttgggtgttcgttgtttaataagcaaactgggtagttcagaaatcaagttatatttgtgaaaagtgatttacaatcaaagctgctgtcatctgggaaacataatttccaggacagtgatggaggacagtttagtcggagactcttgcagttaactggatgacagccagtggacatattaggtgcaggggagaggcctccctccgcagaggcagcagtatgtcagcaaaagccatgaaatgattattaacaacacagcaaacaaatcgggagattgctgaattataattctgtcatgtagctctcctaaatgaacatgtagaacatatatttccatgaccgataatgtgtctcgcttctaataggaaaactgtgtttcagatttatacagatgagtgaaatatgattagctggaagtacaaaaaaagggaagagcatcaattattctcgaagtaggataattattgaaagttctagagattactgaaaagatgaagcctcggcatttatccatccatctgcccacctacccactgtgcaatacaatgagcctacagatgagtgttatgggcacacactggtttctaggcaatgagatcaaagagtaggaagatatagatctgtcttcctaagtcaggcaagttacatgtggcagccaccaatgtaacttgcaaaggctgaaagtcaccaggcaatggtgagtgccaacagagtagagccatggagcctcataggggtaatttttcaagaactaataacttctctgaactctgatgtcaagcagaaattaactggtagtaaaaggcagaggtgggactcaaggcatgccagaaatggcagaatgtagccaaggtgagtgtgggacactccagactggagtgaagatgggaaccaaggaaagaaaagaatgactttagaggctaccctcattcaccttcacttgggtgtcttgtggttggtcaaccacagcagctctctggggcctctacacagcctaccagcacagaggatcatgaaccatgctctgttaaggatttcacaaggaggagagagcccatttacttattcctggacaggatgcttggttgctattttggtcttgtctttaagtggttacaaacctctgactcaccactcatacgtgccccaaggctgagttataataaggatcgctctctgctcacgcactttgccttactctgtccaaatactatgctgtcgttggctttgaaaatgcctcctgactcagtgtcatgaaagattgtagttgttctatatttttgcaatgttaacaccaggtatgtcatatcacatgtattagcattcattaaaagtaatagcttttctggtgcgttttaagagagtgggttgaacatgaggtttctgaggaagaaccttattaccaggacaagtaacacaccagctatcttatagtaaagcagatgacagtgttctcatgggtactcgacagacttctagactgccatagagttagagaggaagaaataggcacagacctttcactggtatgcactgggctcttacagatggatagaaaatgctgtgagcaggtacagggtattcagtgaaaatggaaatcttctaaattaattttacctggatcttagctttacctctaacctcttcatcatgagtgggggcagggcatcactcacctgggtttagcatgttcactacataatgagatcgtgatcagacatggctaacacattcaactaggaagcttgtgaatattctccgtaagctggaccttagctctttctgctgtgccattttaatgtgtgcagagccagctaacgacgataatgtacaggctgccctgtccattctacagactggggctgtgattatgaactgcaggccacccacaaagtatccagatgcaagggaggagtgcttcttcagatccttaatcctttgtaggagttgaattaagtcaagtccagattttctcttagatttccgttgcaagtgctctgccatctgaggtgcagctcctccccacattctctaccttcaagagatattgaatgaggcactcaagccaattaaaaggaaagtcatcccttggaatgataaatgccctatacactagcttcatagttatcactatacttcatctatcttctttctttctttttttttttttgtttttggttttttggtgtttttttgttttgttttgttttgtttttttgtttgtttttttttgtttttttgttttttgttttgttttgttttttgtttgtttgtttttgttttgtcttttcgagacagggtttctctgtatagccctggctgtcctggaactcactttgtagaccaggatggcctcaaatttagaaatccgcctgcccctgcctcctccattctgaacattgcctaacactttatggccgggtcacctcaaaggattatccgaaaacagatagcactgtgtgaagcccaagataaatcaatcctatttttttttaaatgacataggaaagatatgcccaatactcagatataatcttccatgcagcctcatatgtatctgattggatgaaaccagtctagaggttagaagttgacatttcctcctgatactaagtgccacctagtatgttgatgtcacctcatattctcatcagagcaacctttccaggttaaacaggggcttatgttttatgatttgaagatgaaaaccatctgagagtaaacattccacaagacacagtatgtggacataatactattctagtgttatgataaccaaagttttacatataagtgttgatacaaaatagctccttggatatgagttgagcctgttctggggctctgaaccctggctggaagatgagaagtgaaacacaaagctgtcaggtgaatggtccatgaagaacttgcttttcatcagcacattgctttcccagtagccatggtgtcttgcaaatgcatcatggcaggtactgaacccagggtcttgctagtcaagcattctatcacagacttatattgtggcctgatgcattaattaaattggcatttacaaatggtgtcccgtagactatgtagcaaccagaaagatgaagacaatcttggtgtctccccttttagcaatcagagtctgatctgtgatttctttgatttttagatttgtgaaatgagcttctttatagatatggaaggaggccccacatggttttctgtaatatacaatgaagccatgatctgtatgaaaaggaagagaacaacaacgaaaaccacaggaacttctcctggttcttgagagttgatgcatgatccaggctcttctttgtttagatcattacctaaggctacccttgggagacagagtctggaatcagcagctcatttttactaatgtgaagcagacacattgaatgattgtgtgtgtgtgtgtgtgtgtgtgtgtgtgtctgtgtgtatatgtgtggttgccacacgttcatcagaataaactcactagcataaaaatccccaactttagaaagttaatggaactggatgtaattctgcagtcatgacaagtcctattctgattgtcctggaagcttctgagcagccctcttaggagcaataacacaaggtcgcagcgagcttccactttacagcttcctcattccaaaacctcaggaccctccagatagcagtgagaaaatggttttacactcagttctttttttattatttaatttattacgtattttcctcaattacatttccaatgctatcccaaaagtcccccatacccccccccactcccctacccacccactcccactttttggcactggcgttcccctgtactggggcatataacgtttgcgtgtccaatgggcctctcttggagtgatggctgactaggccatcttttgatacatatgcagctagagacaagagctccggggtactgcttagttcatattgttgttccacctatagggttgcagacccctttagctccttgggtactttctctagctcctccattgggggccctgtgatccatctaatagctgactgtgagcatccacttctgtgtttgctaggccccggcatagtctcacaagagacagctctatctgggtcctttcagcaaaatcttactagtgtatgcaatggtgtcagcgtttggatgctgattatggaatggatccctggatatggcagtctctagatggtccatccttttgtctcagctccaaactttgtctctgtaactccttccatgggtgttttgttcccatttctaagaaggggcaaagtgtccacactttggtcttcgtgcttcttgagtttcatgcgtttagcaaattgtatcttatatcttgggtatcctaagtttctgggctaatatccacttatcagtgagtacatatcatttgagttcttttgtgattgggatacctcactcaggatgatgaataagaccagagttagaaatgcccatgtcatttttaagaaacggaggttataaagaagccaggattcaaggtttggtcatttaaaacattnnnnnnnnnnnnnnnnnnnncccaccccacgctttgtaatgatcagacactgaaaatcctttgcatataaattgtaaatttcaaaacagaggagcagggagtcaggagtgcagaaaggaaggataaatcagaggctgtcacccaggaagaaaggacagcaacagctcagtttgacaatcctgcagctccccaagaacagcatgaactgcagaggtttttatcttcagctgcctccaattgccaggcaaatgtgccgcgtgagatgggcagaccattaagacattagcagagacatgttcattactttagctaatagagttcagagttcccagaaaaatgtaatattgtccagaggaggtgctgaaggtatctcttggttggaaggagcctggcagggagggtgagggcagagaggctggaagtcggggcgtggctcagtgaagcaaggtagtaagggagccagagagccagtatgattatatatgctatgggatattggacttttggaggataggagacacataaaggacatgaacatgtaataaggaggaatggactcttggttataaatgaaggtctgagacacataggtttgtatcctggcaacagaagatggagaatttcagggaggtactactcattaaatccaaacgagctgtggagaaggagctctaaaaccagacagctgtggtcacttaggcaagttaaagactggatgcttagaaaacagaccttgaaaaggcactctgatgactaagtgatacaaaatagtgagcgaccagtttccaataggtgccaaccaatggggggtgggggaacgccaagggagcattgaaacgatgttgtccgggcctcctccctctgggtgttttagtttctgggttggtaggaggttcctgggcttgtagtaagccagctggtggaaggatacctagagagacagccaatatgtttgtaaggctaataaataaggtgtgtgcgaggaagtggccactaagtccggacatttctggcctccctcttttagccaggtcagaccaaggacttagttctcactaaatgattccaaagggaatattccagtctaaatagtcctgtctttgaagggaaatttgttgagggagacttatgaaattttgcttaccaaattcagataaaaataattaaaagtttaaatgaagggaattgaagggaaaccttaataaaataaggttttaagtctctttaaaaattcagtgacatttccctataaaggtgattttattattaaatattatattataattatatatttacatataattatatgcactttataaataatagtatttatattatgctcaagatataattccttatactttattatatcgattttgtaaacaagcaacttggcctataggttttttttaaacaaatctgacttacctgaaagaaacatatattaattgaattcagaagtgacctcttttcaacaccagcctacttagtctttcttttgatattcatctttttcatttgttttgtgaaaactagtgagataaaatagtgtcttcttatctttctattttgcaatgaagttttgactatgtcttaacttcattcttccatattagctttgtttatctttaagtatcatttgaattttacaattataatagatgctgattatcaaaagaaaaaacaatacagatacagtcaacaaaggtaaaaattgttaataaactttatatgtttataaaaatgttactattatcactttgttgcaaaactgtctagaactgttatgggtatttagacttataggaatatgtctgtcatgttataaaaattacatcatggtgtagaaaactcttatatccaccactttgctcaactattgtgaaatcatctctattaataggttttacttcttagacatgaataatagatgacttttttcaatagtactttatcaatcttgactataaatctagaaatatttagaaaaccaacatatgtgtagcatttaaaatatatgcagtcagctcatctcctgattttacttttacctttacatttaaattttaatttatatgatagtgctctgcgagagaatttatgctgtcagggttctttgctctaagttatcatttctatctcattgtctagtttcatgttccattgattgaacaatcattttcttcccattataatttagctaacgtcttgtacactgcttctactgacatctctaatttggttccacttaccctagctttaaatgtggttgagtatctgaaagaatgtgttctttcttcatatggcttcatatggttgttagctagtccactccccatcaccccagtcctctagttgttagctattacccttcctgacccattgagataaacttaactctgagctcattgaatttacaaactgatttgttaaacaaaaaaaaaaaaaaaaaaaaaagaagtgtcagtagtttcacactattgtgatgagactttaagttggtggctcttggatcatataagagggagcaggcaacacagaacgatttctgcatcattctttcttaggtgaaagttgaagtcatgtgataaccatatttaatggaaagaaaaaaatcagaggctttgtgtatactacatcccataatcttctatacatgttatttacttcaagttctcatacccataacagctgtctgaggaacaaaacatttcagatacagcaagtctagaaattaagccccaatttgtgcatttcattcatatttctgattaattaaatgttttctgctcttacttacccctggctatctttctgccttaagccttcacagaaattattaggaagcatttgtctattgtcttctttcaatacattctacatttgctgagagcccattgtggcctagactctgttcttggtggtgaggatagtacatagaaatacttagaagagcttgtttttatggataagaaaaataattcaaaaaattttaaaaaacatacatttttaggggttgacaaatttcatgcacactgcctcttgtcttctctttctttttaatagctattaataaaattgaaagaagaatgaaaaccatggagaaaacctgtaaactcagtctttctaagtctgcattgtcttcttgtcaaaatatctgaattaataagaacaaataaaatcctctaaagtgtaaatttacattacaattaagacacaaaggtacaaaactactggaaatattagagtcaaacttattactgtgctaccaactaaagatgagcctcattcattcaatcaagaaacgagcaagggactggagtatactcagtggttacagcacctccttggcatatctgagtccctatattcaactcctacaacactggtttaaaaaacaaaacaaaacaaaagaaggaaatgagtgagtatcctttggcaagaagatttgaagtagtgcctactaaaattaattaaaaccagtcacagtgtgacagcaataaagtgtgtgtgtgtgtgtgtgtgtgtgtgtgtgtgtgtgtgtgtgtgtgtgtgtgtaagcatgtgcacacatgacatgatatacatatgtaggtcagaggaaagctttccagagccacttcttgccttccatctcgttgcaatgtctctgctattcagtctgcctgctacactgtatgctctaggcttgctggccctggagcttcttgccagtctcctgcctccacctttcatctcagagcagagtactgaagctacagatgtattcagctatatggggttttcaatgtgggttgtgggcattgaactctggtgatggagcttccaaggctcacacttttatgcactgagatatcccctagcccaggcatttgcatggtttgacctaatagaaataacacatgagaaatggaggaggaacagaaaactataaatctccaggttagctggttcctgtagtcaagaggatatttataagctgacacagcaagtagtattattttaagaagaactgaggttggcaagaacggtaaagaataaaataaatgaatggatgattagaacaaactgcaaactctcctaattaacaggattttaggacagagaactattttctttctagagaagaagcataataaataaaatgtcatagtaaaaagtagcctcgcatggatgagcgacttgagatccagcatcctcgcatgccagtgagcatagccatattgcctactagatgaaagcattgaggttgatggcaaagcaaaaatgtacttctcacatggattataagaggcataccaaacaaaaggaataaaagaggcaaaaaagaaaagaacccattgtgnnnnnnnnnnnnnnnnnnnntttatttccttgagctaattatccctcgatgtatacacatatcaaaacccagttattgtattctaccacccatagaaatattgtcaagaaaaatcagaaaacaatatacattttaaacagtttcaaatgggatactaaagagcaaaattgacaagaaatatatcatagctttcaatatctcttcctcaaacatcctaggcacctttgtaaagtagaaatgggcaggggatactgaccatgctcttaactgaacctcagctgagctgtaaggtgggttatataacacatattgccagtgcagaggcagggggaggcaaaaacagtgaacaactgatggttgagagagctctagctgctgatggttagatctgtgtcaagccatagaagaacaggcaggttagagagcactggcacagcccctcccagctgagaaaaggcctgagctgccactgaaccaagatgctcacaggttagtgattttaaatcaaggtcctaagggaatagagtataagaagagggagagacggggaggcccaggacatagctggccttatacataggggagaagttcagatttcacacagtgtgacaagccaagttaccactttcaaggagatagacagtgtggtctctcaggttgctttccttgaaaagccatgtattcaggctatgcagttcttctaattgatgttttgtttgtttggtattttttaaataggactaaactaaatcactggaatgaaattagctagcctcttctctctcagtgctgtggctttggaactgattactaacaggggcacgaaataattcaaagtacaaagaaaaacaaaagttaaagagaactgctttgcatgtgtctattacgttgcagtgacagcaatcagacaacctacctacattgccttacctggtccagtttaatgccagccctttactgctctatgaacatgctagcatttcttcctcagaagaatgtggacatgtggagagactcgcctgtgtgagcctccctaacgtttaaggcttcaagctccttccatcttccaaccctgccttctcagattcttttgtttgttccttcctttcacccttccttccttcacttcctttctcttctttcaccatttatttattgacgtcaagagcaaatgaagatggagaatggacatttacccatatcttccatccagagcagatacatggaggagccattgagcttaagtgacctccaacctccctgaccaacagcagtagctgagactacttgacaaatctaaactctgtcaaaaacatgcaagtccttctatttctcacaaattccattaaaaaatagccattaccattaaagtcttaattgtatttcatttctatcaatnnnnnnnnnnnnnnnnnnnnnnnnnnnnnnnnnnnnnnnnnnnnnnnnnnnnnnnnnnnnnnnnnnnnnnnnnnnnnnnnnnnnnnnnnnnnnnnnnnnnnnnnnnnnnnnnnnnnnnnnnnnnnnnnnnnnnnnnnnnnnnnnnnnnnnnnnnnnnnnnnnnnnnnnnnnnnnnnnnnnnnnnnnnnnnnnnnnnnnnnnnnnnnnnnnnnnnnnnnnnnnnnnnnnnnnnnnnnnnnnnnnnnnnnnnnnnnnnnnnnnnnnntaattttcacagtaaccttatgggttaatgtgatcatttctcggaaggagagaatcaaggttaagtaagtgggcctatgtcatcctgtataggtagattatacagttattgtatctcatggtattgctaaactaagcatgatgcaacaggctttccatggatgtctttcgaaataaaagaataaatagaaaagaacattggcttatatttgcatatttaagaatagggactgtgtgtgtgtgtgtgtgtgtgtgtgtgtgtatgtgtgtgtgtgtgtgtgtgtgtgtgtgtgtgtatgtgtgtgtgtgtgtgtgtgtgtgtgtgtgtgtgtgtgtgtaaaggttgttttgatatttatttatgtagtgtgcagagcaatatgtttcattatgaattttcatctgtaatttgtttggtggctcctctgcccacttcctctcccattcttctaccactttagcttgaatccccatttcccatctttctacttttttttatcatgtttctcctaccacacgcactttgattttgtttgtgtgaaactccaaagcatcctgaaatattacacttttagaaaatatcaggtacggtcaatgggtaattcacatgcccatggaggaccatagagaccaggacctttcacttaattattcagggacttaaagaatacattttgggctcgcctacaggcaaacttccctgtgccgtgtcgtgtggattcttatgaatagacaatgagctgtgcaatatttgaatgcaaggcttctggcaggttgcaacacacgggaccaagtgggtgaaacaaagagcagttggtgattgaataagttccaatttattgtctctcacacagtagcatgctgtgctgttcacttcattttatcatgtttgttacgctcatgtttccctaagtcatctggggtttattccaatataattaaactaaaaacatcgaaagcagttactgctggtgagtatctgatggcaaagaggaatctgttattctatgaataggtagcccacaatgggagcatctgtagtattactaagtatttagatcactgaaaacagccgagataccagggaattctcgcccttaagcatgaataagagcctcatgaagtatttgtgaaaatggagtgttcctgggctctactcccagagattctgaaaccagaaaaccaagatggcacaagaaaattaactaataacatactacaagctgtgtctggtcgacacactaggccacctagtcaaaccatggctccaagagggctactggtgcttctctgtgttagacttagaggaaagctaggtggaggcttaagtccaggtaggaacaaaatgacccacatcctctgcagagggaaagtgtgatttctcctaagacaaacgaatgggaaactgattgtgtgtgcagtgactcagaggataatggagatgactcatggcaaatgatgcttcagacttgagacgagacatgaaaataataggaacagtgacgctggtggaacgtcagaccagagccaaagatttttctaattgcatatgaacctataaaaacactatcctaggcagacaaccaattacaattagtattgaaaaacaaaattatctgatgtttttagatagactatgtgatgtgtaaatgcatactagaaatagttttatacaacagttctggctgtatgcctaatcccccttcacaccccatacttttgacagaactacagcattgtaataaccggggcaaaggagaattaattttatgctcctatggaaataacaacagggccagattttacaatggtagctgtgtactatatgatgaatttgatttctcaacttaaaaaatatttttattctttacagtttgataggatgtattttgatcnnnnnnnnnnnnnnnnnnnnnnnnnnnnnnnnnnnnnnnnnnnnnnnnnnnnnnnnnnnnnnnnnnnnnnnnnnnnnnnnnnnnnnnnnnnnnnnnnnnnnnnnnnnnnnnnnnnnnnnnnnnnnnnnnnnnnnnnnnnnnnnnnnnnnnnnnnnnnnnnnnnnnnnnnnnnnnnnnnnnnnncctcccccctcccccttgctcaccaacctacccactcccacttcctgtccctggcattcccctatactggggcatagaacctttacaggaccaagggcctcttctcccattgaaaacaaagtaggccgttctctgctacatatgcagctagagccatgagtcccaccatgtattttctttggttggtggtttagtccctgggagctccgggggtactggttagttcatattgttgttcctcctacggggctgcaaaccgcttcagctccctgggtactttctctagctcctccattggggacctcgtgcttcatccaatggatggctgtgagcatctacttctgtatttgtcaggcactggcagagcctctcagaagacagctatatcagtctcctgtcagcaggctcttgttggcatccacaatagtatctgggtttggtggttttatatgggatggattcccaggtggggcagtcttttgatggccattccagaagcctcactcttaacgcaactggacttttcccttctccagagtcggtaacctgtgcatgggtcctcagctagggacaggggctctagattccctttgcctctgtgctggaacgtcgactggcttgattttgtgcagccagccacagctgctgtgagttcgtaagtgcagtgctcctcttatgcctccagtcctccccacctttgactcttacaaccttttgctatggtctctaagccttgggagagaggtggtctagatgtctcaattatgtctcaacttcttttatagttaagtggctcatcataagcaagttctagcaggtgacccaagcagaggtctgctgtgtaggttcttggaatctgcacttttcctgattcaatgaaataaaaggggtgaattgacagtcttggacacgtctttcttattccctggatgtctatgagttctgtatgtgtagaagccaacaccaaggacattgaaacagccgattggaaagacaagaggccctgatcctgatcagattcattattccattttgcgcaaaacttctaaagagaagcaatagtgtttttttttttttttaagtacttgtagttatacaaggatatgtttactaggannnnnnnnnnnnnnnnnnnnnnnnnnnnnnnnnnnnnnnnnnnnnnnnnnnnnnnnnnnnnnnnnnnnnnnnnnnnnnnnnnnnnnnnnnnnnnnnnnnnnnnnnnnnnnnnnnnnnnnnnnnnnnnnnnnnnnnnnnnnnnnnnnnnnnnnnnnnnnnnnnnnnnnnnnnnnnnnnnnnnnnnnnnnnnnnnnnnnnnnnnnnnnnnnnnnnnnnnnnnnnnnnnnnnnnnnnnnnnnnnnnnnnnnnnnnnnnnnnnnnnnnnnnnnnnnnnnnnnnnnnnnnnnnnnnnnnnnnnnnnnnnnnnnnnnnnnnnnnnnnnnnnnnnnnnnnnnnnnnnnnnnnnnnnnnnnnnnnnnnnnnnnnnnnnnnnnnnnnnnnnnnnnnnnnnnnnnnnnnnnnnnnnnnnnnnnnnnnnnnnnnnnnnnnnnnnnnnnnnnnnnnnnnnnnnnnnnnnnnnnnnnnnnnnatggatagatagatagatagatagatagatagatagatagatagatagatggatagatggatagatggatagacagataaatggatagatggatagatagatagatagatagatagatagatagatagtagatagatagataatagatagatagatagatagatagatagatagatagatagatagataggcttgtaataccagtcccttaattcctgttgaaagtaaaaaagaaaatagatgaaacttcttgcaaaagaaactttcatgatttttatagcctgtatgttgactcagggaagagtctgactagagtacaaatggtcacattgtagactgtgttggtctacagcattgctagtcgatgtatatcttgaaaataatactgtattccagtagtagagtcagtttcattcatttttaaattatatttacccatcttaaaaaccagtctgtattttattgtgtcttctttttctctttagagagaagtgattatggcattaagtgcaacttaacctggatgccagtttgcagagaagtctttttcactgcctggaatccatttgatttggggcgttgtgctggaaggttggcatcctaggagatgagctagcaatctagctttgatattgatattagtatcactcaccaactctaagtctttatcctcaaagtgtctgatattttatttttctttcatcactgaccttcagctaatgatttaatgaatctcacagccatgtggcctactggaagaacagatgactttataaaaaccagcacagtctacaatgttgccattccttctgagtcaacaccaagtacatgaggcgtcaatcaagatcaaacaatagaaatactgaatcttgaagtcttctgggtagcttaatatactaatgtataaaatgaggttgcataaaatgagagtttttaaaaatcactcctgacagtatctgtaccatggttagaatgaaggcatcctaatttccagggattctttctagttgcccatggctagctgtgaaaggttccttatcgttttctacttctaagacaaaatatgaaagtctgagagccttaaacaccagtcattcccttattaaaatatgcagacttgcaaggtcaattcatttccccgtgaccagcatttttactggctgacaggtgtccatagtctggctgtgtttgtatatcacaaaaggcaagaggaatctatggggttgtatcatcatgacctaattgcccctgctaagccccaccttcaaaaatattagtggaaagtatgaccaaaatacgaactttcaagatgaaattcagtctggataaatttctctagtaatttttcaaatgacaaacagcactaggtaaactagtaaagtaggtaaattataaaaattatacttacccatgtctactatacctgaaagacggtcagcatgggttttgggctaaatcacacctgtcagacttccaaacaacttccctttgccccaaatctgagatacaactgagaatgagctgtgagtccaacctcaagtgagcaaatgcctgtgcccatgcaggtgagacccagaagtctagggagctggtttgggaattaatgcagctggggccaggggccagttctgatggcaactagtttatccttttcttctcttttcttttcttttcttttcttttcttttcttttcttttcttttcttttcttttctttcctttcctttcctttcctttcctttcctttcctttcctcttctcttctcttctcttctcttctcttctcttctcttcttttcttttttctcttctcttctcttctcttctcttctcttctcttctcttctcttctcttctcttttcttccttttcttcttcttttctctctctctctctttgttttttgagacagggtttctctgtatagccctgggtgtcctggaactcactctgtagaccaggttggcctcaaactcagaaatctgcctgcctctgcctcccaagtgctgggattaaaggcatgtgccaccatagcccagctatttttttttaattttcttaagcaaatagtttttaagttactgaagtaagtagctcatctttgctttgactttcttaagtctatagaagaagttaacaattttaactccctaaaaannnnnnnnnnnnnnnnnnnnnnnnnnnnnnnnnnnnnnnnnnnnnnnnnnnnnnnnnnnnnnnnnnnnnnnnnnnnnnnnnnnnnnnnnnnnnnnnnnnnnnnnnnnnnnnnnnnnnnnnnnnnnnnnnnnnnnnnnnnnnnnnnnnnnnnnnnnnnnnnnnnnnnnnnnnnnnnnnnnnnnnnnnnnnnnnnnnnnnnnnnnnnnnnnnnnnnnnnnnnnnnnnnnnnnnnnnnnnnnnnnnnnnnnnnnnnnnnnnnnnnnnnnnnnnnnnnnnnnnnnnnnnnnnnnnnnnnnnnnnnnnnnnnnnnnnnnnnnnnnnnnnnnnnnnnnnnnnnnnnnnnnnnnnnnnnnnnnnnnnnnnnnnnnnnnnnnnnnnnnnnnnnnnnnnnnnnnnnnnnnnnnnnnnnnnnnnnnnnnnnnnnnnnnnnnnnnnnnnnnnnnnnnnnnnnnnnnnnnnnnnnnnnnnnnnnnnnnnnnnnnnnnnnnnnnnnnnnnnnnnnnnnnnnnnnnnnnnnnnnnnnnnnnnnnnnnnnnnnnnnnnnnnnnnnnnnnnnnnnnnnnnnnnnnnnnnnnnnnnnnnnnnnnnnnnnnnnnnnnnnnnnnnnnnnnnnnnnnnnnnnnnnnnnnnnnnnnnnnnnnnnnnnnnnnnnnnnnnnnnnnnnnnnnnnnnnnnnnnnnnnnnnnnnnnnnnnnnnnnnnnnnnnnnnnnnnnnnnnnnnnnnnnnnnnnnnnnnnnnnnnnnnnnnnnnnnnnnnnnnnnnnnnnnnnnnnnnnnnnncagagtgccagaaagagctgacttacgctttggccagcatcccagaaagaagaggtcaaagaaggaaaggagaaagtcatgctcttctaagttaggagccaatagggcaaggaggcccagcagaacctcctggtggcagtggtatgactactagggggctttctaaaggactgtggaagagcttggggataaggcatggggactagatgagctgtcactctaactggcccacccggggtccaggaccccttcttagttccagtcatacagtataacatttaagcggaggcactcctatatgcaataatgaagaaacaggaacagaacctaactgtcttctgacattcctggcctccaacaggggcattctcagaactgtggctttaggttccctgccctgcctgaacagtccctatctcctcttctcaccaaagtgaatagttcctataactaaagttgtatgacaataaagtatcatgatattttctgaacagttcagggaattacctatggtagcggtactttaggttttgaaataatgtgtttattaagtatctaacaagcaaaagcaaatgaataaggagcaagtgccaggtggatcagcagatagacagcaaaacaccatccaatccgggacaaatacatcccgcggagacactgcagcagcctgactgagagcaagcaaaggcaaccatcaccaaatcagggccagaaacacagtagacattgactggagaagttgcggccgtcagcctgaggttccgtagatgaacttccagcctttctcactgcaagcattttcatattgtgaaataaataatagtaagtctcattgggaatagttactctgtaggggttctcagggcctcaatgtttctgatccacttagctgcttgctacttttttctctgtcacttgagccagtaatccaaaggtcaccaaaagatgaacttttcacactaggccattcttcctctatcaccttttgttttaaggatttgacaaggcgctacccagctttagactacacatatgaatggtctgttctgcacagacctaccgttcatctctgagattttcttcctcattctcaaaaccgaattgctttagggaaaagtaaaacaacacttggtctccaagaagctttgaagcagctacaagaaattacatcaagacatgcccgtaggcgccgacattttgaaaagaacttcaacagctcagattaaaacagcaagagctaacaaatgggatttcatgaacttaaaagcttctatagagccaaggaaagagaaaagtttaaaagaaaatggcctataggatagggcaaaggctttaccatctatacacctaccaggagattagtatctaggatctataaagggctccaaaattcaaacaccaaaaacacaatcaattgacaatgagcacatggctaaatgaaatgagcaactagttcccaaactatgaagtccaaatggccaataaatatatgaaaatagtgctcagtagcattagccaactggaaaatgcatttagattccatctcaccctcgccagaatggtggctgtcctaaagaaaacaaactgcaagtactagggagcctgtgggaaaatagaagccttactgctggtaggaaaggagtggaagataatcacattaaattacatagacaagactcaggcaaatactgcatgtttcccctcttttgtgatacctagatttgaatccgtattatatacatatgatatgaaaacagaaggacactatgtaggaaaatggaaaggaaaggtggatggggccatgagagggcaacagatggtaggagctatgttcatagtagtatctgaatgaagccacctgctagaactgatgactatgtacaatgaacacacagtaataagagaagaatgtgataacagctctgttctggggctctccgcaaaggcaaatagtgataaagtcgtctattttaagcctatgtacacatcttaagaacaggctccaaatggtggattgaaaccatttttttaaaccttggctcagacatagctgaagaaaaattgtgctatacaacacaagggatttgtgctccgtatctgagaaaaagacagattgttagctaccgcttctttttcggtgacattggacttctcaggctatgtgaaatgtgataagattcttcgttagccaaaccttatcagaatgtgccaaactttaagtaaaagttatgtaagtctccatgcccaactttacaaatttaggtacgtgttagaacatgtcttgaatgatgaagaactgttttaagagataactcatgtatttatcacttcgaaaatgtagattttacaacacttctctttgtgtgaagtgttcagattgtgtgaactgtctgaccgcggtatagctggcaatttaagcagagcccttatgtgtgccttgtgcaacagctgggaactttggtttcactgactatatcacagaatccagtcaacattagattagaagaccgggagccttggtcccatttccattactaacttagtctgattttgctgatgcttcatagaatgctgagtaccgttcttatcaggtatgacatgtacggaatcacactcatgccaaaggccatccatgaccacatgaacctaagaagggtgcccagataccttggttgacctgctggactgaccagactagcagatctgaatttttgcttctgttttgattaaactggttggcaaacactgtgggcttcatgtcaaactgcaactgaatcgtttaactccaagacagtggctctcaaccttcctaactctccgaccctttaatacagttcttcatgtagtggtgacccccaaccataaaaattatttttgttgctacttcataattgtaattttgctactgttatgaattgtaatataattatttttttttggagatagagatttgccaacggggtcatgacccacaggatgaaaaccactgtcctaacatctcatttagcatctgtatactttccatcccatcagtctcctcaatgattgcttgtccattgtgtgctgattcttttcctgacatttattaatgtcagagactgtttaagtctcatgacaacattattgtatagattctcttattatcaccttttgaaaatgaagaaggtgctgataagaagccccagtcactgtccaagcccacacagctaagaagaggcagggtagaacttcagagtgaaggctgtctggggtctgaaaccagacttcccagttgttcttagtcttgggactttccattatatttcctggacaagagacatttagttatacattggaattgcaaccatttagagatattgtgttcctaatacaacttgatgtaagttattctcccgtcatgtacacttctccttcagggaagtccttcctagctctccacagcagcggcagatgtacaagtcaccaactgtgaaggttttacaaatatcacttaagacaaagaattttagatgtaatttccatgactccaactctactgaacttctactttcatctgctttagacaagttgatatccaaactatttaccagcttcattttcacaaggaatagacagctcatgaagtacaattgatatttagaaagactgagaataatatctggcttccactcaagattgagaagttcagtgatgaaatcaaaacacactaagattatgtaaataagcaagttctagaaatagctgggatgataattaaatgtggtttgttcttagttatttcatagaagcaaacttctttttaaattaaagaaaatattgaggaagaaacatatgtgttacctcttttatctctgaggctcagaggatccctctgatagcaatcctcagacctggtggtaaattccacacttttttttttgttttgtttttatcagatttggccttctcggttgaacctaaacctttatcaccagtcttgtgatactcactcatcaaacaaccctttccatgaatgtgaacctgtgtcaggttcaatgtctccctttcttcaagtcgtcatcatataaactctctgtgtctatcccatcccattgcttttgggattccattgcagaaggctacctctagaaagtcccaaagaacttgaatgtaagagggaggctcctgagactcaatggggatgaactcagctgaaatgcccaacaatagggatatggaagctgaagagggtttctattatcaatattttcatttgaatctattgataatctgccttctgagtttcggtcaacactgtagtttcttatcagtgaatcctgctgacaatacatttctcttccaagtggttcttctgggcagggctctttcctctgtagctcaagcctagctttttgggggtccccatctagcctaaagaatgtcttacatgcccacattctgctgcactgtggaggatgcggctctccatttccagactctgctctgccagcaacttcctctctccagatttgcctggaagctaacattaaacaaaggtctcagtgttgtctgggggatattgattgctcttgctgatatgttccctgaagtttccctcatccaagctctgctgggaaataagcaataatggaagctcggctgttaagaataggtttggttcctagtacccacctgaaggatgaaaatcatccctagttccagttgcaagggatctatcccatcttctggcctccaaggggattcatgtggtactcttgtggtacccaagggcaaaacactcatgcacatacaagtaagataaatgtaagccaaaaccaaaataagcaaatttcacagaactcaatttgctctacactctaaagacccaaggccactctgaattctcaagcccttgctaggctggactgaaagaggcagaaaattcaacaagaaatgagagctgggctgattttggcaggcacaggttttcatcacccagcccctttgcaagccttgtttaagcgactcaatccatgatcatctcttctttcctatgttttcagagctatgctaaagttccaagatagcaatttgttttattttcttttagcacacagatttgtctttaaaatcatgtgctaaaaattattactattaagtatctcttaacttaatttcactctactagtttagtgggatggctgtagcaaagtacaacataaaactttcaattctgaagtcaagcatccgaaattatgtcacccttgagctatagggaaagatctctcttgggtctccttcctggtgtctgttactttgtttggactgtggaatgtatttaactagtcttcagcttctcctggtgtgcatatcagttcaaattttgcttcttataaacatgccagatttactggtcttaccagatgatggcctgttctcctttcatataagatgattctaatttcattccctacttttgtaaatgaccatattttcgaataaaataacattaaaagggactgtgggttggtatttaaatggagacactggaaagagacacaattcagcctgtaatttcatttgctatttaacgttagccaatctttattaaatgaaattcgagtagctagttagctttattttagactttgttgtctttctcctattttcttgtttttttttttgtttttgtttttgtttttgtttttttcctctctgtgctcctattgaaatggatttggaataaagaaggagatcgaagttttaaaaaatacctaaatattttactaaagagtcttaccaggccaacgaaagtgctcaagcatatgaaagcactcaatgaatgcacttaagattgagtctaaacactgaccatagaactaaatttctgatctgtttgaactgataaagggagagctacaagcctattcttgggttctgaagaaatcctagagaaataatataagaattacacagttgaaatgatctaagaggctactggattttaaaaacatgttttctgtgtttactggagcaagtagatggagctcttgtgaactctttgcttggtgatagactctaatccagactgaccttgaagtgtaactcctctgcctctttctgtactgttggggtgacaggcttgaggcactgtggctggcacagaccttcactgctagcctggagggcagagcaatggcctagaattgaggcaattcttcttgtaatttttgagacttttatgcaccggtgctaggcaaatacatggtttccagaccaccctctctcctccacttttaagacagattttaacttttgctgggaggtagtcaattgtttgggtgagaagttgcctttatgcacatgcttgtgtgtagtgattatgaagggagccagcaagagaaggaagccccaaagcagctgtggacactctgggagcaatgttagtgagaggacagtaaagcatcctttcagatctatttaaatagtgtgtgtgtggggggggggctcttctacagtgctaagttgataaacatttttcataaaatttcattttatttattcattgacttgacccttgatcgtgtgatcacatgataatcaatgtcaaagattggagactaagatcactctgagaaaactcgaggcactaattcctactcaattttgacagcataactagcattttagaaaggttttgtgagaacatcctaaaatgttatcactgaatactgcatttagctttgcaatgctgtgtaatgagacactgttcttattgaaaaatattgtttctgtgtaatatattcagatggtgctttatcgtgttctcagctactgccccccctacacccacccaactcccagccacgtctttctctctcttcataaaccaagatactcacatacatacatacatacatacatacatacaatatacatacatgcatacatacatccatgcacacacagccacacacaaaatacataaataaaataaaaagtacaagattggaaaccaaaacatacaagcaaaagaccaataaaacaaacaaacaaacaaaaaacctgcccaaacatatcacatatctatgagataaaaggtctcgaaaaatacctttaggttcatttggtattgaccatctactggtaggcatggggtctaccctgaagtgtgcttaacaaaccacactccattggagtaggctaccttcgatttgcaagcagatagatttttggattaagggatcagagtgaatctccacttccccatgtcagggttggaatccaatctggctcgaacctgtatgtgctgctacagtctctgtgagttcatttgtgcattatcttcctgtatttggagaacagttcctatggtgtcatccatcacctctggctcttataatatttctgcctcctctttcacagaggtctatgagccccgaggggaaggtttgctgaagatatcccatctaggaaggagggctccaatatgtctccctcgctgaacattgtccagttgtaggtctctgtgttactttccttctactgtaagaagattctctgatgatgactgatcaataaatctaataacagctcatttggaggatgtggggaaacatatttattactggtggaagtgcaaacttgtataaccacaatggaagtcaatatggtatgggatccagctaaacgactcttgcgcatatacctgcaggaccctatgtcccagtcagtgatatttgctcatccttgttcagccaggctctacttataacacccagatcttggaaacatcctagatgttcatcaactaataatgaatacaataaaatacatttgcacaatggaatattactctgccattaaaaattataaaaaattctcaggtaaccggatggagctagaataaaaaaatatcctgagtgaggatagacataagacataagcatttgtcttaaagacaggaaagttaaagaaaataatgcaagccagctttaatagatccttgcaaagaaaacttgtttgaaatatgtttgatatttacaaacaaatagatatgaacatgaaatgttccgtaatcagctgaaattgttttggtatgatttgggatatctgtattccaagtggttaccattacacatatgcaattttaaaaagcatttggtgttagagactactgactagattttttaagtaaagatgcaaatgacatgatcagacactgacatcatgaaagtgaaatatatatacatgtatataagtatacatgtgtgatatatatatatatatatatatatatatatatatatatggtgttttttacttctttgtgtaatttccatgggatatcttgtagaaaacattaaaatgctatgttctagaaacaggccacatctttcagtactagttagcaatcttttatttcaaactctgagtaggagatttattttaaactgcataaaaatttaatgctgctctttggtttggaaattaaaatcagaatcagagaatccaagattgagttagtcagaaaaactggcaaggcttttctttgcacagtgacttaagcagtggcaatatttcctccagtcagggaccagcaaacacatcctttaagaaatggaatgtttggatttggtgcagaaatgggcactgagctcattcttttggagttttagtgtgtcagcagatttttttgtgtgtgtcattcaaatttttgcttattttttctgggaatctaaatttgctccttggattttttaaatgactgttggcaaaaaaaaaaaaaaagaagaagaagaagaagaagaagaagaagaagaagaagaagaagaagaagaagaagaagaagaagaagaagaagaagaagaaggtactcttgcatacaagtggtagtatgggcaatgtgctattatttaatcaaagaaaaataggagttactacatttgtaactagtaataagaggtttttcatccagtgaagatatgtcatttcagaaatgatcctcaacctgactaaatggatagatagatagatagatagatatgcaactagggtgagggtcttaagcccacacccacagtgacacacctactccaaccaggtcacacctatcacaacagggccacacctccaaatggttccactgcctagcccaagtatatacaaaccatcacagatagatagatagatagatagatagatagatagatagatagatgactttgctagatcatttgaccatgggggaaatttttgctatgcttaaaaccatatcaatgacaattcagaaagactgtaccttttaaatggggttgtctttattgaaatgaattgtgaaaagaaaataaccttaataattttttaaccaaaataaaaactaataagcaacaactcagaaaaaagaatcagcctttcttgttattttcccattgatataataaattattgaattaaaaaagaaatataaaagaggacatgactgtttctaggtatgttggaggatagaatttattgtagataaaagggattggattacccaggaaggagagacatccaagaaagtccagagtagacatcaccttgaggcaggccgcaggagtagcgcacacagtattaggtagcgtcatcgtctctgaggacccagtggcggcattgctctctggtctcagggtcagaaatatatgtgcattgcatgattatggtttggaagtacaacctaaacactgaaccatatgcacccttgcaccatgtggacctccttacattgactgtggaaaagaagcagacacatttcttcctactttgacaaactttaatccttaaacatgcagtttggacagtaatgatcaactttcatttcatctttacctcatattcctttctcccgtcattatgctacctgcctcgtgaaaactagatttgtctttattgtttgcattgttatgagcaactcagaattatttcagtattattgtacacgccaccatttttggttgaatctgcacaagagcacatcccatcgggacaacaaatgcatttcccatggctgtagcaacagattactgtgactttaataacttgaagagtgtgggaataagggattagtaccatgggcatccaatgactcgcacggggctgtggggctgtgattcttctcagagtctttgggaggaagctcttgcctttcaccctctcacctctagcccccacttgtatcctctgggttccagctcggtctgtcttcaaagccagcgatatgatgccttctttcttccttgaaatcttgtctccttcatataagcacttagcaattagatagaacccaccggaaaggccagagtgattgcatctgaaagttcttaacttaattatgcctgcaaatgccctctggcaaaaaaaaggcaacatattcatgatttcatgtttctgaggagtagaaagtaaacagcttgggataaaatatctctgaggaaccactttacaacatcagctatgacactcatttatccaattaattaatagatctcttaggcatttgttgtgtatctaccatgaatttttgtttgtttttgtttttgagttcaagaaacagggatgctatagtaaatacactcactaaatgccctcttctcagggagtcttgttctattctgtggaaaaaaatttcagttatgggcagaatatcatgacagtaatacactacactacacacacacacacacacacacagtacaacagccatgggctttggtgatcttcagaagctgtcttcagaggaatgtggaaacgtgattttgtaaggatgatctgtgaaaatacttatggctaaaatgtgaattgaagagaaattggtttgtagttaaagtcacgtatgaaagaatatttcagtccaggttggaataattatagtctgagttaacacatagcattggaagcattaagaagcagtcagtcacagtaggacaaagacattgaaaatcaccattggactggtgaggtagcttgccatgtaaaagcacttgttgccaacccaatgacctgagatcattgcccagactctgcatgataaaaggacagcaccaagtcccacaggttatcctctgaccccttcacaaacacacatgctatggcaaacacacatgcatacatgcaaacaaataaataatgatgtaattttacaataaatatgaggaatggtatcgaagctgaaaagagctggaaaaaggacaaaaagggacataaaagaacatgacctaagagttggaagtctggcagggatggggagcaacctggatatagtagaccacctgtgtcaacaaattgcaagaatataaatggtctgactacaggagcaagtttaattttaaaatttcaaatgacacgcatataactaaagtggtctgaagggtaagactcagaggtggttgtcaaagggactgtgcaagtcaaggaaatgggggcgggtaggatgttatgtgaggctcctatgaaaacatgacactgactatttagaaatttcaaaaaaaagtattattgagaaatacaagggtcaagacgactgaggtttcaaagagtattggaacattccttgagtgttacgtttttataatatgacttttaaatttagtgcatatattattgtgatttgtattagcatcccttaaggctcaaaggaacaaacaaagcttgagggacagaaagtgggatcttaacctcggaaagagaagctcaaagtagccagggtacagatggagcatctccatattttgttagaagatcatgaatttgtcacgtgctattaccttctccaatggcactcactaacactacccccatcaaaggttgtcacagagtaagaggatgttagataaaaccacaccacagaatgacagaggatgtacccacctgactccaaggaaccactgagtccacagaagaggccttggacctccctggttctttctttgcaaggtgggagaggagaccagagcactccaggcacactagagaccacacagaagttcctggtactgctgacaccagacttccagtttcctaatgttccatttttaccacttgacatcatagtatctgaactgccaagaagatcatcacttctccatgaagccaacttggaaaagtggttgtaagatggaaagctgtgggaagaaatgtgagagagaatgtgatagtggaacctgaggcatcatgtcaacagtgggagaagggagtaagctgaggagaggggcatgctggatgtggttggttagaatctctgtttctcttcaccaacataataacacgttttcctttaagaaaaaaaatatctaatctggatacagttttaaagtaggtctatacttttctttttttgagaagtaaaagtctctacaggtaaatggggagtaggtagcccaaggactgaggagctgagatcaatgaaggggtcacacctctcgttggcatcgggcaggtgcagtgcactgttaaagccgtgacagcatctgggagaagtcctattggtgttgaaaataagttcattgagttgatgttgaaagcgctccatctaatattgatgttcctgtaagaaaagacaccgaagatggggtaatttactttttaatccttcattttactctccgttgatgtgccttaagcaaagggactattagtctaacaaccagctggactgttcttatgcaggttcatctttaataccccatggcttctttgagatatctatactgaaggttgtagatggcccaggctcctgaaggtatagccaaacaatgctttttgaaattctctctattagatcttttttattggcataaagctgagtggataaccatttccaccttgaaagcctttccctgatgaaggaattactgtgatgtgtgctaagcaggaaggccgtggttattccaaaacaccagccttagtgatactgattagtgctatgagataaatgtgtgtgtgtgtgtgtgtgtgtgtgtgtgtgtgtgtgtgtgcatgcatgtgtgtgtaccatgatctgatctctccaaaatgaagagttgtgattgttccaagccaatagatttgtccaaacatcccttcctgggcagcacaaacaggccacttatgctggctaaactcagttggctgggaaacatttcttgcactctctatacttatgttgtaacttcagctcaataaaagtctttttggaatggtcttttcttgcttacattcagtagtacaagttgagatggaaacatgaagacaatagaccaaaggacaggcaggaacaacaacaggggaaccttgacaagtgactgtcggctgaaaagtgggggccattatggaggtttgatcattaaaagaggcagagtacttggaggcagcttgtcatcttaagaagtcaattaagaaatgcacacaaatctaatagctcctatcttacaatttccaatgctacaatctggaagagtccagtttgtatcctggttaccacctccatccctaacttctgagcacagttcatcaacaacttctttatgacagataaagatccagatgtgcactgttggcctgtcactaaacttgcctcccctccctctggcaatgtcatgcctgagtgattttgttctgtgtaggagccaagttcctgagctgtccactggtgtgtgtgtgtgggggggggtcccctgacatattcctccttcctgactgtagtctggaaagaggcaggagctacaagacatctggcaatggccaccaagctggagaagggatcaggcatcccttcctggttgcatgtcttcagttgcatgcctgcatctgaagactttccaatgctatctgggcaggaaaaggaagagaagatggatgaaggagagcagagagctgccaaagcccgcaaggagcctaagaagaaagcctgcagggcctgatcaccagacaagtgcaggagagcaagtcttcaaggccaaggtctcagacctcagactgagctctgacctgttaacactggtctccaccaagatccaaggatactgatactcaaaagaccttcacggggaatactcaaggccaagagctttacagcattagtaaagctaaggaccacgatgccaaggcctgcaaggcaactgtgacattaggcagtgctacttgcctgtgtctacttgctttactgatgccccacccccaaatcctacatctcctttacacacacagcacacgcacacaatcaagtttaattcaggggccagctgccctaatcagacaatagcagtgaaaaagagaagacacctgttaatatgttggacctggaaagatatttataagtagcagtcacctctttgcccatctaattatctggcaaaggacaaatactgctaccatagtcaattggaggaaggtagaaattttaatgtatgcaagatctttccaacaaccacaccagttttggtggaagtccaataatcctcaaaatagagttgggaaaaaaatctttcagttttaagtctcaaaataatttctagctcagtggccaagaacccaaagactttttatgttgctaacaacttgaaccgcccagcttccccagtgaccgatactgacattgtgactgctttggttgacttcagcagttagttgggaagagaagcatcctgtcagcctccaggagttaaagcccttctggaaatgattgtggttcatttgcccacccactagacacgaaaatagcctgctgtcttcttagaatatgcattcgctctccaaaccatattttatgccaagtttcaaaagagaaggagccacaccgggattgatttcataccaagttccattttgtattcctagtagcagtgcatggtagacaggtggatggagactgcacctcagttggcttcttctttgtcacagtttcttttctgatatgatttagctagacttgagctaaatgtaagctaactaaaaactgaacagtgggtaaccaaaggtaattgtcactgaataaccctccttcccctcagcaaatggtctagggataatctgctttatgggatagttaaaatttttttccagtgtttaggaaatattaattatatgaatgttagaaaatatcccctaaggatttttggcttatataaatggggtataaatggagataataatccaaaaataagtacccaactcaaagagaaagaagaaaacaaagaaattccatgttctataattaacttattgtgtaacagtgctcttgatcctgtccggaagatttactcaggaaacacaaaaatagagaatggagccatttaagtgtgtttgcataatttctaatcacatatgggttgttcaaggctagagaggaaatcaatgtggcacaaaggaaagacagagaggaggatatatatctcacactcccttgtaggcctggtttaagggtttttttttttgtttgttttgtttttgtttttttttttatcagattttagattccgagaggaggtatggcgggaggtggggtggaggaggggaggaactcggctctaaaagaagctatgttggggtgaacatacagtggagttagtttttattttgttcaagagcaagcagaaggttcttctcccaaatagggaaatacctgaaaaccagagcttattggggagccaccaatacagggtgctgcttgctgactagtaaatagtaaaaaatccacaggatctttgcacagatgtgatagtgttcggaagattcctggactcaaatgcactttagattagaaatcacagactaaactgtagctacagcaataaatagtacttcttcaaggtcgaaatataaatttgcctgttgcaagattcccattttatagatccatctgctgtagataacatgaaaatgtctctacaagagttgaatatttaaaattaaaattgcatgtaacataaaagtgagagtcaaataaagttctatatgaaatataattataactctgaatgcagacctttgcctatttattgcaatgcatcttaaagcataggcaatagactattcaacaaatccttaaacatttagataatatattcatgaagaatcaatgtgttattatgtgaacaatctaaaccatgaatgcatctttaccaaaataaaataatttacaaatagtaaattgaccttgtttgtaaatcaccaagaagttgaagtcaaggagtttcatttagatgataagcaacaggtttagctaccttgagctttgtaatgcaaatatcacacaacagtagaactgactgaatttaatatgatggcatgtgtacaatagagcagtcaacaaattgtaagcattattatgttacacagcacaaattagtttaggcacccacctgcaaggaacatgaaatgtaatggaggagacttatgtcatctcttgttctgctggggtttgttccatacctactacttctttatgaagtgacattgaggtgacaatggcattgaattccaacataagcaataaacccaaaagaaagtcaccttatcaatatcatacttaggaaaaaaaaaacacaaatagtaaattgtttgatgggattacctctgagacaacttttctgaaactactattccattcctttttcttttcaactgtactaaaggaaaacccttaggaatttagaagtggattttaaaggcttatatttaccaaaagattctatggctggtctaccataatatgcctaggcattctttccttagcctacatcatcctctaagggtggacctaccaataacagagagaaattgccttttaccggctttcagttgaatacttacacttcctcttccatcacatttgacatcacatttgtcattctttatatattaccaactttacttcaaatgtcccttggcacctcttccattacactttagttaacttagctcttccctctagcatattgttgctgcttcttttaaaaacttactttttagccgggcggtggtggcgcatgcctttaatcccagcactcgggaggcagaggcaggcggatttctgagagccagcctggtctacagagtgagttccaggacagccagggctaaacagagaaaccctgtctcggaaaaacaaaacaaaacaaaacaaaacaaaagaaaaaacaaaaaacaacaacaacacaaaaacacttactttttagcttttagtttcctcctataaaatgtattcttaaagactctatgtttgttgtattgtgtaagaaattaatccaaatttcagtggctttaaatactaaaccctatcatattgacaatttggaggtgggaaatccaagatagacatgcaggtacatgttctttctgggatatctcaaggagaatgccatcttcagacaccaacctgctttcctgggctcttggactcttcaagtctgatcctccctccatttgtatgattgtcatatttctggctttcatggctgtctcccttcctctgaaggacatttgtggtatctcgatgagcttagactcctcaatgacccaggatgatgcccctgtctagatactcctaatagaatcacacttgtcaactccctctgctcaggtagtccattcattgttctgtggattccagttctgcactgggcagaaacccttgtccttgtcatcacagggccggagtggtctctttttcttatatccaaatctagtctagcctagtctggctttttgttctttgtggggcactcatgacttccaagggaccaggaatagcttcaaatttttctgacctcaattaatgatcaaatatgtatgtgtgtgattttatatatatatccaaatcaacttacacagagagaaaaaaatccttacaaaataatagctgtgtataataaactgagatattttctgtccaatcctgttactttaaaaaaatgctgctgatgatgtatttcactcaattcctgacagcttacatggttatctaccacagttcaagtgatacgaccatacagtcaaattgtgcactattcaggcaaactagctgtagatcccaaagagaccacattttctcatcatgtgtacgttaggttattctttggtcctgcaaagggggcttcacctatcttcatctagtagctcaggggaccatactgacatagagatttgtaacttcccagcctagaatgatgttgctggagcgcttactacatagtccctcctcttcatctctctgctttctgtgcaagcctctctgtttccccttcctccctctcttccttcctcccatttcttgcccccctccttctttctttgcttcttgccatctctccttcctgcttataattttcctctcactcctttctctcaatctctttcttctgtctgctttctctgtctcccttctctcggagccctgtcactctctcatcacagcacacacaccatctccacatctttctccttttcatctccttcctttccatggtttcttccctctcattttcctttgttctctttctgaagagacggtcatggtagaacctaatcgcttttgttaaaaacaaagaagacgatttataggaacacgcagaaagttaacccccataaggaatcctatggagaagactattaatatttgcatattcttttccaatatccagtttcatatactttgacaatactaagtggttgtaccatagactttctacattgctttgatcctgaaggtcaagaagaattacagacctggaattgttgtcagaaaacaaaaattcaggataaccttcctggtgttttgataagcgttcatgacgtatagagtaactgaacgtgagattctacgaggaggatgaatgtaaagaatttgtagtaaagaaagaaagggatgacttagaaatatgtggccttcaaattgagtagcctgatgtacacccaagttattcgtttgtagccagacatttgtatttgcatcggtcattgtgacgtaacatcctcttgaagcagcttctcaacactaagtggtaatttagagaaattgattagttctttcaagccactggctctaaggtgaggtccataaaggacctgcttgtccatctgcatctactccaccactggagtttgactgcgcttatcctgcgctgctacctgggcaggtgccaggctgtagagaagtgctgagacacagctccagggtgggaaagcagtgtggaaatgctgcctgggaagggctggggtggggtgagggggagctcaggcttgtcctagcaagtgattgctgtccttagcttgatggaggcaggcttggtggcagttgtgtctggaagtgcagagagcccttctacaagaggataaagatgcagctctgtagacaaaggccttccccaggttcatcatagtggatcttgatgaaaagagctcatggttctgaatagtttattgttatggtggaaaatggattcataaaaccatacctaacttcttaaactgggcctaagattaaaaatcttgttgcagggagcgatgtctgggaagggaaggaagcttattggctaagccctctaggcctgcaggttcctcattagcacggagaactctgctttgcacctatgtaaccataggacacatttcttatatgtgagcaacatgacacgtgctccaagtctgacaggaagctaggagtcccgtgtgcctcaggtgtgtgcccaccgagtctccaggtctcaaccagctttaccttaccaaacgtcctggcatggttttatgtcccacacctgctgtagtttcttgaaggaatctagcaatcataggtattcaagactatggcaacctgctcagttagtcatcagtggggattgtagggattgctacttttaagatgttcctgtgcttagtaaagcctgctgatcattgcaccgaaactataagacctttaaaaatgaatcctccaaaagagctctacagggacccaatagtatcaatgtcaattgtccccggagatcaattcctttcaaaagcctcaaccaaaagaattctccagatgtgacagatagagagcttgaaatatacactactcaaccatgtcttttcctaatcaaggaaactgacaagatgaagtgaccacatctaacatctagtttttggacgatttgaggctggggaaaagagttcctggtacccagaccacagccttccctgcccttccttcctgactttgctctactttatctgaactgcctatttcagtccgctgcttcctcatgctcaatgatgttttaatccttgctactttactttcagtagacacatcttgacatcaatttctttatgaaagcacattttggtatttaaacgggaatgagctgggctatgtgataactgtgcagactatagagtgatgggacctccttggctaactgcacatgcctaggagtctgtatgtaatgtgtgacctataatgcttaagtgagcctgctgggatattctgataaggaaaagtaacaaggcctccaaattgaagtatcgtggaagcaaatgaatcctgtagccatctctagctcttgagtagggaagaattctccttatttagggagaaggttaaagagatgaatacagttttacatacagagctctgaaagatgctgagaattttgtagcaaaagatacagagaaaatataaaacactatctcctgggtatgtttgccagtgaccttcttttctcatttaatattcaaaattaatttttttttaagtctggacaaagtgaagagccattagaacagtcttgtctttccctgaatattttggttgtcatatttccagagatcaaagggggagacagcgtgtctggtgttgtgacctatgttgactctctgattggacatctgtcccagtttgaatgaggagaatccactctaatacttcaccacactgttacgctacctacaaatttgtgcaataacccctagaaactggagttgccaagtcagagagccccctgattggaaactaactgtggatttcttcttactgcactccctgtaaaagcaagcaagtcacctatcactgtcatctacagaaaggcattgcttttccatgattaaacacttctttctagaccttgcctaattttttatccatctggttatttaggattccatattatgtgttacatgaaattgaatttcaaggcacttctccggggaattttggctctcacggtcctctgagcagaaatatgcaatagcttacctatatatttcataggattgttgtttaccattcttactctataagcaggtagagcaaacttcattcgtaacaaaaattagcttctcataactgaatttcattttaagaattatagggcacgtctggtgtagtcagaactagattcttttggtttctgggctagaattttacagtgttcgtgctagctggaacctccagacatctaaaaagaattatctttttttccgtaaactactaaaaatgttggtgacaaattttataccatgaaatctggatactttaatcaggataggaggtaagatctaattggctttaatatccttggtttaaaaaaaaaaacaaaacaaaacaaagcatgttttaatggacatctacagttgtcagtaaagctaatagaagtcctcttttaaaggaaaattaagactcttatagctggacttgagcaatagagcttggcaacgtctactcttgcattaggatgcataacttaatttatcccaaagcactattacccccaatgttccctgtatgttcccctctctgtcccttcttctctttggaaaggagccccgtgattcctaaattaattaacttgtatctggtttgggagaaattaaattttacatgtctctgtgctgatgcctgagaggctattttcctgccctgtggctgggtttggccccattgctcagcctagctcttcttgctatcacagtgcccttggtacctgtgtggggtggtgcagttaataatgggaggtgggggatgctagaaagcaatattcagtctgtctctcaaatatgagaaaggctgcctatttaaactcttatggaatctctagggcaatttagataacttttagaaatctaaataaaaattgtcaggtgccagtaatattggatgatgtagagaaacacataaataagagaccaagtctaaaagcctcttgcgtttgggggtagctcatgtaggtcatattcgaaaacaaacattaattttacactaactgagggtagggatcagtcagattcagctccatgctttggagggatggtcttaagctggcctccagcatccagtccaaagtgacgccttttatttaactttccttttaaacaagttattggttcactaaatgctatactttttaaaggttcagatcttcagtcaatgatctctgtaatcagtcaccactgggggcgggggggggggggggaggtttccatctctttataaaggctatcctgaagaaggttccagaaaccttccctgtcacccttctctgtcttttcccattacaacctttccttttatttgtttgtatatctttccacaagtgggtcttctgcaggaaagagcttttagaacatattaactatcagcaaataggacaaccatagcacccttttcattttatttgagaaaaggagtgctatttaggaaagtatagccatttataaaacatctttatttgcttatctgtcatctttcaaggagtgattgttaatgactgatagccatgtcttgcaaaaattattcccaaattagagtccacattaatatttttattattctatgaagtgtctaagaatattaaaaattcaaaccacttatgagaaaaaagatactgaaaattaaacatctgggaggctgcttgtgtatatcattaattgtgaggcctgggctaactaatcgagttacttgtgacaacatatttggttgtcaaaactttcaatttctttttttttaaagatttatttatttatttatttattttatgtatgaatgctctgctctattgatatgtacacctgtgccaaaagaagacatcagatcccattattgatggttgtgagccaccatgtggttgctgggaattgaactcaggacctctggaggagcagccagtgctcttaacttccgagccatttctccaacccataactttctatttcgaaagtttcatttgatagttgaagagactaaaatgtggagaagttggctgatttgctcaaagtcaccagctcagaccccggagatgaactattaacacaaatcgttcagtcctgtagcccctttcattacccagcactggtaaaattgtcagacccagagtggccaaggttacttagagaaaatgcagattcccagattcagtgaccaagcctattcaggaagaacttctgagactgccccaccatgctgtcaaatgcaatttgtaaataaactggtgagaagggttggtctcctcctctttccctgcaaagcagaagtaggaggacaacaaaatttagtgcttgattgctaaatttttctcctggtcactcttcagcagcttgcaacatctttgggtgccaaaatccatccttcatctttctttgaaggatgatgaatttaaccaaatccagcttttatactattgcccatctgcctgcctctcaaactgtgagatgactcagcaggttgagcttgtaacctgtggcttggcgcagagggaagaacacaggggtcccagtctagccttagtagcacagaggggtccttctgctgggataaccagccagtgtggtacccagctggagatacctgggtatttcctgcagaggtgtcagctactctgctctgactctttaggcaagctatgcaggcagcagggtctgtttgaagagtaagaaaacacattgtctgccacccaagctctaaaaagatactttgcatgaaaatggtgattggagtgatagaaaactaacacccttcctggtttcccaatccaccaatcctgttgacagtaaaactgaaatgtgagaaaatgtttttctgggctgctagatgtttccggaaatggtttatcctgatttattctatttgcaatgctgtaattttatgaggtaacttttctctatgaaagccttttaatatacttaaacttttgcttatacatatgccttttattccccataaataataattttatatatcttagataacctttcttcttaatttgaagtgccaaggtggtctggtgcatgcatttaatcttaagagtagggaggcagagacaggtgaatctctgagttcaaggccattctggtcttcagtgtgagtttaaggagcaacctagcctaactctaaatgttttccatagaacagatccaagggagcatgtcccaggctgcctgagacatgctcagtctgcatgctgctctttcatatgttattatgactcaacaacttagacgagagtcctgaaggatttacgattgcctttggtgtttatatcttttaatttggctatcataaaacttcaatataatttttgaataatataagttgaaagggtcttttaaaagaaataaggtgttgaagccactcattaaagataattagacatcatgtttttgcatacgtgtgtatattcatatctggacatgcacatatgtgcatgggtgtacacgtgtgattggtgccatcatcaaacgctcagcactttatgtaccaaggcaggcctctcacttgcacacatagctcatcaactttgcaaatcagggtggctaacttgatccatgtttcccatgtctttgcttccagagtgttgggatcacaggcaggacactaagactgtgggactttcaagtagatgctaagaatctaaaccatgttctcacattacccactgagtcatttttctagacctatatcattgttagtacttacactggctagtgttttgtcaacttgacccaatatggagtatttgggaagagagactctcaattgagaaaatggacctataaggtctgcctataagcaagtctgtagtgtctttttaataattcatgattgggcacaggggatggtgccccaactggtctggtagtcctggaaggcataaggtagcaggctgagcaaatcaaagggagcaagccagtaagcagcattctttgtagactctgcttccattcctgccttgagttcctgccctgacttccgtcagcaagaaacaattacctcagagttggaagctgaaataaaccctttcctttctaagttgtttggggtcatggtgttctatcacagccatagaaacattaaataagacagcagtaatattgtttctgagtcctgccaagaatttctcaccagctggttctcagattgctcttttgcttggctttttagtgtaactcccagatgatcctgttaacctcatgttgctcacatctgcctcacagccaactgcctgctgtgtgctccatcttcccatgggccgtacatcatgagatgctgtagtggcttctatttctccagcatttgatttcacctcgctcatttcccattgtctctctttgtattttagagactgcctccatccgacgaagcttatttttaagtctttcttgtcagccaaagtggtttgacatatggaaattctactggagtcttgaactcatttaacctatcaggttcttcatttcattaaagatcatagtcatcgctgaaataaaattgagcagaagtctttagagaaatgagtgaacggtaccagccaatcatcatggtaggagttgaactgtgcatttcatctttgaacactgttctctcttcatggcagggcagatgggaagggaagagagggcatgtagatgctggttgttcctgaaggaaaaatccctttcttttctctcctcctctaggggatggatgagtaaggagtaatgttcttttgatgtatccagtttcatatttcctgttgagctctggccacctggcttagcttttttgctcttattaatgtgactgctaataattttgctttattatcttttactttacagagaattgttcttattcgatgcttatggttctactcagaataaggtgttgttattctttttttttttttgacacccagaagtttgtttcaaagggttaaaaggacatttataaaaccaccttgcatgtgtatcctaaaagtatgggaggactccagttgttctgactaccaaaccttgctttttccagctgtggttgctgctgggcctggggcatttccatgtattgagcacttgatacacacagaagcctttatgttaataaatgcttttcaatcatcccaacaacccgaagaaggtaaacagtatcgtgaattcagccagaaaatgaagcctcataaggatttaactacctgagattgtagctggtttcaggtcatgaattgaatgatttttttttttttcttcttttctagattatgaagtctgctctaaaaagtgggtttgggtttatattgcccattctcagaaccctgtgaacgttcaactgccaggcaaaatctctgcacgattccaacactgagttcctttagactaaaatgtagggggaaacatgagagggaaatacataaatgacaaacatctgtcaatgtgctcactccctggtccattctcattgtgtgtcacatggcacaaagtgggtttctgtcttgtcttacatttaaaacgaggtcaggcagagtggaaaacacatttaaggtaatgatacatgtagacatgcactattacatgtatgtcctgtaggctctatagcatcacaggtgactctcaggtcatgtggactgagtgatatgatgtgccagtataggtgcattgactgtaatgaggtactgttgcaggttaagggggctcattatagcagtggatgctgggcatgtgtgggaaaggaggtatactgagtctctataccttttgctcaatgttgctgagagcctcaaacttctattagagtgaaaaaatgatgtccatctaaaaacaaaacctcaggattattgaatctatttgaaatcacccggttttatacccagtttggcattcatattcatgttctgatcgtctagtcacaaaacaaacaagacagaataagaataagaataagaataagaataagaataagaataagaataagaataagaataagaataagaataagaataagaatgagaataagaataagaaggctttgtgaagccagtcatactttctgttcctcctttccctgtgaaggcctgaaggagcattggcagatgagaatagcccaccagcctaagcaaacgtggagtttcatctctctcctggcttctttggggcacctacattgcccttctacacaatgctggttttcagtgtaatagcttccgggagccacacaggtcactccctgaacagtgccaaggaacctcctttttctccattataacaccttatatttctcaacatttatccatggaacaagctttctgaaggtaggctaatggcaatgtgtctcagtacagctccttgctgtgatgtttattgattcaggggaatctttaaggacatatccataatggtaacctatggggatttcttttttctgcctcccactcctcaaatcggctatcctccaggtaacaactattcctattcaatgcagatcaacagccccattgcttgagtaggtaccatctatcaaccagactcttggcttttgtgaatgaaagtctccatcctttgtgaggagttgctttgcatcttagcagccaagtttaaggtaaaggcatcacagaaaagcccattactctgtaagcgtcgagcatttgatctggtgctagccttttgtgctgtgttctatgaaggaagagaatatgctgcctgcatttatgtatttatgcctcaggatttaaaaaaaaaatcgaacataatcaaaatcccactgggaagaagtatgtcaaaaagattaattaagaagaaagttaaactggaggctccctgcctttgtggttaatgatcacagaaaaccaagatggaaaacaaaatcctgagatggaatgagggaaaaaaatgcctttatattgtttgggttgtgaattttattaaaatcagagtgagtttgtaccagtatttaagttatgtttactaaaaaaaaaaaaaaaaaaatatctccgcgttccataagcagaaacatggactaaggagctatgtcagggtattattgacagcaaagtcaaagacccccctgtaaaagagctatatatggctgttcctctctgccaggaaagatgaattgccatggcaacactaccatgaaataataggtcaagttttatccttctgccccaggctgaatttattaggctttactttgaagtagatgccattgtaaaatgaaagttttggtatttcagaactaaacattatagcaagctaaatctcatcaataagatcccccatagtaggttaagagaacacttagattgattaaatacatgtttagaagctagtttattactgctcccttccacaatgtgggttcctcttacagatgtgcatgtaataaagtgtgtgtaaatggagtcacactgattgcttgcacaaggtcagcaaggggaagtggtttgtaaattttcttttaacggatgactaactgtggtaaaggaagagttcatatttcactccccaagtaagtgtgcagcaagaaagcataaaatatttaagactcctattattgtttgctattttcataagactaaatcgaatgctgcttcatgtctatttgcaggaatgaaaaaatagctacaatttgggacagtcgcatatcataaagtgagatgtgtaatcattattttgctatttgagggagatgtgttcctcaatgtccacagctatgacattaactgtttattcttaaacagtatctcaatcatttaggaataaactgctaacatgaaggaacatataatttttgtcacttcaaatagcattattccattttctaataggacataattactagaataggtaggtaggtaggtaaatagtccagttttttaagagtggtatttatcaaatcatctctttaaatgactaactttacctaagtagaacccgatactgtattttagcatcatatctttgctgatgtcgctgggagactatgtttagacttctgtgtaaggctacctttaattgtctttaatacttttctgcagtaacttaaagattgtatagataactgtgaaatttatattgtcttcacactgctcataaagatgggagatcggaatcagtggctgcattcatttcccatgaagcctattgaccagtcacaaatgggttgggccttgctctctgcagcaggagagatggtcttccctgcctgtcctgtggtctctagagagtgcctgcgattcttggcatatgtctcttccatatgcactgttccaatcccattcttcccctttacagctttcttgactctcattctgttttaataccttttaattgtgctaattatgtatgtgtgcacatgtgagtgtatgtgtgtgagtatatgagtgagtgtgtgagtgtgagtctctatgtgtgtatgtggtaggagtggtatgtgtatgcaaatgcaatttcctgtaaaggccagagctatcatatctcctggaactggagttctaggcagtttttagctgtgcaacatggtatgaggagcttaacaggtcctctgcaagggcagtatatctacttaagggaatcaaccatctctccaaccccccgtgtcttctcattttatgaaggtgttagtcacgagagtaaaagctacctaatcttgtatgacatcacatatgtttaactgcagttgcaaagaccattttctcaaataaagtcacattcacggagcctggaaagaaatcttcaaggtagcccatccataacagtcggtaaatcaaatgtcttagtaaaatgtctccatcacaatcttaaatcactatgatgcctggatctttgcaaatattttcacaatttcgatcttttaaagttctggaacagtggtgttctgcctaataaagttcttctaatgggtaaaagtttgcagggttcctatgtgtgcttcttactacacttgcttactttggtacaatttattgttctctccgaatgctttagtgataaatattttcaattggattgtttttctggattctgtcataatgatattggagatctgaccccttgctgtgacttaagttctatctgaaagcttctttcttcttctttttttcttttcttgaaagctgtttctctgtctgtccctttccccaattttgatatgtaatggtgactcaaccctgtgctttgaacaccttcctgtgccatttcaattacagtataatggaatcatgagttttgctctctctctctcaataatttaaaaaaaataccacagtgtgaaattgatgcattttaaggtactacaataaatggctttaccatcacaataaaattaacatcctgtgaaaaggagacaagatcacaagaaaagacagagagttaaacccacgggttttcaacatatctatcagctggctgttttgggaaagtggttgtcaggggtctggatcacctttctccacatctccagtatttcgaagttttcctctatgacaaataagacctgtgtgttgtgcagagaagagagcaggcctgacattctcagtctatagcagtggcattcaatctatgccaagaaagaaaagaaaactgtccaaaggtactggacagtgggtgtgggtaagggtaagttgcatccacacacaatatgtcccggacaatatgggatcagtaagaaggtagaaaaggatttaaataatctgactagtaacgaggttctgctccccagggggacacatcattctgccatatccttcattatcccttgctgtttaaagcctgctcgctgggaatttgtctctggaattgtatatgtgttctcttctttgtttcatagctacaaatattgttaactaaattaagttcattattttctgagaacacacaaaaagactcaatattagctttttttctgttcaatcagtttctatatttgttccaattatatatagttaatatccccagcatctacattttcataatagttataaaacattaagcaaaacacaataaaatatttgcataattgccaaaaaaaaccccttttatattagaaagtaattggggaggttttattcctatcattatggttagaatgtgacttctcactaattagtcacttacagtttgaatatacatttccctaatgattttaatactacttttcctattaaaaatgttaatctttcttttctctggcacagtacacacatatttcccattatgctttgcttttctgttgtcttcggccactggaagcatgtctccgaaagcttcattacaacgtttccttaattgctgaacatttgaacattcgcatttgtttcatcccatctctggatccttattttctctaataagatctttcatggggccagtcttctccttctccagagaagcgtgtgttcttgccggctttgtgtagtcacacgctggctaagtgagttatggctgccctgatgctcactctctgagcccagcctccttggatcactcttccctaaacccgtagtggcagaagaacatagaatgtggtctccaaagagagtggtaaagagaaaagccaaagtgtgtgtgcctctagtcctaaaagaatggatgaggaggcacagggtgaaccgcagaaccagttctttgcatttataatagttatcagagttctttaaatgatttgtgggtcttggagttctgatttcacttccacatgtcatgacttttgcagacaagactacctacgtttgtttttgtctcttatctacaatcttaagttagctctgacatctcaggaacaatacctttttagctcttgtttttatcctgtactgtatgagaatctctggaaccccaacacctggcttagctttggaagtgttcaacttacacagggtagatacttgtccacgatcccagccacattaaagaggaacaggaactcaagcacacattagctcccccaactcacacactaaagaagacacgctattatcatctcacagctgattaagctggcattgaactgtaaccccttaaaagcataacatgttctttttgtccctacaacagctagttattcatggacagacaataaaggcatagcaatggagccaaggtatccctctagctttaaagtacgtcacaagctaccaatttcaggttatataatcttttctttaactttatgctagttagtatttattcataaaagaaagaagggaggaagggaggaagggaggaaggaaggaaggaaggaaagaaggaaggaagaaaggatggaaggaaggaaggggagggaaggaatttttcagagtactgcagagatgacatgtgagcatcagtagggagaagaagaaacagagctaggaaggaaagacatctgtaccctgtacatcacacacacctttttgatactgttgtgactgctctggagattatcaatgtcttccttgaagtgttctgcctcatttatgagatggtatcactgttttgttttgtaggacacagcaggccaggaaagatacaggaccatcaccacagcctactatcgaggggccatgggcttcattttaatgtatgacatcacaaatgaagaatccttcaacgctgtacaagattggtaagttagggcaaatactgccatgataaatggtgatgggtttcctttcgacaacctattcttcgcacagcagtggtcatggaacaatgtgcgatatatgtttatcatgagctacaatcccacttgtgccctgagccaaggaaaagttggttatgctcagagcctttgccaggaggttggcagggagtcacactgataacctgttcatgtcagtgttctgcatctcttgagtcttcctttaataaagttgagtgtgctgctatcgacttttttgaaaatgtaaataatgatttggaagcttattgatctaacgtagggatctggaaaataagactggtgaaccaagcttggcttacatattcactaaataaactttattggatcacagctagagttatctttttgttttattatctgtgatgctgctttcacatccacaaatacagaggtaaacaggtacagcaggcaccatgtggcccacagaacctaaaccactgctctctggaaatttggacgaaacctttgtttgttccttctctggcagctctattaagtaggttattcaaactagaacactggaaaggacttggtgtaaaagcagggttacaggcagaacctgtatgactcacagctatatgaaaccctgcaaaaatacttgtatccataatgagggtgatttgcagtagggggctttctgctgtgagtccctttacctagtttcccagattagtaggaatctagaggatggtcatgaattctaacacagggctgaaaagaagtgggggggggggggcattgtaaaaagttccagaataaacctcctactggtagtgaccagggatgcttgagtagttaacacatttaaatagtaaacagccatagcttctcctataagaagtatcagactggcactaaactgcaaaaccaaacaagatatatgtttattttctatgatagtattatctactgattctataagcatatcacggtctgagtttggaaacttgaatttgttctaggttgtttcttgaaaatgcttactgttcttctgggaagacatctacatctgtcacatacagctgcgcacacacacatgcacatgtacaatacacatatacacacatgtatatacacatatacatacacatatacgcatacacatatgcacatttttgtgtacacaaacacacatatatatgcacacatccactcacacatatacacatgcacatgtaaatacacatacacacgtcctatgtatgaggtaataccattgacaacagtaactcaaaaaagaaagtgttataaatcgttaaaagccaactttagaacctgtatgaaaagtagttatccttcacttgagagatatagaataagacttacaaaacctctttatagtgaattgactattataaaaatgaaaaatttcaaattagcctataaattcaaggtaggcccaactaaacaccagtaaaatggaacaggatagaaagtcaagagacaaacacatctgtatgtgggtttagttcctgataaaagcagcattgatatttgtgtccccagaggaccattcagttaacagttacatgatatttgcctaacggccagccatggctgtggttcatatattgtcctgcaaaacagtgatttcgatatcgactagtctactagaaatgtggggagcagtgcaaggacacagaaaggcttcagacttaagttttcatacattagcgttctggtgctatttgttcatagctccgcttacacagttgtttcagtgagatttattccacctgagagagcatacacacatacattgagctcattaaaaagaaatgccggtagcagcaccaggagccatacagtcaacatttctggccatactaccaaggtgaaacagaaatggtcagcctctaccagcctgagcatccctctgtggtcgaatcagctgaatgtcacactgaggcttatgctactcacgtgtaagcagacccatttatctgcctctcctcagcctgcctccacctcagagtctctagacaaccccattcctccttctgtctttctgagactctattccctgtcttccacatgacacattttccaaattcttcttctctctcagatctctcttcttactcctcctaggtaccagtgacattttcctgtgtcctgtccttggtcgacttattcactcccatagaatcatttataatttagatcagatggctcctgaatttaaatcgctgaccttgttttgcaaatggctgctgcattaccagatactcaaaatatctatcccacctggatcccctcccagtacctagaaggtttttatcagcacccgagactgcttgacttcctgacataattcttgctcattgcaatggactgcatcattcagggttgaccatgaatccagctctgtctttctccatctgattcatgaccagtgcaggcgtattcgcttatttaacacacatattctttgacatgtctcctgagtttgccttccttctttgtccacctttgtttagttcctaattgttgtattttgttccaaccctatttgaagtcttctgattttctcaatttaatttttttttcttcctcaatccatcttaccccttggttgcccatatgatcttgaagttcccagaagacccctgtcctaaagtcaaagttcaccatcacgtcctgagttggacctttcccagcttgcctctcagacatactgcatcatgttattgctgtcactctgtgacatcatttctctgccttctagaggaaagctggaactactggttctggaacctagcccaaacattctaaactcttatcatttttcttttatgacttttttggttttgcatacatttttcctttagctctccgttccatctgtctctgggcatctagatttctccaaagctgaagagtaaacatgtccatctggaaaaccactgctcctcacttctttgtctttcacccagagttatgtaactattagtttgttggggattgtaattagaattcattgagccagcagtccctgagtttctatcctgatagctgaaggccagacatgcatatgccaacattttctatcttagtggatctgctggcacccagttaaatgagtcaggtctaacatcttagtcgtttgcttattgtaccacaaggcccactattctgactttctgaatacctctcaaatacattccccacctttctctctactctcattgacttagttcaaatcatccttcgaggactttctatcttgtctctgttcatcttattttaaaattttactttcagtaacttcatgtgccatgtggcaaggattgtggaagcacaaataaatcacaatgaaggttcaagtccagacttggacccactaaaacaaatcacccacgagaaatatgaatatagcttttttttcaaatttctataagtgactctggagtccgtttctcactgagacattgatgaatgaaatccatcatctacccttcttggcatcctctcctaacatgcttctccatgtattttatccttcccaaaagagatctttaaagggttcatcaaagtttgatccttttactatgtctgctcttctgcccagaatatcttcgctcaaagcattctgagtgtttatgcatcttctcagccaagcccacgaggcacttctccacagctctacaatgcatccctacccacttcctatcccatctctgcttgtggtagttagtgtactatcaccctcatttctgtaaccatactacatttgtgctttcccagaacacatcaataaccttcaagactattgttatctgagtacattttgctcatcaatcacgtgttgagtccactaactttctcccagtatcaaatatagtacaatgtatatgttttcgtatatttttctaacatgtaaattgtgacaaaatatgaatagtaaaagttcgccatcttaattattctgcagtgaacagttcatttgcattaaaacatctacaaaattgtatccaaaattataaagttgcaacacagtgttaggaagtaaaatagtgctcttttaagagctggagggaactgatagtatggacaggtaattgttagctttgcagttgtcatgagtcttggaaatgtagggcatctctttaatttggcaggtcctccattctgtagcattaacacagaacaaaactcactctgagctcaaatataaaattacctatcatttacaaagtttcaaaattgacacaataaattaagcacgaaggatgtttgcaacatagttaataataatgggtcaacagaataattcttaagaattgggagagaatgtgtgtttagattgtaaggtagacaccaggaagaagagcccatgtgctaatgtttcgctggtgtaggggaggtggaatgaaacagaagtaggagaggattgttcagtcacacagcaagagaagacttttcagtaaaaatgtgtggaatgcattcaaaatgcaacctgaatccccttgcttatacctgcagttcgttaagtggtagagacaaaagcatacagtggcagtgtggaattagaaacagggataccagtctttagagaacggattccacttttgttctttcattgaaggtatcattaagaaataaactaacaagagatgtgccaaattaagaggacccagtagattaaatagttacagaaattaaggcccccattgaaagcccccctcactcttgggagagcttttcagatgtcttgtgctcagagcatcctttgagtctcagttgggtcttgacctccaaaacctacactatacataagttcccagactcttatggaattctaccacagtggctctcagaacctacacatatcactgtgcattttaattttatatagaaatctgtctcatctgtgacttcacatgtttccattcaaaatgtgacacggaccacaggctgctgtattcctcttagaaaatgtctttgcttgcaacacccaccctcgtcttatttatttacattctttgttttatggtacagtgaagaactataaatataaagggttctttttaaggcaagaaatctggagagcagacggatttttcagcaccagactggggataaaagtctaacaccagcatcccaccagttttaaatagttctttctgtgacattcgggtaccgctgcagatgtgctagagtttgaacagaatgtcaccttcaaatgttctcttcctctgtggttttctcttttcctttgccatccaaatatacttagcaaccgatcttaaggagaccttgtgttagtataaaaacattttcaattaaaataacaactaagatccggtgagcagctgctaggatttttgttttccagaacaactcattcctcttgaatgttcttcacaacttttaaatcatttttaccacagtccagaagggacagtggcaggactacctgcaacttttaccacagcccacactagacctcaagctgccttcttcctccatggatactaatggccactgtggctacctttttttaatccttgacctgacttatctgtagaacattttccttatgcatgctaccctacttaatctcaagttgtactcagaagataaatggctgcctaatcaatccatggccctttccagatcaaacgccaacaaaatccaagcaatcatttcctacgttgtcgtctgcatgttaattaacacctgctaaaacttgcgagtttcatcttaatttctcattttctcgggtcttacatttggcccttcaaaaggatgcatgtttttatatcttacactgaagtttgaaatgccatcttttccctttactcacagttattccatgaagacttgccataagcgttgaattagctaattatcactgagctgtttcgtaacagtactagcatggtggaattaagaattccacgattgtagcatttttccgagtgattactaacgatggatcatatagttttctaccaaaagacattttatttaatatacattgttgctctgctggcattgaaatcctgaccagtggatatgctctctgtaactcatgcctggaagacctcgtgtagcatatgtattgtctctgtactctctgtgactcacggcaagacccatcacatccttgtgctcagaaatcccaggcaatattccagcaatatccttgaagaccacttgagacagtcacgcaagcaaacacagtcgaagtcacactaataaagtataaatcgtggcaacaaatatgatgcggaatatgtttgcctttatactataagagctcaaacaagaagacaatgtggtcttactcactgtcagctaaaaatgtgtgcaatggatgacttagagcgtgctggccaccatctcaaagccataagtaattacaaccagtaggattttcataaatcttcatactttctgccattcgtagtagatgactaggggcctagcacaggataccacaaactgaatgggttaaaaagaaaataaaatgtgttgtagaatatctcctgtttgtgtatgagaactcttggtcatcaaatggtgattctgtttggagaggttgtggaagtgagaccttgcggcaagcactggatcaccggggactctgactggaaatatcttcttctttgctgcttcctgtctcattttatgcttcctggttagaagtgaaccactctcctctgccacaagctcctgactccaatacattcttcccaagtaaccatctactgagcagcctgaagccatgagcaaaactaaatcactgcttctgtttctctgtttctttgtttctctgtttccccctctctctttctccctccatccctccctctatccctcgtaccaatctgctttttaaaaggtcatagtcttgttgcaatggggcccaccttaatggtatcatgttaatttaatcactcataaagactacttctaaattaaattatattttcagtattgggcttgtaacttgttcatcattttaaggggttcagtagggaaacaccgtaactccttgtgcactgctgcccctgactttaccctcataggttcctacctgggttcctgaaaccatcttcctggactccttgcttctactgtccgttctccagaatgttctgggaagagcaactgcagtgagactgccaaaatgtaaatggagtaaagccattcctccaatccaatcttcatgccatctcctctccccttcattaaagccaaagtctttattacagccacaagtccccactgtccatccaattattccaccagctacttcccctgtctggaagcttgtctattcataccagtttttctttttctttctttctctttctggaatagaaaaaaaaaaaaaaaacatgtctgtgtctcagagcatgtacatcccctctacaccacaaacctggaagtctctgtcccaaatagcggtatgaaccctgatgactcgtttatattcactgtcccatttccttctgaggaaagtctttctctcagtctcttcacacaatttcacactgtgactttctgcagaagtccccaccctgtctctctgtttcccatttttctaatcctctaaaccattttcagttggcttgcttgccatgtttcttaactgtatcctcatagtacacggaagattcttgggacaggactctttgtctctcttatccagcagtgtgttctctgcatttatgtagttcctagaatacgcacactattagagaaatactggttaagtgaatggacatatgattgacagaaagaggaaagtatgcctgtaccttcatcacattgtcttcacagggcagcccagacacagaaacaggcatgatgtgttttctatgcacagttgatgacaaacaatggaaataatatcagtgtactatgaagaaagcaaaccaatgctctcagctcgaaccacattaagaggtaatgaatattttgccttacctttaccccatacaccgagactcctgctccttccaaaatatgcatggaatatttgagttggactgccttatcttataaattttattactgagattattattttgtttaaaatgggggtatatttgtaaacaagttagtataaattaaaagtacaatacctaaaggtaaccagaaatgtcacctcagcaatgggaaatatctgttcagccctcacagctgaaagttaaaaaaaaaaaaaaaacaaaaaacaaaaacaaaaaaaactttagctatttctgttttgtcagcaaattttctatctctgggatgcagtgtgtgtgtgtgtgtgtgtgtgtagcacatgcacattgtggagagatgacatttattcagacccctcttcctttctttgagaaagagtatttcgttgacctggagtttaaccaagtaagctaggctggctggctagcaaaacccaaacatccctttgtgtaatcaaaagctgcaaaaacactttaccaactgtcccatttccacagctccattttttttttcattccatctactagtcatacttctgacttccaatgagttggacactgatataaaggttagctctaagaagaaagaagagagtgaaacctcatagcagagatgtcttaattaagaatttcatttacctaatactacttagatcaacgaaatgaacttgggtttatattctggtcacagagggtcatatttgtgtattattaaatacaggaaagtgcaaatagcttgtacaaattagcagttaatatgctgactgaatacaaaagaagaaattgggatcaagaaaaatacctatcttgtatgactctgttttcatatttaactaatctaaactgtactttgcaagtgttaatattctctaaatagtgatgctaagatggtgactagaagctaaattttggtgtgggtctaataatagacacagccatattctaattaggcaatataatgaaatttaaagattaaacctaaagacttgaactcttgaatgcagagtattacataaatatgataggtagtcattctgcttcacttacaatttaaaaaatactttctaaaagctgctaatgtacaggtttgtgtcatatttttataagtatcagtgttttctagctgatttccctcagtctctatttattacagtatgtcttctttaaaatatactgcctacatttcacaatatcttaaaacacagtaactactgtaataaaattgcagggaggaagttgtaatgaagcctgttttcagctatgggtcttcagcttgccttgtggctattcttgctattggttgccatttaaacccaatctctgaggttgtagagaatcaacatgcctagaagatagtatttgagatgcgaccaagaatggttcatggttcacctatgacttacttgaaccttttcagaatctttaggtccatcatggatatatttacacacacacacacacacttacttcctagcctcagggaatatattttgtattgcctgaaaccttccaccaatcctcatttttctcagcccaaccctcagtataggagcagccatgacaataagcaatcaacacaaacacccccaaccttcttcaagccaggttctcctatctgcctaacttcaaatctgtaattctgtttgcaaactgtaggacacttttctgtaagtggggaattctggaatccactcgatcctttattgttggtgtagattaggtcttttcttttctgtgcagttaattaagatagctctcctaattaacaattatatgagctagccccttccttatcatctctctgcagaaaggcaaaataaattaaaactctccaaaagaaaaaaaaatgagaatgatagggcattagttgtaggtggattgattgcttgatcaaccacaaatcaaatggtatgtgatacacgatcccattcctttcagacagagccaatagtgaatattttcccatgatcatcaaatttcaagaatcaggttacaagtatgagaggtgataagcagcccaaccgtgtattgtctctgccatcgcaagtgcaatctagtgaggcccataacctacttctcgcctgtaaacatcacagtcactggtaaggtagttccccctctcctgggatagtagaaggtctgaatgctttctgtggtgattttcagacatatttttggcctaatacccttagcaataaaaatctctatctacttagagttagccaaaataagggtccatgctcagttttccacactttggcctcacttcagacatcagccacagtcgagctgccctcgcttcagactgtttagtgagacatttggagtttgcatgacttggctttaataattccctagcgtggctccaggaacctgggaaagtgctaggcttgttattggtttgtcattttgaacagctacaaactggaagcagcccaagagcgatgtgcacacagagatccagaaagtttcaaacaccaagctcctgaggtccccaggggtggacacattgagacgtagtgtgtgtgaaagtgcacaaagggctgacaaccagggagcttcactgaagcctgggtgtccggtgattgtaagtttcataatgttcgtgcagtgaatgaatcaagggccacatggtcgaactccattacaaatccaccctacctgttcacaagtatatttcacgtgactaaacaattccaactgtttatatatttggccttcctggcatggccagctcccatgctgggtcatctcactagggtgggaatttttagcaaatgtcagcaaaattctttgtgattcaatgtctacttatttaattgatatatgatagatatattctgtcaattcatgaggaaaattataacaattaaaattgatttttaaatatttaaaagtttataaatatctaatatatatattttttaattcttaaatatttttaaggaatgaatcaaaactgggaatggttgctttccactcccttgtgaattaccatgttttaggaaactgccccgaacaactcactgaggagctgtgtgaggttgccataagcctggcagctgcagcaagcaaaacctgctggcctctcagcattgactcccatatgtcctgcccctgactttccttcacactcacccctattgctgtcccagatcactgatttcattgctgctaaactgaagcagagcgctaaagccaatgtgacagggtcattttaatgtgccctcatcaaaatgcttaggtctaaatgtcacgataggccctttttctttacaaattgcacaataaatattttgaccctctcttgcatccataaccccagctctgaccaaacccattccttctccatctaacctcgaattctgcaagatttggttaaacatgacacttttttttgacatatttctcatttcagcagttgaatgtaataaaagctagttgtgcccccacaaactcttatccaacacttcatagctgcctatcaaatacgagagcagcttgaaggcttgctacagttgaaaccattttcttatcattccatttttgataaattgtgaattttaaatgtgtgcattaatatggtaatttatgcaaatcctcgcattcctgttttatattcaagacacaagtcctttcagagctgatagagcagaattccatatctatcaccttataatacgcacttgaaacgcaccaaatatgacttaatttatgtggctagataaggaagcttatcttaggaaaaattttccctaggctgtagagaagttcttttcttttttaacttccaattttaaaaccaacaatgacagagaggaagggtgataagaagaagagaaagagtgaagtcctggcgaggacagagctgtttgataaagctcattttaaagaaggaaaaggtgaatgaactgggtgtgagcactggatccatggaagagagctgtgaaggcatcaaggtttcaccaagttcccttgcctgcaagttaaagaaacaacaacaacaacgcaaatgctgtgtcctttgggggatctgacagtatctagtctttcccaaccttatttgatgcaattaaaaatgggaacagagttcctggcctacaagatgactgcagggaatagagagagaactctaatggagcaatgcacggctttttagcctttgatctccatctggcaggtactgcttcatcagagacctacagaggagcacctggagagcttccaaagccatggctatcttctgtcacatcagtcactagctctgcaagcgcaactccagcccagtgacacttacaaatatctctccatgtgattataatgttgggggtcacattgaaaaatgagaacttctctcaaggcaagttatggtcaagtgtatcacgattaacagtccagacctatgtggagtcttaacctctggtatagccagattttgtttaacactttgtttctctatctctccagccaatgcattccagtaaggatggactcttactattaactatttgtctgtgttttctaggcagtctgtggttcacaaagacacttgggataaaatttggacaaagatcaaatctttaaaccagcctatgtggggcaggagaattcacatacaattggtagatgttcatcatcaaatgcagggcatctgctgagatcccagcattctatacccaatgtgagaaaaccgtatgactgtgttcaggggcagaatcaagtaactgccacggaaaggatgcaatggttagaattaagttgttctagtaaaggttttgcacagtatcacctctgcaaaggttgccaaactccagtgactgtctttttaatggaaatgaagacagaaaagtaagtgattgagaaaatgtttctgcaggcctggaatgcataccagcaaacaagcatagttgtgtgatttatgcatctccagagttgaacctgggatgaggttcccactcacctcattggtacctagtagctcattttgaaatgagaggtgatatttaggaagtagataccctataatgactccaagtgcctcgaagaggatggccaaccaggccaacagctgtcatccaaagtgacgacagttgtctgagtaatacgggtttcccatcagaatgcagcctcctcacctctgctctcttccccaccagctgaggctcacttcttctgtttctcctccctctgtaatgtgttgaagtctaaggctattcgccaggcagatattccttaaatacctgcctttcctatcttcagaatcagcggcttcttattgttctcttaacgatgtcccctatatgtcttctccacttatttgattctttctgatgtgatcgttgttccctcgaatcaattcgtctgcagagctggctggataggaataagatttatctccgtactcaagcatctctcaaagactacttagtaggtactcggttttagttcgattcatgatgagcaactgaatgaatataaaaatgtctgtgtccatcctcacccacgttctctaaacaacatgtcttagctgatagcttcactactttgcagggactaagtaagttaaaacagttctctgagtatatatatttgtgattgaattgataaagtagataggaccatgacactttaaaatccttaaagtaatctccaatgcctaaagggtttagacatttaacatttttttttttgctcctaactgaggttaggagaaaaatcaaacaaaccatgcatcttcattttacacaaatggccatcatccccctgtaactcctcagtgtccctggaaaacctggcagaagctggaccttgtgacattctcagacagtccactccttcctcacatccctaagagctctgcctacatgtgggccttttagaaaaacaaagtcccccctgaagggaaaagactggctctcttctgaatattttaatagaagtttggggagcagttggcagaaatggtcatagcaaatgtatgcatgcacacactcacagctacatttagatatttcaagaggactgtgtgtgacagcttgagctgagcattaaggagcttgatttatgacttctcattagcagccactacacatccatgcgctccagcaccatcctgcataataattaattcatccggaaagtgcatgtcctacatctaccaggcagagccacattggcagctgcagaggtaactcacacttgagctgagatcaagaatccccttgtgtggtactgaaataggagagtctccatcaagatgcttcaggagtcaaaggcgctaacagatttgcaaaggatttcaaaactgcagagctgcaaatatagagatatttatgacctcgcagttactgttgatgttaatcttgtcgatttatgcgtgccgatgggagagatgtttgactggttagttgcacttgactgttaaattgccctccaggagactcacatcagcagtgggaagaggggaaaggagcctgaagatggtgacttttttgccattagtaattactctgataggaacctgcagtactctactccctcccaggaattaaacccacccagagtagaaaggactctcattgatcagtatcaatgatggagcaacatcaacttctcagtaaaggtttggccaatctgttctaagggcagctctcagagagcaatagcacatggtgtgatatcttacaaatatttttctttattttttattggatattttctttatttacatttcaaatgttatcccctttcctagtttcccctccaaaaactccctattccttccccctccctctgatcaccaacccacccactcctgcttcctggccctggcattcccctatactggggcatagaatcttcacaggaccaagggcctctcctcccattgatgatcgactaggccatcctctgctacatatgcagctggaggcatgagtcccacacatgagtcccatgtgttttctttgattggtggtttagtcccagggagctctggggatactggttagttcatattgttgttccttctatggagctgcaaacccctttagcttcttgggtcctttctctagctccaccattggggaccctgtgctccattcaatggatgactatgagcatccacttttgtatttgtcaggcactggcaaagcctctcaggagacagctgtatcaggatcttggcagcaagcacttgttagcatccacaatagtgtctgggtttggtgattgtttatgggatggatctctagttggggcagtctctggatggtcattcttacaaatattttaataatgttgccaacactacaaagtcaaaacacaaactcggattcaatggaatttcagacaaatactgaataagtacataacattttcttttgctttctttgggaagtgatcatataagaaaatattcatctgtgctccatatttaactggatattctgtgctttactaggtaattctagtttctagagacctatagataacatgagcatagtgaggaattttaaaaaagcactcactattgcaagtttctctataagcttctcattccgttcttgctacaaaattttctactatttatcaaaatattaataactctgaaaaagtatatgaatttctgaatactacagtagaaaagtatcacaaagaaaatggcatgacatgggttaatttcttttatgcaccaagaccccaacttttctctctttcaccttctgtcctctcccattctctcaccctccccttctttctctcttttgttcataagtagatttaagtgtgtgtgtatgattttcatctataagtctctcttgttcccagtagaagtctaaaaatctttagcttaggataactaagataactaaaatctttataatcttaataatactcagcactgagccattcactttgtaactgcttaacaattaaaaaaaattatctggggcttttggagatttgcttttactatgaagatagactagctctgaattcacgaaccacctgctcatcagtctaaatgttgaggtcaaaagcatttgtctctgtgcttggataaatgtgatatttattttagataccagcaaacagtacaatggagacctttaaatagaaattataaggtttaaatggctctaaagggaacttgctattgcctatttctaacgctattcctaatttaagagtccatgtttgttttggacacttacagattacatttaaactctgcttgggtaagggaggaggtagactacgtatactgtcagcacatggggctgtgatgttaactgcaccatcaacaacagaaaacatggaaggaattggttggctccacgcttactgataacgcagtagacttgatgaaatcctatcctacatgataagaaagatttcaactggtaaagctctattagaccagtgagagtgatgtgaaaacacagaggaaaaaaagagaactaaccctcccaagaattgagtctatgaattttttaaaaagacttatttattattatatgtaagtacattgtagctgtctttagacacaccagaagagggcatcagatctcattactgatggttgtgagacaccatgtgattgctgggatttgaactctggacctttggaagaacagtcagtgctcttacctgctgagccatctcaccagccctgaatctatggatattttgtctctgtgcttttgtgctttcctcccaactaggctgagcatttccaagatgtcacatacaccctgcctcactgctgagtgtcaccattgtcagattagtgcccgatgcacagagtgtgcgataattactagtattcaagggtcattactggaaagtcacctgttactgaatcaggaagcaagtataattacttgggtctctaaatttggaaagaagtgtagctctaaattttatcctctttcttgcctttgtctagtgatcatgttgtaagtgtgcctgtcttctagtacttaggtttcatgataggatatagtatatccaagatatctgttccagagtcatcagaccttttttaggaataatcttctaactgtccatcaaagtgaagctccccattctagaacagttacgtggaagtagctagacatagggactatattccctgctgtctctcactcctcctaggttcacatgatgagttctcccctctacagaacacagagaggaaagtgatataagctagtacctccattcttctttctcttttactataattggcacaaaatcttctattcaatacagtaaagattctagggccagatgataagagggaccagtgtttctagtcagtctcctcttctagccactcagaaacactcagccaagacagtaggcacatagggaggacatttctactgtgattgtttactctgaaaatactctcatttccagtattagcttctttccattccatacccatccatttcactttctgccatgtcgtcctcacccattcatggcccgcagagcacacatttctgagaccttggaaatagaaagaggcattagttaatgggtttacaaaagaaacaggcatgcaaggacaaatgacaaagggatgtattaacaatacagcagtatgagctgggcggtggtggcgcacgcctttaatcccagcactcaggaggcagaggcaggcagatttctgaattcgaggctagcctggtctacaaagtgagttccaggacagccagggctatacaaagaaaccctgtctcgaaaccaccccccaaaaaagaatacagcagtgtgaataagtcactctcagcaagtagcagatattgctttctttacaccaaatagaagagcgaggcctcctagaagagtcgtcgcgagaggtctcacagagtgaacatggacatgagatttgttatagctatgaacaacagtttttaccttctagtcatttgcacaagggaagagaaagttgtgctatcgcatgaaagtctgcacactcaccagaaataactttccaatgttttacttgaaccatttttttctaaataagattttcagctaagtttctcaccaataatttattcttccgttcctattactgtatctgcattcacactctttaaaattagaggcttaaaacacgtgattcttcagtccatctgcaatttgagtttgcatgtgaaaacaagttttattttcatctgttatgaatttatgtttactaatcagcacttgtttttctatgaatttatttcatacagtgttctaagatattaaactgtgaattttgtcacacagttttgacagctagtatcacagagcaagctccttactgtttgtctctcttctcaatgcaatgctctttcacgaaccagttccccagagtcattagtttacaaatagataaagttaatggaacagaattaaaggatttatgaaaaagagcaagccatatagcagatgacgtctacttcttgtttcagtaagagcttgaagggcagccatcacattgtgctttatagctctacgacttcggaaaaacaattgcatgatagatgtgtcaaacggaattattctcagaccatttctccacatgtcagtaactttaagaatacactaggggagagtttcattcagtaactgttcataagagttatttaaaacttaataaatatttattagaaatcattgaaattcttaagctaaaagaggtttaaaaagaagaaaaaaatgtttgtctgtctttcttttaaagaggctgggtgtaggattccactctgggctcttttaatatatatggaaattattctatcaatatcatcttcttaatcaaactgtaagtctttcacttttgaccttatgtagcttatcataactcatgcattcatgctaaaaatttaaattagttaagatatcaaactggtcctacatttagctaaatgtttaaaatgtataacaacatttatagacattggctattactgtttgtggggttgtgacaaaaacaaacaaacaaacaaccatataaaaccaaaaccaaaaccaaaaccaaaacaaagtggaatcatatttgggacatgaatctgcaaggccaaattgaggcatgtcagccttagctctagtaacagctcatgcttgaagacacacagtaggcatctacctttgaaacgatttgaagtggtcttgaaggcacacagtaggcccttctctttcagttggttggaaatagcatcaagcatgagccacacagtcagcaaaggagctcataagggaccatgagtctcagtcaaggaggccactctaggggtcaggaacagagggccagggctttagatggaagctaggtgtggtatgcagaggagagacattaaagaaaaattgataccttagttttacactttgtccaatagaaccactgcttggtaaacccaacgggcccttgaaattctccaagctcttttggaacctccaggccagttttgaaagtgctttgaaaacactgctttaccctttcttagaaatgggaacaaaacacccatagaaggagttacagagacaaaatttggagctgtgacgaaaggatggaccatctactgactgcaatatgcagggatccatcccataatcagcttccaaatgctgacaccattgcatacactagcaagatttcgctgaaaggacccagttatagctctctcttgtgagactatgccggggcctagcaaacacagaagtggatgatcacagtcagctattggatgggtcacacgacccctaatggaggagctagagaaattacccaaggagctatagggatctgcaaccctataggtggaacaacaatatgaactaaccagtacccgggagctcttgtctttagctgcatatgtatcaaaagatggcctagtcggccatcactgcaaagagaggcccattggacttgcaaactttatatgccccagtacaggggaacgccagggccaaaaagggggagtgggtgggtaggggattgggggggtgggtatgggggacctttgggatagcattgaaaatgtaaattaggaaaatacctaattaaaaaaaaagaataaacacacaaaaaatatttgtgacataaaaaaaagaaagaaaacactgcttacttcatttgtggtaactattggtattagtcacagccgaagctacaggccttactttcactccccaggcctgtcatttgctgaatggtgcttctcattgtttctcaaaatgaaaactgccctgttggtaattttaaatagagctgtaggtggatgattgaaatacctgtcagaggataattgttggtttgtcttcctttgatgcctctaaagccttgccttttcaattctctgccttcccagggccacatcaaacaaaaggacctgggttttaatagcaataaaatgtgagagaaaataggaaaataagctctcagaattgtgtctttttaatcatgaaggagttaaatgtatttatagctctagaattatttttaagctgataataaaatgtttgcaaatattcaatttttcttcttgaactcaaactacagcatatttttaaaagataaattctggataactgtgtgctgaaaatcacttcttgaatctcctcagtaatgttcaatttcctgaactgcgtaaatatttgataagaaaactgttgactaagcaatgtcccctactgggagaaatgtccgtctcagttctcaaaatattattgctacaatgtaataagaaatctgtaattcagtgcctggaaggagcgtggtattgacccctaattatgtacaagagacttggggacacagccagatatgaaaacaaacagaacagcttcccaagggaaaacccttgatctgagattgctttggggtagactcagtctaggacaacatcgcagaaaatgcactgaatcaagtgaaggaaaaaaaaggtttttgtaaatacaaaggcactgggcatttgtgtatgctcatgctgacttcttacctctattaatttatgacttcttatcagttatgtcaggtaatggagattctcaatagtcattccttttgcctgatcacaaattgttggttactgatgacctaactcttgggttcaatgtcaggtaagaaagaaattacagctttggaagaatatacaaagccctgaaatttctataactatatttctcaattttattattttttatccactgcttaaaatgtagatttattcataaatttaaaatatagtacattatttgaataatgtaatcatatacaaagttgctaaaagattaaattatggaaattcgcacacccccatctgaaaacagagctattgataatataaccacctatggagactcagactaaacatttcatggctattgaaatgtgatccataattttaagatgtcaggcagagttgggtttagcgaggtcctttaaatgtgcaaatagaaaaattttaaagttacaaaaaaaatacgttgctattgaaaatgtggataatcggatgttttgagctcatataaacttcctccaaggttcataaatattcattgactcaattagttatttgaagcttaagctgctcttgctgaacgaaaataattatctgctaaggtgggtattctgtctagaggctgcacttattttgaaatatgtgaaagagattaatggctactatcagtgtgatttttctctgtgtggaggcatgttgaactgaatcacagatttaattatttttcttttctactttaagagagaaaagagaaattggggcatatgctatttcttaatccataaatgtttcttaaacagccacttcttctaaggttttaagaaatgtccagtaagttcctaaccctttaatagagttaaatataagcagctcagaatatagtattaccagagctttcagattgaaatccagtggaaatccttcagtgtagtctaccctctctgttgctacttgtcttgcaaggagagaagaaaaccccggatgggcatcgggaaagcagcaggatgaacagctgagaccagctggaaggatttgcctctagtgaacccagcagctgccactagaagaagaggggacaaggaaacccctggataacttgcatgtaggcagaaagcaagagggaaggactcagagacaagagcagtacagggcagagccggcagcaatctgtggtgtgttgtaatgggtatggagtgactgtcgtgggtccagctatggctgagtctgagaaaatgggagacagactacttagctcacaagtaggacctataacttatcctacctttacccacagccttttacacactccagctgtggtccagagagatggcttagctggtcaaagcatttgctgttatagcctggaagcctaagtttgatctccagcatccacagaaaggtaggaaaagagaaccagtcccacagagctgcccccggctctacacagattcacacacacatacacacacacacacacacacacacacacacacacacacacacacacacgcacacacaccatcattatcatcatcatcatcattaccatcataatttaaaaatgcaaatgtttcagcttttaatgaagtagacaggaagaaggaatgtcccattggtgggtcaggaatggccatttttctgccggggtcttggagatgagacaagtcttaagtagagacttaagattctctcttttgaaggaagagtgatacatgcaagatgctttaggagatagctatcacaaaaagtttaagttctggcacttacaagtttgctttaacctcatctctgttattccaacatgtccaatgtcctccatgctgatccttgactgtgcaatgcagccatcttggtcatcataaccaccttgagacagggactcattctatttctattactcctggttcaagaaaccttcttgcttcaggctccatagtatttaggacgaaagatgcatacaaccacacccagctatatcattaccagctatctgtgccgttattaaaagttacctggaaactgtcaggcccagaggcacaagccagtagcatcagatacataggggctgaggccagaagataacaagtccaagaaagtgtggttttcagactgagctcaaagcaagcctgagtgttagtgtcattctgattcatattttaagtgagacaagctgtgagggagtaaaagggggaggggtgaggcagaaggagactgtcacttaactatttaaagtgattgcgatctagatagaatgagtagaggggagacgcatcttattgtggactttgatggctctttttggttttgcctttctttgattttaagatttatttgattttcgagtgtgtgtccaggtacccatggaaaacagaggtgtcgtctcccccgagctagcgctacaggtgtctgtgagccaatcaaagtgagtgcttagaaatgaacttgggtcctttggaagagcagtatgagctcttaacatcctatctcctgagccatttctcggccctaatttgacttttgttaacccaggtacctggcatatattaggttctagataaatgcttggcaatatgtagagagataatggccagtttccctgtcagcatgaataaacctacagcccagtggccattttggtaaagaagagaccatgcacatgaaatgttagcctcttcggggaacctacattgagcatggtaataaccaagtatatatgggtgaaaactatacaaaaagaaagagtggtgagttatataagtaacgtctcatctagcatttatagtgaggccccctcctcctttattcccgcccaatcttgggccactcagaagcatcaatacagccaaattaaaatcctgtgctccattttcttatcagattgcttttcctcctcataaatcaatgagacccttttttgtcagcctcacttaaattgaaggaacactggggagagaaaccagaaaggaaagcagcagccatgacatgtcaagactgctttaatatacaaaacagaagttaagtaataggaccctgcagcctttcccaaacatgcacgaaactccagaggaatggtgggcacacacactaagctcataatcaagagcctgggctcccaaggaggaaaagcatgtgggtgatttccagacatgacagtgacattgcctctttctgacttctttctctggggcgatgcatttgatgtcctgcctggaggtcgtgataagcctgagccaatctgacaaaataaatgcttacctggctacttgtaatgaacgtttccttttaatctggtgatgcttctaatctgacctgggttattgtttcataaggcacgacatgcctgcgtaccatatcgtgatgggtgtttgtgttttgggtacaattatagactgtaagttattcataataagcattctgaatatagaaatgactctctctatggggttctgggcagagtcctgtgtggcttgggatcaggcctgtgtcaggtttgtagacagacaggactggaccacagctgaaagaactatgaagactgtcacactgagtaggagagtgtagctgtgctgtagaaagcctcctgcctctctttggtgatggtattgtccagacagaacatctgggcatctccactctattccttcccactgtgcagtgctgaacagcaccttgtaacccaagaactgctaggtttataggccgctggatagcatgctatggtttgcaaacttttatagtaccaattttatttcactttgacccttcaaataaaaccaactgtaagggtgccaggacagtttaaaaatttaaaagacacatgaaaattgcagataaaatagtaaactgatataagtatgtttataaagtggcatttaaaatatttattaatacattttgacatatttatagctttttttacttaaatggaaaaaaataacattcatttatctttaacccagaaaaactcgttagcactctgttcaactgctttgagattcatttattttccccaccttattacacatagacacacacacacacacacacacacacacacacattgtgtattgtactattaaccagtcagtagtaagtcacatatattatgggctgtaatccccaactgcaatgcatatttcctaaaaacacagatattcccttacttagctttggtggagttagcagctttgctatggctaacagcaataagttactttaatctgtcttttacgttcctctgccactgcaatcagacgagccagtggtgtcctctgtagcatcctctcctctggggcaggactcagtctgtactcagatattgtgcttgctcccatgtcttttgagcctaactcaatacacatttctccatcttttctttcactcttccaacattgacattacagacattgaatttcctctcagcttttgctcaaataaatagtcctcagttgggtttgtactcttggaaagtggcagacatgtggctgcgtcctttagcatatcatgtctgggtacacacaatggccatctgcccctctttggtgatgctaactttaatcaccagccaacagaccttggattttcctcaccatgtcattactcccctgaaactaataaatagtctgtgggagacaggtcaaagacatgccaaggccaagcgactcattgaggtttccctgtaacacaaacctcgactgataaatctcatctaatgccatcttcagtaaaacttgaaaaatgatgatatccccattccaacacctccgcacttaccttggctctcacagttctgtggcatgcaactggagtgtttgttagctattatctatataaatcgaagaattttctttttcaaatttgtaatgcacaaaaaaaatttaagtgagtgatttatttactcactctttcagtaaatatttattgagtttctacatatcctaagtactattctatatcctgaaatacaatacagcgcaacaacaacaaaaaaattagaatggatgtttccttgcgtggaggtgtatatcttttatctgtatatagatatgcaaaggcagccacaatccaattattcctttttacatgtttctttggaaaaatttgttccatttccataatcttcttccaagtgaattgcagcaacctcatgaccaggacgagaacacattcctgtccttgcttccgtttaggatgccatgtttggatttgacaggttcaatccagtgattctgtgcaagtagcttcaacactgagacgtgaaagacaaaatagataaacaaagaacgcctatactatataactcaccctctcttgttcaataacaaaactataccatgagacaggccgtgaaaaataatggcagacacgatatacacttactgtcattagtgtgtgggtttgagtggacagaaataaatgaatggaaggcgccctggtttcagctgctacaatagtctctgcaaggttctgagggacactctaaatggagattctcaggagtgatagaaacagggcagacagagagaaaaggctttctaggagaagtgaagcagatcctaaaagaatgctacaaatcgcccacaccctacaagctctcctcagcatccccaggcagcactcgcaaagtcacaagggaactgggcgaatagaccctgattccataatccaccccattcctcagtgtctgatccgcagtcgtcactcaatgagtatttacgcaggagtgtgtttgtgcatagctaaaggtattttatcctcacaacaaaagatcatcttaactaaatgttgaaggggtatcacttcaaagtctcaccgtattaaactatttttgctgatacctttaaatttcaaagcacattacttatgcccagaagatccaccccctcactcattagaattttccaattaactgaaagccagattaacttggcttggttcatacttatggtcaaaatttcacatcatgggtattgattaattagtgatgagtcatttagcttataacataaaccacacggtggcaaatttccaggatgaaaattaggtcagagaggagctctgctccttattaaaatggcactgctggggtggagctaatcaaagcagcaaaaggaattgaggtgctagtagttctctctctctctctctctctctctctctctctctctctctctcgtatagacaataaaccatcatgacttaatgcccagctctcttccttcttatgtgttccccattcatgaatagaccatttctattcactagttacaacccaccccacaaaaaaagcaccatggtgcgtgtattagtcagggttctctagagtcacagaacttatggatagtctctagataataaaggaatttattgatgacttacagtcggcagctcaattcccaacaatcgttcagtcacagctgtgaatggaagtccaaggatctagcagttactcagtctcacgcagcaagcaggcgaaggagcaggagcaagagctagactcccttcttccaatgtccttatattgtctccagcagaaggtgtagcccagattaaaggtgtgttccaccacaccctttaatcccagatgaaaggcgtagcccagattaaaggtgtgttccttaaactcggagattcaatcttctggaatccatagccaatatggctcaagatcttcaaaccaagatccagataaggatctccaagcctccagataagggtcactggtgagccttccaattccggattgtagttcattccaaatattgtcaagttgacaaccaggaatagccactacagtgcgtaagattagcatggggtgaacttttacatcaagaggattgggtgtttgtgcagacttttaaactgctactcgttgtctacagtgcctatgtagaaaagccttggaggtttggaaatataaatataacatgagttccaaggtcaagatgcctgtactcagttgccagtatgtttggaaatacgtcatactcttcctcatgaactagaaatttaaaaatggctatgcaataaggctgttgtgatactaagcaagctcatatgtgtagtgcacttgacaatgactcagtaatggtttctaagtgtcactgaagcattatcattttatcattaattaatttatttatttactttacatcctgatcaagcctcctccttcctcctctgctcccagtcccacactcacaccacccttcccccatttctccctccctgtctcctcagagaagaggataaccccaatgggtaccaaccagccctggcatatcaaaccacagcaggactaagggcatcctctctcactgaggccagacaaggcagccccgctaccggaaagggatccaaaggcaggcaacagagtcagagacagctcccactccagttatcaggggacctacatgaagaccaagccgcacacctgtgtagggggcctaggtccagcatattcatgctctttggttggtagttcagtctctggagtattatcattctttaaaaagggattttcaaaagtcctacactaaacaaaatgttgcctctgatcacccatgcctattcatgagagcatttctgttaagcaagcagttagtctgtgctcccttcttgcctggtatatgggacctagactatgttgtataattgcttagtaaacacggtttacaaccaagaaatgttagttactgagaaagcattttcgctagcccactatggcttttctcttttaggtgattggcatgcataatgtgacctcatttctgcctcctatgttcttctggccagctaatggagacacagcatggatgctggtgtccaacaacttcctacagcaggccaaatcagcatgacaggcagtggaagctatatgtttgagtcaacactcccagtcagagagatgtagtaattaagcattttagttttccagagagagccagcattcgcggtgttttaagacaggtttcagaacagcaagtattacagacactgtgcaattaaatctctggtcaagggattagactgaatgggggagagtggagcttctttcttcattgttttccccttagacttccttgctaatcaagtgctttataattgtcaacatttttaatctgaaaaataaaggaaacactctattttgaatgttttgaggggactggtgtgatggctcagcatttctgatcacttggaccccttgcagagaactgaggtctggaaccctcttctgtatcaagcaagtacaggggtgcccatacatacatgcaagtaaacaaaaacaaagataaatagatcttaaaagtgtttttaaaggcaatcctctggaaaagctcaagccgatctcagattaattattctttacctactagttttataatttgtcctttcattaccaacaaaatttatatacttgaattactatatgcataaatgcctctctgctaagttgatgctacttgctctgaaaaataaagtaggtcaatttaaagaatcttgtttgatgtacaaattaataccttggtttccaaggtaaccaatcatctctctagaaagcccagctcagctccacctcctttttcctttcaaaggttttgttaactcttttcatttcttcatgtgcgcgcacacgtacacagagttcaagctttccatgaagaaatgaaaagagttcacacacacacacacacacacacacacacacatacacacgcacacacacacacacacagaaacacacacatacagaatcacacacagagacgcacacacacagaaagacacacagagagagaagcacacacatacacagaagcacacacacactgaagcacacacacacacacacacacatagaaacacacacacacacacacacagaagcacacacatacagaagcacacacagagaagcacacacacacagaagcagacacacagagagaagcacacacacagaagcacacacacacagagaagcacacacatacacaaaagcacacacatacacagaagcacacacatacacagaagcacacacacatacagaagcacacacaacacacagaagcacacacacatagaaacagacacacacacacatacagaaacacacacacacactgaagcacacacagagagaaaagcacacacatacaaagaatcacacacacactgaagcacacacacacatacagaagcacacacacagaagcacacacacacacacacacacacacacactgaagcacacacacacacatacagaagcaggcacacacaggtactcacatgcacgcatgacactatttaccttccatcaagggcaaaagataaaagatacaaagttaaatgtgtgcttattgatctttaagccatctgccacagctgtttcattatcttctctgcctttatgtactataaatgatgaaaagttaatgccgccttattgttcatcagagcaaacattaattttgtatgaactcccaggtaactgcacttgggtttatgacctttctttgttcctgtttgttttgttttttagagcttagattttgaagcccagttatatgtcaacaataacaatacttaataaaatagtaatatcttcttgctttgtacactgaataaaatattagatacatttataatgtttgattatacacttaaagacaaacagaatttatttgaaatgaattttaccctaaaatattatcattttaacatgtagttaatataaaattatttggatattgtacactttattttgttccgactgtggaaatctggtgtgtgctgatacacagctgttagttggggccagcaacagtatatgtatcctctcagcagacaaactaaggatggccatttcggacagtggggctctcagcgtggtttttctttagaactgttactatcaatctactcctgggacacttgaagatgtaaaatatcattttacaatgcgtctttcctccctgaacaatagttcataaataaaatgctggttgacttcctaaatggaagatcttgtttttaaattttatgtacactatccttttgatgatgtttccaagcaaaaataaaccatctgaggagattatgatatatccttccttattgtcacataaaatagagttttctgagaaaagttgaatttatgatttctacagagatacaaaagaggaaatatatactagggaatttattcctttgatatgaataaattcatatcaaaggaatagaaccaggcaggcattcagactagttcaaaggaaaagccaaaccaatatgaatttatatgttcagacaaattacaggttataacaatttttttttctgcatggagaaaaatctattaaactattgctaggtgaatctgacgtgagagacctattgtttcatgcagcttacagttataaaatagttcaaaacaaaaaggtagacagagctgtaatcccgtatccccaatgggtgctgtagataatgcatgtcttcccactgaggctgagatttacttatacatagtaggataatccttttaaatccaacttgtacatagtctggttttccatgtaaggccacccaatatgcttcagttctgttcattgacaagtcacaggatacaagtgcaggctctcgaagtctcctttcaataataggagtcttggaaaggaatctctccaaaagcatgtttttacctagcctcctcctacactgatgcagaagcacaggaatctcagaaacacacgcactcacgcacatgcgcacgcgcgcgcgcgcgcgcacacacacacacacacacacacacacacacacgcacacacacgcacgcgcacacacacacatgcacacacacgcacgcgcgcacgcgcacacacacgcacacacacacacacgcacacacggacgcacggacgcacacgcacacacacgcacacacacgcacgcacacacacacacacacacacacacacacacacacacacacacgcacacacgcaaaaggacagagtgacctggttcttcagagattcctgtgctcacattctgtatgtgctccctggacagttccaaccgccaggacttatcagatagacgtgaaatggttttcccctttcctcaccatagaaaatcacaatgagtagccaacatcaaagtaaatggagagaagctggaagcaatcccactaaaatcagggactagacaaggctgcccactttctccctaccttttcaacatagtacttgaagtattagccagagcaagtcgacaacaaaaggagatcaaggggatacaaattggaaaagaggaagtcaaaatatcactttttgcagatgatatgatagtatatataagtgaccctaaaaattctaccagagaactcctaaacctgataaacagcttcggtgaagtagctggatataaaataaactcaaacaagtcaatggcctttctctatacaaagaataaacaggctgagaaagaaattagggaaacaacacccttctcaatagtcacaaataatataaaatatcttggcgtgactctaactaaggaggtgaaagatctgtatgataaaaacttcaaatctctgaagaaagaaattaaagaagatctcagaagatggaaagatctcccatgctcatggattggcaggatcaacattgtaaaaatggctatcttgccaaaagcaatctacagattcaatgcaatccccatcaaaattccaactcaattcttcaacgaattggaaggagcaatttgcaaattcatctggaataacaaaaaacctaggatagcaaaaagtcttctcaaggataaaagaacttctggcggaatcaccatgccagacctaaagctttactacagagcaattgtgataaaaactgcatggtactggtataaagacagacaagtagaccaatggaatagaattgaagatccagaaatgaacccacacacctatggtcacttgatcttcgacaagggagctaaaaccatccagtggaagaaagacagcattttcaacaattggtgctggcacaactggttgttatcgtgtagaagaatgcgaatcgatccatacttatctccttgtactaaggtcaaatctaagtggatcaaggaacttcacataaaaccagagacactgaaacttatagaggagaaagtggggaaaagccttgaagatatgggcacagggggaaaaattcctgaacagaacagcaatggcttgtgctgtaagatcgagaatcgacaaatgggacctaatgaaactccaaagtttctgcaaggcaaaagacaccgtcaataagacaaaaagaccaccaacagattgggaaaggatctttacctatcctaaatcagataggagactaatatccaacatatataaagaactcaagaaggtggacttcagaaaatcaaataaccccattaaaaaatggggctcagaactgaacaaagaattctcacctgaggaataccgaatggcagagaagcacttgaaaaaatgttcaacatccttaatcatcagggaaatgcaaatcaaagcaaccctgagattccacctcacaccagtcagaatggctaagatcaaaaattcaggtgacagcagatgctggcgaggatgtggagaaagaggaacactcctccattgttggtgggagtgcaggcttgtacaaccactctggaaatcagtctggcggttcctcagaaaactggacatagtactaccggaggatccagcaatacctctcctgggcatatatccagaagatgccccaacaggtaagaaggacacatgctccactatgttcatagcagccttatttataatagccagaagctggaaagaacctagatgcccctcaacagaggaatggatacagaaaatgtggtacatctacacaatggagtactactcagctattaaaaagaatgaatttatgaaattcctagccaaatggatggacctggagggcatcatcctgagtgaggtaacacattcacaaagaaactcacacaatatgtattcactgataagtggatattagccccaaacctaggatacccaagatataagatataatttgctaaacacatgaaactcaaggagaatgaagactgaagtgtggacactatgcccctccttagatttgggaacaaaacacccatggaaggagttacagagacggagtttggagctgagatgaaaggatggaccatgtagagactgccatagccagggatccaccccataatcagcatccaaacgctgacaccattgcatacactagcaagattttattgaaaggacgcagatgtagctgtctcttgtgagactatgccggggcccagcaaacacagaagtggatgctcacagtcagctaatggatggatcatagggctcccaatggaggagctagagaaagtagccaaggagctaaagggatctgcaaccctataggtggaacaacattatgagctaaccagtaccccggagctcttgactctagctgcatatatatcaaaagatggcctagtcggccatcactggaaagagaggcccattggacttgcaaactttatatgccccagtacaggggaataccagggccaaaaagggggagtgggtgggcaggggagtgggggtgggtggatatgggggacttttggtatagcattggaaatgtaaatgagttaaatacctaataaaaaatggaaaaaaaaaaaagaaagatcaactagtaatttccaatagaaagcatttgtttccaccctgctgaacatgatgagtaatgtagagaagatggctaaccctatcatcctagagcacggagaagttctgccaaacgcttatttttatttcctttgaaagtagaaaaaaaaaaaaaaaacacaacaacaacaacaacaaccttgggcagcagtaacatgagctgacatttgacctcgacaatttggtagaacctgactcccaaatccatgctgaaaggatgcaaatgtattccttcaaagagcctaagagcatactgtctcctaggctgcaccctcagccagaagattagagggtccagacaaggagaaagcaggcactctgcatgggcagaaccttatgctagaagcaagcaacccgcagtgtggctcctgcgaatagcatccctctctgtggggagtgacaggccagagggaggaaggtcttcttgtcttcagagtaagcacttctctcttagtctgtcagtcttagcagcatctacttcattctgtctgactcctctctgcctttaacaagctgttcatagtaacctgtacacacgtgtcatacccaagaaaagtggctagaatctaggtcttcagtttggggactttcagagtgatccctttccaagacttgcttgatttaaacaaaccaaaaagcactaacgcctttcacctgatactaagagaaatgctggcttgcagacttctttttttttctttgatacattatcacagctggtgcctttagattaagagaaaaccgaagtatctacgtgatttatacagtttctacaagaggcaaacgctttgcaaagagcatgggcagccattcagtgaactgaaatgaggaaggcaaacagacttcaagacattgtccaaagcgattcccctgataactagcagatttgcaagcagggctgagaggttgccaggcactctggctttattctgttattcatctctggcaggcaaccagtcacccaaccccgagctttgtcctagatacaggttccgttcattcattcttccaataaacattcacttggcccctgctgtatgtctcgaagggatgcaagcagcaaagccctgtgcatttcaaatagggaaatcatggcttgcggtaactgtaagggaataaagccacagagatatttgagtgaaaattgacaaatttcctgttttgtttttgtgaggaagcatctcgagcatgtgagaaatcaatatgagacataggcttagggatataagtgttctgctcctgttttgactgtcacttcttatttattcagtggatttaaaggactaaggtaaacaaacattcatatctaccaagtgtttgctatatcccaggcatggttccagaccctagagacaacaccgggaacaaagagagatattggctcttatagcttagtaataagagaagaggaaaatacatataaaaataatatggatggtgacagacacacagaaacttaaatgacagagtcatggtagagtgcatccaatgttgctatagataagcttgccctgtacagcctctgtggaagacccacatttaaggagaagtccaaaggacaaacaggcaaccacagggacagagggttccaatgtaaagtttatgcaaaacccacatggtaaaatcctaagccatgaatctgcagaccaatacaaagagtgtggctggagcagatgggccaggagcaggctgggaccagtctcagcagaaaaaagggttcttccttgactatggtgacttgtaaatgtctaaagaacttgcagggaggaactagggaacaagcaaggcacctcagctcacttagatgctcaaagcaaaagaaggggctctgcttcatctctgggccatgcatcctaaaagaaccccagtggcaccacagggcaaagtttaaattaaacatgtcctgtatctggttttataaatgtgcttcctatatttctgtatagaaggcgggtcattcattgaataaaaattgccaagtttctttagtcccctggggacaaatgtctacctgggggagcagtggacaaataaataggtgataaataaatagatgttagttagttagatagttagttagatagttagttagttagttagttagttagttagatggtggagataggtagatagatgatagatagacagacacacacatgcatatatacacacacatgcacacacacacacacacacactacagtacccgttggtaatgaataccacaaggtaaatacaattgaataaagtcatgtgcctagagaccattttaaacagggtttgcttgagccatggtgtcaagcagctggccatgtgaagattgcaaactgttggaagagcctcccagaaaaacgtggtagcaggagtaagacatagagctcagagcctctaagcacaagagctagaagaacgccagccactggtgggtagcagtcaagaacatgctatccgagctcataaggactggaacatagggtaccaaggtctaggggaacctttcatccaaggttgtctatttataaggaatgtcaagtgtctgagttctttttctgagactgtaccagaatatttaaggctggataatttctaatgaaaagacagttactagctcacagctctggaagctatggcatctgaggtcaaggcactggcctctggtccgagccttgcagttgcattaccacagggttaaagacaaagggatgagcgtaagagaggaaagctactcctgcaggcacttagtgcaatggtgtaagcatatcagaagggtggagccttcaacttggacacctcattatttctccacttttgccacactaggaactaagtttccaacatacggacctgggagacaatggaaatcataagtgaagattttattttgttgagctcattcccactactctgagaataaaatgtggaagtccagcgggtcagaggaaagcaagaggctaaggaagaggcacaaactccagctgagcgtgatgtggtggccactagaccatatcggctataccagaggaaaggacggggacttttcaagttgtgagttgagagtgagtcagacaagactgagaattccaagatctaggcaggaggtgatgctatgatgaccctgggtgtgtggtgggaacatcctgtgaaggaaagacagagaagagatgcccgtggccatgcgaggctccaagtagaggtggcattccagagtgtgccttgggcagctcagttcacagtttcagatgaatgatccaggcaggtgttgaggttcccacttagattagagtgtgcagtttaggaagaggtcaggatgagagatacaatatgggagtcatccgctctaaaagtgtgcaccctggagccgggcatggtgacgcacgcccttaatcccagcactcgggaggcagaggcaggcggatttctgagttcaaggccagcctggtctacaaagtgagttccagggctatacagagaaaccctatctcagaaaaaaaaaaaaaaaaaaaaaaaaaaaaagagtgtgcaccctggggcttcctccaactaaggcaaggtgtatgacacaccctcgtgcccattcgtctctggcagagtagatgaaagctacattcgaccaaaatagaaataaagaccaccctcacaataatgtctttaacaaaacaaataaacaaacaggagagatggagagagagagagagagagagagagagagagggaacatcatcataatttgacttgatgcaaggaagcttctaaattctaacttaatctctcagcacacaattttattagacttagaccttttatttctttatgtttttatgaccctgctattcaatttggcttcaacataccttcaagcagaaagagtggtggcgaatgcatattccctttagagaattctaatcatctacaaattcttcaagatatgaatttacggttaatattctccatttgggaataccagtaatatacaaagttttgatcaggctattcctaataaaatatgaatctctgaagtgtattaatcaaaaatagagactaaatcacatcctcttatatcttaaaatccattcctggagaatcaatcttgacacaatcttgattctgaaaatcactgggtactatgaaaatgcaatctagacccattgtgacgattgtcgttgtctttttgatgttttatgccatctaattattcacttcaacacaggataatattataaaagaataaaggtgataatagtgtggtctcccctgggtgggagctgtttagttagtgaatatcctaactatagcttcatggccacctcgtgcatacatgagcaatacacacctgttaggtatcatctattgataacacattttctaaatcattgtatcaactagcatacaatagaagtgcttgtctgtaacccataaattatattggcaaagaatatgaataatcaatagagcatctcagaaccatgctggattcggcagactgacgaaatgcaaagtctcaacctggctctttgggcctccctgtaagccttgggcttgctttgacgtagctggcatcttccctcagatgttcctattttttgagggatttggaaagataaagttgactgagctaatttaagagaaaagacttaatgagtggcatttagttagagtttttaaagatgtgacgtctcctccgacctttagcaggaagagtagaattgcaaagttaccacatgctctactgtgctcggctgtctagccagaatatgattcataagtgatgttaattggatgatgaaccacaattgtttcttactgtaaatgtaccattttattcgttcttggcatttatatcattctcatagaaagtacctaaaaataaaagtcaaatgcttcggaaagcattgccttccgggaaaaaaaaaaaaaaaaacctcacaaacatttgcatcacagaattatacattcgtacttgtgttataattcaaaaacatttaaaaatacttcattatatagtgaacaaaagggcttctgtgttatctctgaatgtgcataggcagatttccagactcgcgtgccaccgccatgatctgtcagacatgaccttgtcttctagagggcaacaacgaggagaacacagttagcaaagttacctggcaattgctgattgaagaagggacagtgctagaacatgatgcatggttacactgaaatatctatctatttaataatccatatgaacatatttacacctatatagcaagctatgcattcaaggaaattccattcatcgggtaaaaagaattaaactaaattcagtacattcatgtacaaaatgcttagtttgattaattcataagttaaaggttagactttgggctgtagagatgacacaggaggtgagagtgcttattgctcttccaaaagatccaaggttggtttccagcacccacacagcagttctaggtaatccagtgccttcttctggactatgcaggcactcacagacacatggtttttacacatccatataaataaaactaaatcgatagacagatgatagatagatagacaggcagacaggcagacagatagaatgaacaagcaccaaaagaacttttaggaatctaagtattcattcacagcactattaaaggttccacttgcagggatggtttttaaatctgtagaaatcaatggagaatgatgttcaggacaggcatgggagcagagattagagtggttgttcgtgtgaatgtctgacgctcagaattcttccttaagaagccaagaagttggaacatcagaatgcttgccggagctggctgtgtctattcattgtcaggacaccagagcaggcaggagagcaaactccttcttcaggtattgcctcattccttgacctcccatgaaagcacgcttcagcatatgcgcttggacttctactattccagacacctcagtttccatatcaggttagaaagccataggcttactgcatgcactcaagtgcaatgcgcatattcacagacccagtgagtctggggtgaccatgtcaggttcaatctaggagggaaggcaacagaggcaggcattttacatttcatgcatctccttatcaatcctgaatttcatcaacataaatgaccccccaccaagagaacactatatacctgggcaagtggagattggataaagtcctaagagggtcaggccaatatggaactcattgatctggatcagctcaatggcattgcacaaaccattcctttggtaaagagaagtgacggggagtgggaagggaaccgatgggcatataagataacatttcttgatggctaaagtgtgtggagcaatgtctactggatacagttcattccagagtcttgggagttttatggctgtcaggcaagcaatggcaaggtgaaatggcaaaggactgttaggtttagggaatgatcgcttgagtacccctctctgcagtcatcccaccacatacttgcctaacaatcctcaggaccaatttattccatccatctgcttttctctatctactcccaggctgcaaatgctgctcgggagaattggattcctgtgccaactggcacaaggacagcctcagctgtccctccatgctactcggcagtctttccggttgctttaaccacctttcatttacagtgtctacaacagctgttcaaagtctttcagcttcccacaagcttcctgcagctctcctttctgctcgctctcagccacccacctttctgctgctgtagggaaaatggagggcaagacctctggtcctgagtacccaagatacaaagggatgtgttggtaaggggctggcagcaagccttctccctgttttcataacatgctaagagaattctctttccaccagtacattctcgattccttctactttttatccccccttttgaaggattaagctctgttttttacacctctagttctgtacctctccttctattttctatgttattgccaatgcctgtctgtgtctcttccagattgtacatgctattcaccagtgtatgctagggattcctgtctgcactacgtaaacattgggagtggagataagatacctgcccattaacgaggggaaagcaactcatacattaaagggaggaaaataaatatgaatgcatgtgtatcaatgccttagaggggaaaaatgaaccaagagtagggtagcgtgtactagggagggagtggggatccgactgtcagagaggggtgacatttaaactagggtctgaaggaacaaaagttgtagccagctggaaggtctgcactgaaatcaaaggagcagctgctgtgaaggtcgtcccagtatggcagaggagcaaggtctcagtgtcactcacagtcagcaaggatcccacgatgttaaagcacagtgcagaggcatcatgagccttgtggaccactttaaacaaaccttgtactctggagatgttggtaagccttcaccttttctctggagataatcctggtaagctcatgggaaggaatgattatgacccgatagatggcagagatctctctagttcatgtgctctgaattagccaagtgatatataaaaaaaaagatgcaaggatcctggcaggaggtgaccccagtcttcaagagagggtatgtgcaccctgtctcaactgctacatttctcagtcaggatgttcctctcaacaattccttatttgatccaatctattcctttctccttcgtaccctccttccaccttttctcttctttcctttctctttcttttcctcttctttacttatttgtccttacaagggaatatccagtttatttctttactacctttctgaagatactctaggctaagattacaaatgacctaaccaccaagtcccagaggaaagtgtaagagttcagagttcctttatgatagatacttcagggatagagctagtcctctggtgtctttcttggcccgttaaaagtaacattgggcaggaagctcccacctggcgggctctgtggccatggcaaccacagaggcttcatctctccatcagtacttcctttgagcaggatttggaaactccagtcccacaaggctggaggttaagagagtgagtgaagtgcaaagagattgagccggctgagggttagatcctctcaccagccactcacaggtgccgtgtgaaaagatggctgagagctattgggccctctgattgtttgagaaaagcatgaactctgaatgctgttctatgtagtgcctctattttcaaatggcagcaactaatattgaaatatgtttatggagtagggacacttttactatgttaagcctacccatccctaagcacaagagatcttttcatcttctgatatcttcttcaatttctttcttcaaagatttgaagttattgtcatacaagtctttcattggcttggttagagttacccccaagatattgttgatatttgtggctattttgcctgcccttgggacacttttccttctcccactgggttgcctcgcccagccttggcatgagaggttgtgccttcttttatggtaacttcttaggcaatattcggttgatatctctgggaggcctgctttgtttctgaaggaaaactgtgttggtttgagtaagaatggcccctacagacacatgtgtttgaacatgtggccatagggaatggtactgttaggaggtgtggccttcttggaggaagtgtgtcactggagctggattctgaggtcatatcctcaagttaggcctagggtggcaggctctttctgctgcctgtggatcaagatgtagaaattgcaactccagcaccatacctgcctgcatgctgccatgcttctcaccatagtgataatggactgaacctctgaatctgtaagccagtcccagttaaatgtttttcttgataagagttgccatggttatggtatctcttcatgtcagtaataacttaagggaaaaaactgaggagagagaagggagaggggaggtgctgaaggggatagaatgggaagagtagtggtaggagaaactgctgtcaggatataatggatagaatatgtgaaagaatttaaaaagatacacacacacacgcggcttctgaacttaacatatctaccctgttctgattagttttatgtcaacttgatatgaactagagttagctgaaaggagggaacttcgattgaggaaatgcttccgtaagatttgactgtagggcattttcttaattagtgattggtggagggagagcccagctatgttgtgggtgataccatcctcatgctggtcgccctgggttcaggaagatagctggatgagcaagccatgatgaacaactcaatatcagcacccaaccatgacctctgcatcagctccttccctgtttaaactcctgtccagacttccttctctgatgaacaaatgatgtggaagtgaaagccaaataaaccctttcccccacaacttcttttggtcatggtgtttcattgcagtgataggatagactttactgttaagcttttatcattaatatcctgagtgcctgggtgctcctacacttacctcaaattcaatatagataaatcttcagtcttgtgcacaacaatccctttttctgtcatcaatgttgttcacagtagtaatagtgtgagataggtgatacacaaacagggcatcatcaatacaggctttccacatagaacctatctgatcctttgcttatcccactgccctgcagtcctacaaggttctgaagcatgggcagtattctttaaccaaagtccttccttcactgtggtcattttcagagtctcccatagttagagagagggggggtggagcttaagttgtgctattatggacatatgtgttgctattttccacactttattgggcaaaactcaaaagtgtggtcccaaaccacctacaaaaatttaggaagtgatcttagctttggaatttctggatgttctgttaactccaacctttgagaggcagagacagaaagatgctgagttcaaagacagcttggacataggaagacttgtttcagagaatgagagttagagtgattgactatgggggcaaggggagccattgactatgatcagaattcttagctatgctggcctgtcacctgaggtagaaacacaacaacctcaactctattaccccttcataggcctgcttcagagaatcccagcatcctctcctcaggacctccatactcatcacttgttgccattttgatgcagtgcctctttgctcacttctttctgcttgatccagggtaaggaccactttagctagtagaagctgaggcatctgcagatctcttctttaatctcctctatgccttacctggcgtgtgtaccagaatcctgtcttcttccaagtgttatatgttcccccactgtctttgcctagagtgctcagcctctacaacctcaaaaggtttctcagagaagcaagacttatctcagatattacattttcaaagaagctctacaaaatgctttacaaaaatctgtattgttgcatctgtacatcaaatagcaatttgtgtatactcttccattttagtacatttaacatttttatatgtgtatatctctcaaagactggaaatttcttgaagcgaaagggccacgttttatgcaaaattctattgagtttaaaatcccttattttttgttcaaagcctccatgttgtggcggcttaattgatgcttactggttaaatgaatcgatataatgcaaattagaattctgtatttctacatttagaaaagtcttaagtcatcattttcctgcctgacagaattttattatctgttccctccaaacctcccagggattaagagaaaagattaacagcagcattttccattagctaagttagcagacattttctctgaaggttatatagaatcttgcaataattcctcagctgcttcataacttatgaggaagctcaccagcattgcgcattccccgagtgatcagctttacaaactgcaaatcataacccaacggcagcctttggaaagagaaccatctctccaggttatctgggaattggtcacttcctcttcttcctcttgcacagtggagccatgcccttatgaacaagcaataaaggccagtgcaagctaggagtcctgactaatccaactgttcctgagtccaaaagctaaagacaaggacaagctctagagaggcctagaggattcagattcctttctatttcctgtcctactctcatggaaaaatcaagaacgcacgtcaacattaaataagaaatgacgttgggagctcagtcttgcttgccagcttctctaccattcatacccaaccagagctttaagacagtgagttcaacccatatttccctatatcctacactgagacttctctcccacgttccctgtgtctgccaggctcgtggcatttctgctcagatgatccacaaagaactctcattcagcatgtccaaaaacaaattaatcatcctcacttctaagtctattgtgagtcctctcttgcttgcctggttaattgtaccatcactcttccgttcaggcaggatcgaaacccagggtcatcactgacagctcttgctttccatcagcagcaactgtgtgctgaattgtgctcgcgcctctgctagagcactgagagcatctcatgcatgtttacatttttatttcacattttgctttatccgatgattattacattttgcattcttagaatcctgcgtgatgcttcatgaactcttaggcaaatgaataaatcaatgaataaaagattataagtacatcatttctcccttccatttccttcctccaaagcactccatatttttcaaatgtatggcttccgttttcttaattgttgatatacatcaacatatatatcacatatgcatataacatatataccatatatgcatatatatcccatccatataatattacttgtatgtgtgtgtttttagggttgaccatttgcatttttttaaagaaagtcatacaacctagaagttgacagtcatacacttgaaaaagaatgtctctcttagtgctaacagaacaatcacaaagacaagcatgtctcctagctgtctagtttttcttttaaaggtttatccttattctttctaagtatgtgggggtggctgggtgttgctgtacacatgctcacagagtcagatcctggtgaatctggggttagagggaactgtcagccacaggctgtggtccctgggaacaatggagtcctccacaagaacagtaatgctgctacctagtgggcctcctctcaaacctcctcacttgctcttatcctctatatcactcaatgtttcagccaccaggtccaaactcttataaaaccaaacttaaagccaagcatttataaaactaaacttgaattaactctgaaactcaggagtttgtcaggatcaaccacagtgaactttagacttgtcaggaatgaaccgctctgcctggccactgggtttctttctagttctctaagccacacttggactcagcttcctggtgtacttccagatcagacttgagcaaggcttaaatatatatatatctcctctaagtgagttaagacctagtagtggtttatatatgcttggtccaaagagtggtgctattaggaggtatgaccttgttggagtaggtgcattactctaggaatgggctttaagacccttatcctagctgcctggaagtcagtcttccactagcagccttcagataaaggtgtagaactctcagctccttctgtgccatgcctggatgctgccatgcttccaccttgatgataatggactgaaactctgaacctgtaagccagcctcaattaaatgttgtacttataagacttgccttggatcaattcgcattcttctacatgataactataatagccagaagctggaaagaacccagatgcccctcaacagaggaatgaatacaaaaaaatgtggtacatttacacaatggagtactactcagctattaaaaagaatgaatttatgaaattcctaggcaaatggatggacctggagggcatcatcctgagtgaggtaacccaatcacaaaagaactcaaatgatatgtactcactgataagtggatattagcccagaaacttagaatacccaagatataagatacaatttgctaaacgcatgaaactcaagaagaacgaagaccaaagtgtggacactttgctccttcttagaattgggaacaaaacactcatggaaggagttacagagacaaaatttggagctgagacaaaaggatggaccatctagagactgccatatccagggatccatcccataatcagcctccaaacactgacaccattgcacacactagcaagattttgctgaaaggaccctgatatagttgtctcttgtgagactatgccggggcctagcaaacacataagtggatgctcacagtcagctattggatggatcacagggcccccaatggaggagctagagaaagtacccaaggagctaaagggatctgcaaccctataggtagaacatcaatatgaactaaccaataaccccctccccggagctcgtgtctctagctgcatatgtatcagaagatggcctggtcggccatcagtggaaagagaggcccattggttgtgcaaactttatatgccccagggcaggggaacaccagggccaagaagtgggagtgggtggatagggaagtgggggggaggggagtgtatgggggacttttgggatagcattggaaatgtaaatgaggaaaatacctaataaaaaattaaaaaaaaaaaagacttgccctggtcatggtgtctgctcacaacagtaaaactctaactaagacagtccttacctactagtttgtatgataactgaaacaacgtaatggagtaacatcatcaaaaatctctactatctccactttccctaacagtcccaatgcaaattatctactgtaggttttacttaaagtttcttaatgcctggcttaatacattgtatgcagcatttaagaagcaattctaaatgtgagtgccactcttattatatatgtagtcgctaggctttgacagagaatattaaaaatatagtcctgtatttgtgcacaatatattctttttagtggctattataagctgtttgtttttcccctaagtcagcacaaacttgaacagagcattcttttccttgcttggaactcatttcaatgataataaccatttttaaactttgcttttctaaagcaaattatagttaatggctctggagtattgtgagagtgtatgccacacagaggacaagtaaggcagcttggggctggagtattagctctgccaggggacagcattctcagcctgaacaaaagccaggagaagcctttcttggaaatggaaaatgggaaggtttgcccttataaaaaaaaagcccttgacttggttaagccctgagaagctacttatttccattgttccagttctttcctggacttccaagagagcagactgttgacctgcaatcctccatgactgtggttattctgtttgcttctgatacacgtgtctacccatgtaggcctggcatgtccgctatgtctcccaaccctcttggttaagattaatttagtgagatctcagaacccatgctcacatgcttataaagcagacgttcctctaatcgaatctgtaacagcacaggattagaagaaaactttctatgaggtgcccattgtatgtatgtatgtatgtatgtatgtatgtatgtatatatataatatgccttcagagtatgtacatatatattcaaatttttatgtgttgagaaaattcaaattgccatttaagtcactcaaaatgatgcatagcaaaaacatacaaatacaaaaaaacacgtacacattatttaaaacaaaaagatctgccaactcttaaaaaaagatcttgtattttttttcaagtattatattctttttatcaaaacatattatggttgagttgagtaatatttttgtgactgtaaagctaatatgagtaaacctaatatgagaatataatgatagatagatagatagatagatagatagatagatagatagatgatacatgataggtagatagatagatagatagatagatagatagatagatagatagatagatagatagatggatggatggatggatggatggatggatggatggatggatagatagatagatagatagatagatagatagatagacagatagatagacagatagatggatgataggccagtaggtagatagatgatacgtagatgataaataagtagatgataggtagagagataaatagataatagatagaaagatgataggtaggtagatgatagatagatagatagatagatagatagatagatagatagatgatacatgataggtagatagatagatagatagatagatagatagatagatagataggatagatagatagatagatagatagatagatagatagacagacagacagacagatagatggatgataggccagtaggtagatagatgatacgtagatgataaataagtagatgataggtagatagataaatagataatagatagatagatgataggtaggtagatgatagatagatagatagatagatagatagatagatagatagatagtaaatagatgatagatagatgataggtaggtagatgagagagagagagagagagagagagagagagagagagagattgtattactttcacaaagccctaagggagccaaagctgttttctgtgcaggacatgctctagataaaatgcccttaaaataaatattctcctgaggagctgtgatttatggcattttcctatgggcatgcttaggcggggatgggaatgcactgggagattaaacatcaaaaacatctctcttctgccattcccctttatcatgtaaaaataagttcctttagatgtcataagcacaccaggagccttgggaaattgctttatttgactaaatgacatttttttctatgagagatacagaatttagacataaaataaaataaaatcctcctaaaagagacccaaaatagaaacaggaactgtcttctcctgggtcaggagtctaggagtgaatatgaaaggaatgcttagttgcctgggatattgtgcctggttctcatttccagatgaaggtaaagggatgtccaggctccactgtgacatgtacacatagactcagcccccctttactctagtgaagttctatccctctctctcttgtttgaaaatatttcttaacaataaactagttaaatagctttgcctacctcaaacgcaagaactgtgatatatgatcaattacagtcttgatatccttcgaagacttgatcccagcctatgatgttattggaaggtagattttgaagatgggatctactgaaagaaagttgtgctactggttgtgtgccctaaacagagatatcaagacattgaagaacaataatttagaaagatctgtgtaagtgcagaagaaccagtcacctcaggactttgttaagtgaagatccgatgccttaggtctggagtatcttctcaaggccccaggtgtctgttgctagtgctggtacctgaactatacatgatgaagagagatgcatcaaaggatgtaagagattacttaaggtaacattttcttttatgggaagattttaaaagtctgacagagacatcgcatgaggaaacaggaatgatgtcagaatagaaatgtcagttctccctgggtttctaacaccaccttaccttcaagtctgactatacttttggatatcaaagacacatccagatatcttagctgggtagaagggcctggcttaccatcatccttttccttgtggtctttttaaagatggctggcaactccccgaatggaaagaatgcaatccccggtctctcccttccctttccaagtacatgatccaggagaatttctgctgcctcaactcttctcagcctgggcctcctcaagtctctctatgtatgtctctgcaaattccctagattctctgaagatttggattttggaaaacaaaccaacaaatgtacacattacttgtctctgcccagggtgagggatgaggagaagggcaaaggcccaactcagtgtaagagagcacgcatgagtccatgtgtcaaagcatgatgatcaacttatgtgtgggaaataaacacaatgcggtttattatatgtcccataccccaaatagcaaatatcgtgctgatattatgcaagaagtcttttggcgacagggagaaaaatggcgaatattatcaagatgacagtgaaactgtagttaatttattttttttttctgaacttccaagtttcctagaagaatgttctgtctatataatttttagactatgttttgaattattgaagaatttaatttcttggccttggactagttggggtaaaaactgggaaaagcagtcccacttccatcctgaccttagggagctgtatctgccattcactgagcaaagactcaaaccgccatcatgtgccatgagtggcaggcgtggtaacagtagcactaatgaacagataatttctccttgtaatctttggtgggcataaccaggctgtagcaaagcctgagaatccatcagcgaaaatcggtcccttgttattcaagtcaaaatgctagttgctagcagtaagtgcggaacacttccctctgctgttgttgttcagcagggaatccagacatcaaacctttcacttttgaatttaaaattgtttttattattacaatgtgtgtatgtgcgtgtgagtatttgtgtgtgtgtgtgtgtgtgtgtgtgtgtgtgtgtgacaacaatgttctgtagtagattctttctttcaaccatgagtttcagagactaatgaaaagccttactttctgagctgtctccctagtcccagcctttatctctctttacaatattcagagtttggatacagagagcagtgggaaggttgagtcaggggaagacaattctacctgccctctgctagctccgcattaggtcgctgtttctttttcaggcccgctgctagcagtaggccagaaagctttgatcttaacggatgggcatttaacacaggctgttcccttgatgtgcacatttaattcagcgtgttctgcacagtgctccagcctggcatttttccatataaggagttcacagcatcttcctgcagcactcctgcctctgtcttgaaatgcagcccgagatggctttgtgtttgccgcacgtgttgtaggctgaacaccacagcagcaaagctgccgcctcctcttccaaatccttccaggtaagtggggtgcatcccatggctgtctgtttcccaaaggacaactcgatgagtcgggttactttatattttaatgtgagcgaacgagttacaatctggtttaatgatgtttgtctgtcggcttatatcagaacaaaccaatgcctttgtgtgggtataattttctctttgggaaagtgttgttagaccctgctttgggtgtgattttaaacggaattggtgaacactgaagacactcttttcacgggaacgtgccctttgggtgcactaatgagaggtctggtgtagaataatacttggagccagggaagaggagtgtttcaaccttaggtgtaatgttctcttataaataaatgccgcccaagtctatgtagaacggcattctcattgaaaggagccatagctttaagtgggtggctgcatttgaggtcttagctccaataggcaacactccccagagaaatctcacatttggtatgattgtacataaaggtgtcacgctcgattccccactgtttctcctgtctaatgcctgtcaaggttttgcaaaaatatctccaagtccagatgcggccatcatagtgaagggacggatgagtgaggagactgaaaagtagagtctgggtttaagaaccaacacagcgcacagagagagtggagtgagagagcctaagagcctgcagcctccaggaaagaaacagtcactaaagggcatgaaagagggaggtggcattataaagacaaaattgagggcatggccttttttttttgtctagaaaaggcaagcagcagcatctcgtttgctgtatcctattgctatcttgctttgggtaccagatacctcacttaggatccaatctttgcacaatggccagggtgagcctattacaaatccctgctggcgaatggcagaagggtacgcatgatgtgtaggtctacttaaggatggatgaggcccctgagcggatgctctttagatgcattcaatacctgtgactgcgtgcctacgtcaacagtcaaagcaaaacgttgagaagctccaaagaggctgcatattcagtgacatattcagtggcatattcagtgacatattcagtgacatatttgaattatctcgcctattgctcatcgtctttgaaagttagtttaattctaatttttacaaaaaaccaaaaaaaaaaaaaaaaaagactaaggaagttaagaaactcagccagggacacatggctaactaaatggaggaagcagggttcgaacctcaggtctatcttaaaactcaggtctatgttttgcccactttgaggcagtctcttcatctaactgaattgttcattcaaatataagataggaaagacttagcaaggggagatacaataagataatatttctctttgaaaaattgggaaactcacttgaagttcagagtgttttagatccagagccgggatgtttaagtaggtaaaaccttgccagaaaggctggattttgatcccctttgttggtttcacgttgtagcaatctgggagaattaaaaacatactgatttctcatctctactcccagaacttcgtattaaactggaatgagatggggtctagacatcatttttttttatgcttgccaggtgatactaatgtgtagatcctaatgtgtgagcatttgtgcttacagcctctcctggagcccagacccctttattcaacattcaactgattcctagctttctgtgcctttatgtcattctacatctcaaacacagtgtgtctgaggcaaactttctgccttttctctcaaacttgaccctcttttccctatatatcctttgagaagaaaatgtcaagcactgtttatggtgttgaatgaaataaacttactattctaatatgttcatttttaaaaagaactcagcctaaaacaaaatacaaggttaacccatgggtggattctttgtaaacccatagtttcaccttgggattttcaaagtctagcaagttctagcacctgttaatattggaagtgttgggagaactttctcttgaatcccaaagggggataaagtgcagacattaaatgttctacatcagaaagttacttaaaatttgcattattcataaaagtaagcaagcctatccatttcaaataagtgcttatggttgcttacttctaacatttttagactatttacattcctagagatagaactctgggtttcagtgggacacaaactccaatggtctccattctcaggaaatgaatgaaatggattaaataaaattattaaatttaatgaaacagtaaaaatgatacacggcagagaatggcaaacactttacaggaaaacaaaggctgtctttccggggctagtttttctatgctaaacactctgtggaagcttccagtcaggtagggaagataagaagtccaatggctcaaataactacagagtacagagttggtctaagcaactcagaagtcagtgcctgacaaccaaggtctgtttctccggattaatcgtctctccctcatgctgctgctgcccctcagggcccctttgaacgctcaccatccccctcagctcttagtccagccaggtcatcttctctcttctagaactctcagagaggcctagtattggatctcactgagattacttctgaccggcaggaacaggcttgttcgacaggttcacccctaaaatcaaaagagagttagcccactcaaaaccaccagagaccctacaaagggtacatacacagggaaatgtgggctctgttgtaggaggaagagttaagagctgggctcagcacgtcagaaatctccttggagtctgtaggtacagggagaaagattccatagccatcatggtaacaagatggttacaaaagttcaactatggatgaatcgtggaagatcgacagggctgtgggagacttaaaaaaaaaaataaagttaagttcttaatttccagtggcagtctacctatgaaggttatcacacatctgtgaccacacccctcaccacactaagaagccaagtcagtgcttgtgtcaaagtgtttcggtttcccagttaaagttcctgtttataatgaaagagagaatacattcagatactcagttatcaggtctctaccttcagattctagatcttttgagctgagagcctctcaaatttgattttttaaacaaaatcattgagatattaccatgaaattctgaaaaaaaaagtacacttaaagtgattaaacctaattttttgagctccttctattacattataaacttcttcatcaaagacaccatccatgtcttgtgacttcctaggtttctatcccagcagcagactcagaataaaatttcactgaattttgcttagcaaacattttggtgcttgctgcgccacagtgaagaattttgtgtcaaggaaatgtctccctctgacattacccatccccacaatttatactagttattcaagcagcgtatacttttaagaagtggagataatattggctggtaatacaatatctgttaataacattgtgaataacaaatgaaattgggtagctggatcaggtctgtaaatatcatgcactgtgcaaataagtgtgagatagtgttagtgtaccgttttgcaagtcatatcttctataaggaaattggatgatagtgatagagccttttattgcaaactagctccatctccttttcattaaactgacatcagaacttattacaataatttagcatcatgggtattgttttgtaactgcttgctgcaaaaaaggatacaaggttgggaagttctaccctgtaatagcgctaggaattaagagaagggtaaggcagagtagccctaagcaagcagcagctaagcactgtgggaacttaaggggtaaacttctatatcacaacgtgaacagggaggattctgaacctggtgtggtggctcacgcctctgcctgtaatcccaggactgaggtggaggcagccccctccggactttgaggcaagtgggttctaggccaaccagagccaaaaaaaaaacaagaaccagtttttaaaagtctgtggtaactgaataaaaatggccgttctcatggatttatagaggtgatcaaaaacagacgtgaggagaaaccctgagtgtatgggagaaagccggaacttgaagataaggaaagggggaaatgggaatgtgagaagggaggacaatacaaatactataagagcagatcaggctcagatccacaggccacagtgagccgcagacacactggctggtgagaagcaaagggaatggtagggacaccagtgaccctatgtatgtgacattagtgtggtctgcttcctaaccacataagtattctcattgacaattatgatgaatgaataatcagagccagacatatacttggtaagaatgtttcttatattgaccattgtgtttaaataaattattattattattattattaaaatatcttcaatggaaacattctagtaaatactaaattgttcagtaaatggagttattgtcttgatgtgcatatgaagaaagaaggtgtgtgatatttgtctttctgagattggctttttccccttaccatgatgactcattgtttatatttgagaatgtcctctctcatgatgggaggaaaatccatggcctaaacagacaaatatttgcagtactttgtagaggacagacacatggcctcaaggtcgtcagtaggcctcggaggctttgccaaatgttgcttccacattgaataagccctcaagcttaccggcttcctggatcccttggaactctggatatacaacagcaacgaggagattttcttgtagattcccatgtagagaggtgtgtttctgtttctctgatgtttcctactataaaagttgaaggtttcatttttgccttttggcactgccaaactttagaatgcatgaatacacatagctatacaaatatacacatgtgtatgcataagctgacacatatgggccaccatgtataacatatattaattcttcccaaacaagaggctattgcctctggagtggttgactcagagggtctagatgaagcttgagtacccacccacattaaattttatttcctatgtatttatttctgtgtttattcagcacattggagggacatacaagtacacacataccatggtgtgcatgggcgaagtcagaggacaacctgggagtctctgtcatttcctagtgattgggtgcaccaggccagctggcttgcaagtctccagatgttctccagtccgcacctcccatgtcacaataggaacactgggatcacagtggattataccagctttatgtgggatctggagaccttacttgtacacagccaggactttacccaatgatccacttccctgaccaataacctatggattttataattttgttgatgctagtccagggtgaaggatagctagtggcagcattacatttttctagtttcatgctcatacttcgtgacttttattaagtttctgtgatcttgactggcatcccatattgtcaattgactctttgtactcctttttaatcttggagggacagaattaggtaggatttgatccttaagagaggctaaaccttccctcatgtcctaaagccataatttcttcccaagtttacatgcagggtacagagataaggcttgagaggccatcaattaggtgtcagattcccagcatggtgtggactagaccttctgttctcccagagggatcactaggaagtcctccacaccagcaatgtagttaaacatcacagtgcttttcgccgcctcatgtgcagctctatatcctaacagcttacaagactgttagcccagataattccccttctttgtttttcaggccttcagaaaaaaataactgaaaattctgaaggaaggattaattaaggcatgcaaaatgtaaaataaaataagacacagggatttcagggcagcacaatacttagctgattttgctaactgcagaacaggaggaagcaaaggagagatcagcactgttgtgggtttctagatgctctgctaacgcaggaatcctccaacctgggttacagatgcttctgtcagtcggacttcaaaagtcacttttcgctgtctgtgtccttactattaagtaactccaacacaactattaacctgatatgcttgattctttcattaaaaaaaattggggggggggcggttaacttttattttaaagcattctagacaaaggactaaatggtgctttaatttttcacacttctgcagaagaagcctctctctgttacagatgaaataagtgtctcagagaattttcttaaattagttagctcataatgcggttctcatgatgtaggttcaaaagaatttcaaaagatttcccctggaaatctgcagggagcgctgatatcttcccgggtgatcccttgatgagtcaagacaactcagggctcagtactggtagcaagcagttaggtgggcatgttgctcatgtgacactaaggaacggctggggtgcttgtctctcacacagcaccacaactcaaagtttagggtatagagaatgtcctcatattttgttctgtctatatatcacttgaactccatcactacagaatttagatggcagaaagcctttccccagactactactctgacctgctgtgtagcttccaaccagaaatattaattagagttccttgaattcaaacaggagtttactagatgtatatcgaatgcatttagatgaaggactgaaaagcaactgtgaaattttcagagtgtctggcaagacggcttaatggataagaacactgagcccacacacccacaaacaaacaccacactctcacatacacactatggccctcactggcatatatattggcatgggaaggattatgggtatgacctgttccagtaggtgggtccttgtcagagtaggtgttttcttatgggagtatatgtgaccttggtggaggaggtgtgtcattgggagtaagttttgaggtttcaaaagtccatcctagactatgtgctctccatctctgcctacagatcaaaggatgcaaagctctcagtttctgctccagtaccatacctgcctgctgcccaccatgatgacaatgtattaactttctgagagtataagcaaacctcctataaaatgcttttttaaaaagatttatttatttatttatttatttatttatttatttatttaatgtatatgaatacacagtagctgtcatcagacacaccagaagagggcatcagatccgtttatggaaggtcatgaaccagcatgtggttgctgggaatttaactcaggacctctggaagagcagtcaggggtcttaactgttgagctagctgtctctctagtccttcaattgtttttttttttttaaataaaataaaataaaaggtgcctgattatggtatctttgtttttccacctcagaacaggtttattgccacaataaagttctatattcaaagtgacctagaccttagtctatacactataatcccaggatgtaggagtttgaagcaggaagaccataaatttgaagttagccttggctactatagttctaggccacaatgggctgtgatcctgaactacagtgactatcaccaaagagcatagtggcaaaagcccaaacaagaccaccatgcttctctgtaactgacgtcttggtaactggctctcatataaataaggaagtccacattggacactaagtgagtggcctgctttctgaaactttaatagttttacaagtgaactgagacaggcatgactgaatcctggcgataggccactggagatctggtatcagatatcaagatgccattttgtgcacagccactgtgatgccatagtgtttctagatcataatgttcccattatcagattctaaacataccacagggatgtgggtggggtcagaggttagcttggatgcctgctgggctagaacagatatcagtccagcatgctcattggacagggtaccatgtcagcccagattaagtccttgtgaatctgtgcataggacaccaacaatgggtgggttcctctctgtgtcctccaaatcctgctccaaagttgcctccatctcacatgctgtctgccccagcccaggacccccaattgtggtatctcttaacagcaacagaacagtaactaagacacagacacacaccataaagacaccagaaggaagaggaaaagaaagaagatgaagaggaggcacagacaaatgaaaaacagtatgagttatttaaaaaaaaaaaaaaaaactccttgaaaaaaaaaaaaaagaagaaaagtgtggctctttctattattctttcatccacagtgtatggtgatttttgttgaaggatagaactataaccagaaatttcaatgacattaacacaaaatgaaagatcaacaggaacgataacagtaactgtaggaagttatatgggagtaagggaacaggtgtaagacatagagggatcagaaagggagaagaaggacataattgaatgctttggagatgagaaacagaccacagtaagaccaggggccagactgtggctgtccatgatggcacaacacttccatctaccaggtatctcactacccttttatatccttcttaggaggctgcaagtcattaactccggaagggaaaggaataaataaataaaacatctcttctcaggtctgtatcttttccagtcagcttcactgatatgggtttctcccacgaaatgtcttttctgtgtctaagaggtaaatttagaagaaatactaatgtctaattgtgggctgaggagatggctctgttggtacagtggttgcctttcaagcaggaagcctcctgtttgttccccacaatgaccataaaaaccaggtgtggtggcaacacacctgtgactgcagcactgcacaggtacaaggtggaggatcagaaattcagtgtctttccccaagttctatctagggagctctaggccaagctgtgctacatgagactgtctcaaaaaagaaaacaaataacaacctcaaagcctaaggggggctagggaacactaaaacttagagtgcttgcctgtggcttggctccaagcagcacaaatacctttaggcaagtccttacttatgagactaaaactccttgaattacctgtaaagggctgacaaattctagacatgtgagcactgtgtggcacactaagggaatgctggcaagctctctcactgggaagctacaggatactgatgagtctcaccagttccctgactcagttcacccacgtatattgcaatagtctaaaccaccaccccgagtagtaggataagaacacatcaatatacttatacagaacatgacagaagggggtggtgtaaggatgttgcagggtcctggcaggatcagaaggtcctgcagtctatgcagagaaagagactttctgtagagattggttacaagagtgttggcagagataaggcagtggaaggtgggggtaccagcaagttgtcacggttggaaattatgacttccctcaagctgaatgcaaaggaaacagtttcttctatgtccagctacaggaggaaatatggaggacagcccataggagcttcattgtagagtaaccctctaccatctaaataacaagagggtcatacctctgcttctgaaatctgagctcctactgaagcttctcgttgccagactcataggagagggaaatgcagattatactgttcagaatccagtctccctgacacacagcaagacagagataggtagggatgtatagagaagatggaagagttcaagtggtactcgacggaattgtttgtgcccacatcgctgacttcccacccacttcatgttttcaaataaaactatgtatgtaaacttcagagaaatcgtttctgtttagctaacaatcctaacagtgactactctccaagtcctgtaaacattgattgtagtcgcctcaaatttcaggctagtcatggttacttactttgagaaatattaactcttttactcaaatctctatggtacttaaccattctctacattctcaagggaatctatgttcttcccaaaagattttatttagtaacttgctttcaaggggagaatgtagcactgatgatactgggcttccaagaagaccacaaaaagagaaactaaagaatgagcaagcagcttcatgtgctgtgtctgccctgtcttttatattactgctcttctccaagtctgtttgtttaggtaatgaccttcagtcaacttaagatgctgagaaaggcttagcatctccctcattccataggagtagagaatagtcagaggatctaagttggctctgcgggaactaacaaaggaggttcaagctctgaatcttgagatggaagcacaggccttacaagaagataggaagctgtgagacacttggctagtgttgtgctgctataatttccatatgaaacttggtcccagaggcccacgtgcttgacagttgtcctactctccttctgttgctgtgacagaatgttcacacagttatcagagcttcatgttacatgtcagtcactaatgaggaaacaaaactggtgtctctgtaatagaaagatgtagctggcattgcatcgtcgagcatttgagcatagttaacatggccagctctaagacagactcacactatgtattatatgaaatgcgaaatgcttaatctaaatgtagacactaggagacacagtttagatctagggacatttacaactagccacaactaacagaaactatcaaaaactgctagtatcatcaaaaccaaaaaagttatgttgagtactctaaattagcatagagtggagatgaaagaaaatggacctcccctggttagaaggcattactgggcagctggggccgtctgaatgaagactacatctcagtgtttttagtagagctactatatttatcaattggtttaatagaattatctatagttgtgcctgcagaaatgtctgcaaagtattaaaatgttactaggtctatggcttacattgaaggagtttggcagccaccatggcatgagaaaagaggtcaagtagctgtgccaaaatgcgagtagctggcaaagggcgggaagactgggtgtatgcaatttctgtgcatgtccttagagctgcccttaaaaataaaggtgtgggagaaaagggtgttttcctgctgatcccactttctcagaaatggaacccaagctcaagccacccatatgaagcagtcaaacccaggcctttctgatctcagtgatctgtactgcacacttttttcctagcgtattctgcagacatagtgaatatgaaatgtgttgttgttgttgctgttgctgctgctgctgctgctgctgctgctgctgctgctgttttagaatgccttttgttcccctcagttcctcatgactgaaattgcaagaatctctaggttggagctgaggacccaaaggtgatgtgtaggtcttctgacctcctccagccccacaacttacttttcctagaactgtttcagaaagtgtcttgaactcattcagtgtcactgatgaaggaccaaagtacattcttgatgattactgagtctaaacaaatcctgagtttttgtcatatctagaaaaaaaatactacagcatatacaagatctctctgattatgtgtctgtgtctggcagggctctgtatgttctagacaagtgctctattattgagctgcatccccagtacaagaaggtaactttgaagagaactttaataaggatcagattcatacagtgttattataatattatttattcttatgacatatgagtgaaaaaaagaatgggtgggggaaggatgtatcttcttgaatgggcccctttcttcaaaggaacgagctatttatgaaacagtggagtattctgtatactatatatgaggtgattattcatatgataatgtccttccttggatttgaaagcatttgtcttagataatgcctgcttcgtgtctctggctacacataaggctgcctgaactccctgggaatgatgtctgcaatgttcaactccctttatgctcatgttgcagtataatagcagccccttatggcacttgaataattttctcatttaaatgccttccgtcagtcggtataaccaaacaaaaaggaagcatgggagcctgtttctcccattttgcatggttccctctgtgtactctgtatgcagtctgtgaactctggaaagtgctgccagaagtcagctatattttggcgaggccactgctgaagaaggggaaagctcacagttgcttggtggtatcattagcgactgtgttctccacagaatagaatataatcagagtcttaaagctattaattctgtagctttcctctcactgggcaaggtttattttctccatccctgaagataggtatccttttaatgtttaagcaaatccctgctgtgtttttgtctctgtaagtataatagaagagtggagcagagagcatagggcatgactgctgcctgttagttgctgtggagggtgaaggagagagaaaagtcacgtgtgggaggactgtccacatttttttttcttaaatggagtgtttttagcaggcttgaagaaaagaggatggaaagactggggacattggacctatgtgtgtccgttttcctagctctgagtgaacttcatgaacttcaccttatgaagtttatgaattcaactgcagagacttcaggcattccttagccattcttttttttaattaggtattttcttcatttacatttcaaatgctatcccaaaagtcccccataccctcaccccccctcactcccctacccacccaatccataaagtttgcaagaccaaggggcctcttttcccaatgatggtcgactaggccatcttctgctacatatgcagctagagacacgagctccggggatactggttagttcatattgttgttccacctatagggttgcagacccctttagctccttgggtactttctctagctactccattgggggccctgtgttccatccaatagctgactgtgagcatccacttctgtgtttgccaggcaccggcatagcctcacaagggacagctatatcagggtcctttcagaaaaatcttgctggcgtacaatggtgtcagccattcttagagactatgagattttacccatcagtttggagtcccttcctctccacccagatgactaccatttttcataacatatgttactacatatgcacaccccctcatttgcattaagtacatttctgaggctttacagtaaacaagctatcaatgcaaacacaaaagcccctgacaacctggggaatacagcacgttcataaggagtttgggtgtttgtctcttcctggggctctcaatcccctggagttgggatcgttttccccttctgggtactaacaaggaaaaacacaaggtcatgattgaaacagatagaaacgctaggaacgaaaatcccaccaagagttgctttctgtaagcatgctctcataaaatcatgagcgatgagatgaggaattacaatgacacgtggtattggcatgcatgtatcaaaacacggtagcgccagggaacaagttgatgggtacatgaagcaatcagtcctgtggtgccactggggaataggaattggcaccagaacctgacctagagacctgagaggcaaggttatggatacagtaaaggcaacatgtgccctttggtgcaatgaggagatgtgtggatgatttaccactggcacattgttctcttgaatgaaggattacagaatgtctccctgtaaatcaacagaatcataaaactaagatcatgtaacataaattcagaacattttaaatctaagctatgcaaagattctgtatttgaaaggaaaaacacacagttatacaaagccaacctgatgttcacccacagaaagaaaccccgtaagcccattgataaacggaacttccatttcttactaacattactaacatgcatatatcccagtggaggaacgtggcccctctgtctgctttctttattgatgtatttgtgagaaaatgcattttataactgcagtgattataggctcactctccccacatacaaggattcatatagaaactacccacggtaaatgtgtggggaagtcgctggctcctgacataggcgtgaagacggtcagtcagactgatccactgcagaaatcacagctcgacttagagctgagttattaattgcttggtttcatctgctgctgaaaaatagacctaaaaatgtattgtctagacttcttaggtgtcctataaatgtgcacagaagcgaattatccaggaaaggaaaattcagtatgaacgcactgactgaaggcataaagactagcttagttggggaatcttgaaccagaaactataaaggctaataagctatagcaaaactgccccaaagacaaaggtaaaacacagaagacgccattgtctgtcagattcatagcatgaataaaccaagctaggagacattccacagtatctttagggacacatcacttccaacttgctgccaaagtcttcacaaaggcactaacgtcatcagcattccctaagcctagtcatggccgcagccatatttcttctacaaatggggcacagggggcagatgagaacatgcacttttctttgtaggcaggcaacaccagagatgggccttctattttctactcacccattggccaaacacaaatcatattgtcacatgtagttgtaaggaggcgtggacatggtgtctacagttggccacatctcatgaaggagtaggacgaacaggaataagggatggatttggaagagagatcctaattttctgactgatttgtggttcttacggagtcttactggcattattcccaaatgggcatctcgtgcccaaagcattaagcaaggaagttctgtttctgagaaaaattgttagtgaaataaaactgattagctacatcgcgatgtttttaggttatggcttttctctgatgaggttgagagtgctgttttcatattcatgtctaaggctgtcaaaagtgggaaatggctcgaaatatgctggagtcagctggatgtctactgaggtgtgcaaaatcttacctcatcagcatatgcccttcacagtcagaaatgattttcttacaaaaccagctctgtagtcacaaaaaaatagaagcagattttgatcatctgttagtccattttttatgaccaccctgcttctataaattatacaggactttgtatcttctgcaaggtcttgagtgacttgctggcaagagagctagtgacaggcaggtaagtcttcctcaaatagcacactttgaaagcatgtagcctgttctgaaaaatatgaggttattgtaaagtatccaggttttaagctgattggcctttctctggatctaatatagtaagtagtatgtcagatttcttgagcagaaatggttggacatgtctaaggcaatcactttccccttcatttctagggtaagtgagaaaacgcactgaccagtctttatctttgtcttttttacatcaactgtcaggaactcggttttagaagtggaatgtttcatttcttgtgtttccatactgctcttgcctgctgcaggcctctgagctggcagcctcctcagggcttctgtactcctcaggttcttctccacacgtggtcttccacacagggcaggggttccagtaagctacctacacctaaccacatagtgccatagtggctcctttgcacccagagtttctgtcttttagcactggggtgacacatctttagcactttatctgcaataatggtagttttaggggaaaagtgttttgatttgtttgtttgtttgttttttgtttgttggtggtggtggggttttttgtcttgtttttgtaaaagctgtgatttttacaaacatcacaagagaagaacatcactatacactatgctgtatatgtgtacatatattttcatatgccaataaatgttagctgctttttgcttcagggcaatatctagacacaaaaaatcacactggcatcccttcttaaaggaagtaccaagaatatgtgttggctatggttgggctaccagaagatgatgtaaaaaaaaaaaatctatgttatcactgtagttgcaataaatgcctaaagctggcccatggtggcacttgggaagcaagaggtatctgtgagctcaagaccagcctggtctacagagcaagtccaggacagccagggctacagagaaaccctgtctcaaagaaaacaaacaaacaacaaaaatgatggcataataaatgcctggaggtactgtttttatttgtctcttttctttttcttttacattgcaatacacactgaaatatattgaatggtccatgttatgtgtgcatactagaagttataatagtaaaatggcaaagtaggagagtacaaagtgtattttgaacttgtctaggttttaatgtatttaattgtttcagatatagaatgatacacttttaccagattgccctcagtcagtcatttaataaatgattaattgtgcaggtactgaacactcagaaaaagacaagaagtctaagttcctctctctaacttaaaaataatcaactccatcactcaaaaaaatgctcatagaaaatgcttttatagcaatacaatagtgttctttagagtttaaagccacgttgtaatataatattaaacatcgtaaaacccaaccaagtgatccccctcagaaacaatggtaacattaggatgtaacacactgtagggttatttagacttaggtgagaccaagcaggtaagatttacagaaactctcctctcacagtaactgctcaataaatactatctactgaagtcattctagcaagaaagagccagaaaaaaaatctatagctcaggtgtttgaatatttcacgcccagctggaattatgggttggaaggttctggaacttgtaggaagtggtgccttgttggaaagattgcatgagtgaaagccttgggatagccttgtgccctttatccatgctttctccacccatccactgtatcccctcctagagccgtaagccaaaataaaccctttctccctaaagttgcttttgccaagctgttttatcacaatagcgaaaagtaactgaaaataaaaccaattcattttagagtgtgaatgggctagagaggctgagagaaaatctgactatcttggatgttacatggggtaaaaaaatataaccaccacagtacaaaattagaaagtgtatgcccatcacacttagctgcagacctgaatccctcaagaaatataggtggccagccaccctgccatggttgcagttattatgaaaatgtcattatctcaaaatcatctaacctggaagttaattacccatgacagttttaaaaagtcactttactaactaacatatatgttagtaatatgtgtgtgtgtgtgtgtgtgtgtgtgtgtgtgtgtgtactagtatatatgtcaggcatgttggcatgtgcctatagttctagctataatatataattatatatacattatatatatataatatatatacatagatagatatagatatatataaaatatatgatataatcgatatatatagatatacagatatgtaatagagatatataatagatatacattagatgtatatatgtgtgtatatatatatgtaattagttgtaattataatatataattatatatacattagaatatatattatatgtttatatatccatgttagcacatgtatatatgatatgtgatatgatatgtgatatgtgatatgtgattgatatgtgatttgtgattgatatgtgatatgtgattgatatgtgatatgtgatatgtgattgatatgtgatatgtgatatgtgatatgtgatatgtgatatgtgatatgtgatatgtgatatatatgatatatatgatatatatgatatatatgatatatatgatatatatgatatgatatatgatatatgatatatgatatatgatatatgatatatgatatatgatatatgatatatgatatatgatatatgatatatgatatatgatatatgatatatgatatatgatatatgatatatgatatatgatatatgatatatgatatatgatatatgatatatgatatatgatatatgatatatgatatatgatatatgatatatgatatgatatataaccttagcacatggttaaggccaattggagctgtaggcaatttgcaaactccctgatgtgggtgctaagaactgaactcaggtcttctagaaaagcagcaggcactccatcttgtgatttttttcaaggtcatctagatgatagtttaagcataggatattttcccatggcctacaaagtcacggagtaatgctcaggtgttgcttactgctttgtgttccttcagaaaactacaagtagctatctcgattttatatgaaaaagtcaaacccctccactccacactgttactctatagtaaaacacagttctcctggtttggatacctgaccacttagggaaagaaatcccagccaggcatgttgacatgtgcctgcacaagtcccagatacacagaagccataggctcactagaacccaggagttctcactaggggcaacaaagcgagacttagtctcaacaaaattaaaagataagaagggaagaagaaaaggaggaggagaaagggaaaggagggagaaaagagagaaggggaaggtggtagggaggaaggaaggaaggaaggaaggaaggaaggaaggaaggaaggaaggaaggaaggaaggaaatggggtatgttctcgagtctattggaactgggtttctcaactatggctctgctgacagtttatatcataaaatcctagcagtatttatgacctgtgtccactgcatgccaggaaccattcattgccccagacaatacaaaatgttaccttgatgacaaaattcacactggtgcagaactactgatgcattaagtggaaactgttgattccttgtgctctccaaagagaagatgaaatacaccagcagcgccatcacaatggactcagggatcagaacccaactgcttcatgtaccagtagtaataacaggtgtggtggtttgaatatgcttgggccagggagtggcatattaggaggtgtggacttctacgagtaggtatggccttgttggaggaagtgtttcactgtgggggtgagctttgagaccttcctcctagcttcctggaagccagtcttctagctccctttagaacaagaagtagaactctcagctcctgcagcaccatgcctgcctagaagctgccatgcctgccataatgataatggactgaacctctgaacctataagcaagatgcaattaaatgttgtcctttacagagttgcagtggccatggtgtctgttcacagcaatgagaccctaactaagttgatagatatggaagacatgaacaggaaacatttgagaagaaggattgttacacacacacacacacacacacacacacacacacacacacacaccacatgctaagatcatttagtgttgcttatacgtgtttagggctgacctcttggaataagttaatataccagagaaattgttcctggagaaaattcattccacatctctcaacaactattaattgcctatacttcttcttgtgagtgtaaggccttgtgagaatcctcctgtctacattgctgtcaactgatagtatcggtttttattctaggtcttatttaggcaactgtatttcctgggtgaagcttccctgtcatatatagaagacactctactgacagatgtcccttcctgcttctctggctgttaccatctttctgcccctcctcctttatgatattacctgagccttacatatggaggagctgctgtagctgtgccttaattgcccccctgcagtcagttctctgactagctttgactgttatagctttgactttctgttatggtctccatctattacaaaacacagagcctctttggtgagaggaaaggtacactatctgtgggtacaaggctaagtatttagaattaagttagaaaatatactggtttagtgaagtagctgtaattggtcctcctcttgggtccatggcctcaccagccctgggtaatggaataggtatactgtatcaggcatgcatttgccactattgagtggaccttaagtccatttggcagctcttcatagccatggatataagttccactattgcacatttcaagatatctttctgtgatgaccattggtgtggttcctaagcatcccagctggataagactaatgcttgcttttctccatcagctctttgcatagtttcttccaatgctggaattttcatagtctaactgcaaaggcatcaaataccatgcctatgcagcccatttcagactcaaaccacagcagatatcagctctgcagtggtgtggtgataatcacaacataaccttgtctaactttaattccctcttaaaggtcccacctccacacaggataccattgagaattacaaattcagcatatgaccatggaaggtcagatgacccaatgctcagcatggtgggtatttttcagtgaaatcaaaggagaaaaagaaaacttggaccaaattttaaaataaaaataccgtcactaagaaataaacagtaatgaatatagaagagcaaatgtttttaatttatttattcaaaattctaaactctagcatttgccaaggtaattgaaattgtcttagctggctttgggcaaaagaagtaagttgggaaatagcaaatttcttgagcactcgacacaatacacagaggaaagctgcaaaattaataactgttcttgtaactccccaggagaaagccaagggctcaggggtgaaattaaagatgagaaaatcagatctttgtctcaagaaataaaactaacaattttcaataaaatcattgaagtatcccttttcctcattctttcagattgttccggtaagtagacccatagggcatatcttatgctgacaggcagctagattaagaggcctaagactcctttgaaatttccaatttcttggacttataacatgattaagtaatgtacaatgtgataaataatataattactttggggcttttttttttcttgagacatggtctcatgtagctcaggttgatcttgaacttctgatcgtcctccctccagctctcaagtgctgggattacaagcatgccctaccacatctcctgaataatagaattactttgaaggactgcttctcctgttggcatctgattcagactcaacctgtcatggaaagttctatgctcactgaattagtttctactgtgtggtaattgctcagtcttcactgttcagtctgatatgcttatatttggactataataataataataattattattattatttaaacatacttagccataattactgtgatttcccctaatgtctggaccatcagcagttcccttattctcaacgatgaaactcaagaaaaattccatttgcggagtatacaggactaaatctaatcttctctatagtagctgtaacaggaaaagataagttactagctccccagctgaagaatgtctaatatgggcatagtacaacaaaaaccaagcactatccaagtacgaggcacaccaagggaattcttggtgtccagtggatctgggacactgggcataatgtgaacagaagagagtctattagacactgagtgggtgggggagcgaagtgttagtgtgagtccaaatatttactcctggacaaaattgtttcaattcagatatcaagacaaatccaacgtaggagaactgtagcttttcccttaaagaccctttacccttcaagctatcaccgaagaattggtttctgaagcctcccagaggccaacctctgattcctagtcttgaagtagaatggggtagaaatgaccaactattaggtagtgatttgttgatccatttaagggatactacacttcactccctggactgcctattgccaagcagggctttatctttacctgggacagaatgacctggagacattgcagaaagaataggtcattatgcctactaaccggaccagtctcccttgcttgctccaccttgtggttttagagtataaagtgagaacacacattggacccaacgcacaagccttccaggagctggcctggctttagttctccggtgatgtccactctcctcaactctcactcaactcagagttcttattccagaaagactgccgcagcaattttgaaagctcttttcttttggctaactaaataactgctaaacatgtctaatagaagctcacaattaagagagaaggagagagaaggggagagaatgtgacgctgaaattttacatattgtaaagctagttgttggctggagaaaaacaatctcaatgttccagactctctagaactaccttgagcttgaatattaatataggtccgtgttagagcagactttgtatgttgcaattctaatcctcatttgggaggtgtgtgggatcagggcctttgggaggtgtctaggtttggatgaggctgtatagtcagggcccccgtcgtaatgtgtggggctggtgtcctgtaaagatcgctctcctcctctcgcttctgaatcagtaggccctttgctcttacactcctccaacttcaagaggatcaagaggagttttcgttgtctgagctaacctatctaaagttacctgtcttgttacgatctgagctgcctaagacatggcatcactactattcaggttaaagtttatcttgccggggttgataaaacctatggggagaacccattgcatcattatttagaactgttctttcatctcgtgttgtctgtggtgtgtggaagctccacgtcacctggagaaataaagcagccttggctttcagggagtcagtggagggcacaagctggggcagccaaaaagctgaggtggtggaaattagtaaattaccacttagcgtaatccactcagctaaagttatgaagctaatgttgggcagcttctcctgaagcaatgagcagagagcacgtgtacatcagaaatggatattaattattaattagggcagtgaaggtgactcccatgcaagggcacctgctatcaatgctaacaacctagtttagttcctcgaacccatatggtaggagaacactaacttcacaagttattctctgacctccatatatacagtgtggcaaatgtgacacgtacacacacacacagacagacagacacacacacacacacacacacacacacacacatccaataaataatgaaaaaatatggaccttagcaagtgcactcagtacctcctttcttcgtcgtggattattttgatgcattatgtagcttgcttattcgcttactctaatgatgagcttctggagttttctttgtcaacatggtctgacgtgaccctgtttgcctcgaaacgatgcagcatgagcaccatcctgatcacaagatacaggcaggtcaagacttacctgaagttcggtgatggagttcactgggttataaagtgtgttagcgaaagtgctggtttgggtgtgcgaagcctgatgacggatccattacaggttgcatcatttgatggaaaatctgatgtgttgaatagcaattactccctacagccaagggcaaatggcatctgctggccttggcctttttacactttcttctttcctgaggccagagttctctacaatgacaaaatctttttgctctagttcatttgaaaaccactatcattttaaaggttactgaaggggggtgggggattatacaatccaaaggactagaattcagaggaattataaaggcaagcagcctactgaaagagggaggatagttgtggctccttctgagctcatttgccaagagttctctgccaagagccagagaagggacagtgaccctccccattggttgcacctgagttaatctttccttgcctccctgcatacataactgtctttctcagtcttcctccctttgtcagtgctcagagctggtagatagactgactcccatgtccatcccttccatctcacctatcccaagacagtataggctaatgttatgaaagtaatggtggcttcaagaacaaatctccagagccatcctcctttcatagatttcccactgtcaccacctggcacaatgcccatagccagtttcaaccctgttgcttccgttatctcttcactacggagacctccattccacttgagtgcccacaagcctccaggtcctgggaagaccatctcaggcttcaggttaaaaggatgccctactgacttgctccactccatcaacgttccaagccagacattagcgctccaaggaacatagcacagtgtgactacagaatgctgattagacctctaaccctactacagtgtccaccaaggtgtggcctgctggtcagcatcatcggccagcaccctggcatcaccccaggctttctgagtcagagcatccaggtgtttctaatgcctgctaggttttgaaaagcaacagcagactctgcagacactcagggcttctgcaaagcggtaccttcataaatacttgatggttttagtatatttgagaaacctacataaggaaacaggcatcgagctctctgagaagagaccaaccttcatggctgtgtccctggcttcttagccaaagtctggcaacatattttttttttatttgaaataaaagcagatagtactttttttttcctgctgctgtgacctttatggttggagattaaaaaataccaagtcatgatgaaaattgcctagagaaagagtttgcaatattatgccaatgtcatgtgggcaattcatggataattaatactaatgtctcccatttatgtaacactcagcgattcaaacctcttggaaataacctggtaagagatggaaggattttactcaaccttcctagcggagtaagcagatggcttggagaggtggtcctggttcctctaatcccataaacaagtacccgaatccaggaagaaaatattaggtctctgggagcatgacgctggagacctttgccctttaggacttatccttttcccttcctttttgcttcctggactctgtatggttagcaacttccctttgctgggtgaccccacccaatcccaaaagctgcagggccaagtgatgatgcctcgaacctcggaaatcaggagtgaagtgcacctactctcctttaaacaaaaaaagaaaggttttcttacgatttttatctcttcttggataactctctgttcagatctcaaaccagtttgtaaaagggccattaattttgttgttgtttgttttgatttggttcttcttttggaagggggactgattgtttattttattttattttctagtgtttttaattgaaatagaattctaccactcccttccttccctttaacccctcccacttgcccccacaaactcctcccttgcttgactcacaagttgatagccacatttttttgattatatttgttttacacacactcacacacactcacacacacacatgcacaaatacatgtaagaactgctgagtctgttttggtgtttctatacgatttcaaggctgactactctgcattgggtaaccaataaggtttctcctcccctggagaatagtaactgtccttctctcaggagtcaacagtttcctgtaattctttggccatgatgaggaccatgcaacattttttttccttgcatgttaatatgtccattgaaattggcattgttctggtcttgtttatgcagccattctgaggggagacagtttcacagcagacttcccagtggtctgacacttccagtcttctcacccccttctccacagtgttccctgtgtctggcaaggaagctgtggtgtagctgtatctgttggggataggctccaccatccactgacatctgcattgtgtccagttgtggttttctctcatggcctccatttgctgcaaagggaagattctttgatgagggttggtagctacaattgtttgtgggtcgaagaataagatttaggatgtaaggaattgtgctggtttagcaaaatggtggcagtaaattctttcctgaagtccgtgacctcacgagccctgaagtccatgacctcactagccctgggaagctggctaggtttccagaaccaatcacgatttccctcctcttgagcaggccttaagtccaactagacaggcatgctaaacatccttcaacagattactggataatgaaaatgtgtatagatacacacagctgaaaatcaaaataaaatttgtaggtaaatggaaagacctaggaaagttcatattgagtaagggaagttagagccagaaagagaaaggcttcgtgttctctgtcatctctgatccatagctccaaatcctcagacgtgagtaaacaaccaagattgaccgcctaaaccaagagactacaaagggtgcatatgctcaggggctgggatggctttgggaggggactagaaggatacaggtgatgtcaagtggaaaatggaataacaggaagggggctccaactgcacaggagaggggcgatcacagaaggggaagaaaggacaaataacaccacagttatttgatgctgcgtcaaggaattgtattattttatatttacttaaaactccaatagcaggagttgttacagtaatgaaagctaagcctcagtgtccagggtcagatataatgtatattgagtatagccataagtagtatggaaggcgatgagaatgttctagcacccagctggggaaaggacaggttctaggtcttcaactcagagttccccttcagcaagccctgacctttagcctttgaagcaagcacatcttgtcaaagaccattagtccttcccaggacaccataatattgaatgcctatgaactgggtatttctaacaggactttgtccttgttctgtgcaaaagaacagccagactttctcctgctgacaaatatcttccttggtcatactgccttaggaccagcttccatccctgtctttgctggacagaaggattacctttgctacactgagttatttctagttctctcataagacagaaatgttcaatgttcatactatacatactatttttaaaatagactttgacattttatgagatcaagataaggtcagaaggctgggttgtagtcaagttgattgagggtttgcgtagcatgcaggaaggccttggtttgatttctagcactgcattaaaaacaatgcaaaataaaagcaggatgatcagaaagccaaggtccttctttgctacacagtgagttctagaccatcctgaggacatgagactctacttccaataggggaaaacaaaagcaaagaaacaaaaactgatgaaatccaaatagataaggtaggcattatgaaaaaggtacggaagccacgaggaagaggccaagggctagatttagactacagaatttaggctatcagatggactgaacgtcatgtggtatcagttctcagcagtggaactgcaacagagaaacaagtcagacacaaccattcaggcatattcaattcttctcatttctacacctaactgaaggacactctcatatgttcagagatcctgggatgtggggatgtctccacacatgcagaaacatgcaggttgctgttgttatgcaaagatagtcagatacttagcatatgaatttcttccctccctcgtggaagcagtcttcaaagagacttcatgggaggcttgtgttataaacctcatcagtccctgagcagctggaccactttagtcaagttacttcacatctgcagtcttagctttgtctctaaactgaaagagatggaccagggtccacacacacaatgagtccatagtttaaaggtgctccctaaggtagccctgactattagtgctgagacagaaaggaaatgtgtcccttctcagactagaaggaaaagctaatcaaacagaaagccagcaggtctgaaaggcgccagcactaggcttctgctaccctgagccccacatataggcttaataaggctataagagtactatgtccaccatgcatcctaaaatagatgcagtaggcacttgtcatctcaggagatggtgattcccttcctgtttctgctggctttgtgcttatatttgaaataccagacttcttagtcatttctccatactcggtcctatcatgtgcccttactgtctgagcacctttcctgggctacagaattggctcaatgcagagacatagcagtgagtgagtggtggatgtctttgggctctcttatagtgactgtgatgtgcagtcatgtacacaagtgacagttatggtgagtgatatccagggcttctatgcgccctcattaggggaatccgacccaagaggatataggtaatcagactagatgcaagactgggagagggcctgacagatgataaattcatttaagataggtggtggcacacaggtttcttacaaagctaataaagtctaaattcaatgataaccttaaactggatccctgggaaaaggaaaccggttagcagccattactttgaaactgtagcattagtcagacctcagaaaacagtttaagggaagatggatttatcacccatcacagtttcaatagcaccattgctgctaggcccatgagttccctgctgggaagtatataggagactgcaatggtttacatcatggtagacaggacaaaaagacacgggagacaaaaaaaacacaaagagggaaaaggcacaataggctcctactcctgggtgtccacctcctcctaatattgctatcaaaggatgaatgagcccaccagtccattaatcattgcttttatcagagtctttttgatttgaccatttcccaaaagcccctcagaaggtgtcttagttactactcgttacttagttgctgtgacaacgaccaagtcaactttttgaagggaaggttcttccgggcctgtggttccagagggacaagcatccatcactgtcaagatagggaagagtggcagcaggcaggcagggtggcagggacagctgagagttcacctgtcccacaagcaagcatgcagaaaggcagcaaactgggtatggcctgaggttattgacaactcaaagcccaccccgagtgacacacttcctccagcaagacaacacctcctaaacctccccaaatagcacagccaactggagatcaagtattcaactgttccactatgggggacatctcattcaaaccatcatggcacgcaacaaaacactcaagggcacacctaacgctttctctccaaaccctatttccagtactaccaactccagaacactttgaaactttgggcccttttccagaagaagcactcttagcatgtctttggaggatttctcagacccttaggtagactttctaagagagaagtttccaaatggatacatttggaaacacctaaaagtgctggagaagcaagctgtgaaaggggcggggccgacagatggtctctttaccagcccgctcctgtaatgggtgtctagggctcttcctgtttacaaatttgggactaagaatggtagcaatctggggtgaaagggatcttgggtattagacagcaattcctatcagtctctggctgaggcctgctccttggtgtgttatttccttgttatttttggccttccctgctgggcaaaaggcccttctgttgctttatagaaagctgtaaagtaaggagaagcagatacaggcagctggacgtcagccagcaggcaccaaagctatgagtcctaggggagatgggcagaatagcaggaacatctgctacaaaataccctgtatctaatgctgtgcttctaacccacattttgtcttaaatgagctcttggtcttttgttaattttaagcaccgcaaacctgaaacttcccagagtggccatagttttcagttgctgaaaatacagcatgtgtgagtaaataaaaacatatcaatgtgctcctcctggagatggaaggaagagaaatggtaagagaaaggcacacagggccacagaaggttgctgagtgaaactggatatagtagtcagatgtccgttgctgtgataaaatgcctgatgcgtgtaacttaaggggaagaaaggtttgcttttctctcatggtttcataggtcttggttcatgattcccctgatctatttattacctttgggcccaacacatcaggagcacaggccagaggatagcattcacctcatggtgaccaggaactaaagagggtggacaacagacagtacacggaaaaattttgaaacaaattataacctcaatggcacaccccagtgacatgctttccccaatgaggtccctcccacctcttacttttcagcactccccaacgacaaaatcacattacaaatccatcaagggattaatctattgattaagtcagagctcagaggatccggtcacttcccccaaagtccaccagttggcagccatgccaccaaacaatgacgaacatttcatattcagactgtgacaccggccatttctagactggatgaagacttgttgatgtctaagtgcagtgggctgcttatgcgtctcatcctggaactgtgtaaggagagtaggctgtttccaggatgaacatactgctggtgactagagagatggctcatcactttaggtcactttaggtcactgctttcagagaccctgggcttgattcccagcacccacatggtggctcataactgtctgtaactccagtttcaggggctcctgcaaccccctctggcctcaatgagtaccaggcttgcacaccaaacacagtcaaaggatccatctacataaaacaataaaatatttttttaaacaatgcactgacggagcccaagtgtgtcttcttgtctgctgtccacagtgtcatgacttgaataagcaccactggccaaagcaactcacttatttaattttgctgtcttctggacagagaaacataatctgcctacgagggagggagaaatgagaagtgaaaacagtaatctctcggttattgtgtcatcaccagagagctcagcatggcgatgaaagctaaggatgacatttttaacaatggccacttcactttttatctagcttcttgggctaatatgccaattttaccatgtaaaccatttcgttaaacaataatcagtaatatcagcatcacaagacgataatttaatactataattttcctttgaaatcttcctaaagaacatgtacatataaaaggcttagctccccagcttcataaaccactccttcatatttatccctcacatcaacaatattctattatgtccgtatttctgtttccttactaagactctcgcaactgcagagtttctctattttatgcacatctgtatctgccacctgtaaatgcacagtagtgttatatgtgaaatgagtaaatcaatcatttaaaaaacaatcaggaaagcataagtgaagaatatcatttcacaaaccttctgtccttagtgtataaatgattacagctaaacaacaattgctctagtagtttcatgtggtgctggcaatgtctgagttaactggacttaaaagcggtaatctggagagatgtttgttaatatgtctggtgaagtccctggaggctctaaacgattttatcactccattttcaagtgtgtgtatgcatgtgtttctctctctgtctgtctctctctgtctgtctctctgtgtctctgtctctctctgtctctctctctctctctctctctctctctctctgtgtgtgtgtgtgtgtgtgtgtgtgtgtgtgtgtacagtgtggatgtgggaagacaacttgcaagagtcagtcagtcctctccttcacatgtgagttctcagatcaaccttgatccatcttgacagcctaaaattctgatttcattgttctgagttggaatgaggttcaagggttctccaaaagtttaaataaataagaataaatcagtggttaaattgaatgggggaaaaaaagagaccaataacaggagctgtcttccccttgcggtgagtactggcagtgagggagtttccttacagactgggtgttctccctgacgctggtagcctgatccttgtggaggctgaacaaagcaagagtaatggagagagagagagacaagagagagagagagagagagagagagagagtgcgcgcttccccagattgagcaagaggtaagagtagatctgcccgagctgtactgatcgaggagtagcagagttacactctctctgcccccttagttttccaactactgtcttaatcagaccctaagcagcaactgctcgtagtcactgggacacctattgtggtttttgaaacagcttgagtagcaagaaccaggacttcgttataggaagacaatgagttcacaagaaatcagtgacacacagaacagtagcaaagaatcaatactgtaggaatctgctgtccttcagatgtacaatttacagttcctcatatgtaaattattttattctacagagttcacctgtgtgtaaaatattataaaacatgaaagactctttcctctcctcatacaccttcccagcttgtagaagctcactttttcttgtttctcttttttacattttggtaagacccaaaaggacaaaacatgtccgaaccggtgtcgcataagcatgtcgaagggaggtttgaagtgcttttgttttgttttagctgaatggcagctaaagggttattgttcaaatcgtttaatcctgggctggtaaggtctgagttaactgaacttggaagagtaaccatggagactagcatatggtttctgattccattaatcttgttgagattaacaggaaatcccctggggaatttttgcagagattcagaaataaatcatcttttcacgtgtacattgtttggtgacagctattctctttaaatatgcatcttcccaacaaagggattgccgggttcttctcattatgggacaaaatgcagcaagtaaccacaacacctgtggatgtgaatgtcacacaaaatgaagatttagtcaaggaaaatgtgcattgccccagcagacacactagaggaagcttatgtactctcagctgaaatctgaccaatgtggaggctgggtgtggctcggtggtagactgtgtgcttgcttagtgtgtacaaacccctcagttccaccctcagaaataccccagggaaaccactcttgcgggacctctcagcttgtagataggaacgaaaaataaaactcgaggctctttagtgaaaaactctaattatcatttaaattataggaactgaactggatgcgctgagtggggtttaggagggggacgctgttctgatctctgcctgcctcacccaaagctgccctccttacatgctggtgggagggagctggagcaagccaagcctgagacatacgtggagcatttacaaccccggctgcaggcgtaaactcacggagttctgatgcctgagcaaacatttcctctccttggcacaaatggccacagatcactattgttattttattttaaaagaaaccatatgctggctatattttaagttaattatcttttctaattctaggattaattatagaaaatattcatttcgtactattttgggtgttgcagagcacataaaaattcaaaaatgtattacaaaacaaccaattggaaggaggagtgttctgataaccagaggcaaaatatgttctcgttttagcatatttctatgcattgttacaaaatattaaatgtcagggtgtatataaatgggtaagctaaaatggtttcctgtggccctgcaggatactcagtagcagaagaaaggtactcaggtgtgtttagttatagaaacaagcaccctgtcgcctgggtaaagaagagtagcgggtactgagctcagtggtttcatgacctagtcgcagtctcaacctcaacctcagctgagtttacacagttcccactgtggcctaggggtgcccaggtcacaggagtgaagcttagttcacacggctcacaccgtgggatacgtttactcagggcagacttcaagtaggcaccagttctcaacaaactcaagccaggtcattgatcatcctggcccccaaccctttccaacacgaccatgacactctctgatgagccccaagcacctaatcaccccttcagtgtctgatttctaactgtaccatcaggttaaaacatgccccattaaggcgaagactcaagctagagcctttccaagtattggctcatgttggttttcaagacattaaaaaataaataaaataaataaataaataaattttttaaaaattgaaaaaaatttaaaaataaataaataaatcagataaagtcttttaaaaatacctaaggaaattggtcagcttttaggtgctctgaaagaaaatattaagtgttttaaccaaaaaaatattaatgaggtgactgaattgatgccgtcttgtcctgaccttctcctcattccatttcctgtcccttaaaggcacttctcagcccataaccccctaagcggccacctctttctcggcaacccatcctggactctccatgatcctgaccatggaccagctatataactaaaacaaatgttcccaggttcctctgacctataccagacaatgagattactgtaattattttatgataatttcatttataagtgctgcatcctgtggcagagactgcccttggccaccagcttgaagaaaggactcttacttggcctaacatgcacacctgtctctaattttctctcctgaacattagtacctgagttatgacacacattcacatatgtgatattttttaatttaattcgtgatgagtatgtcaattttcatgttttctgtacataatatggtgaagggggaaaaagcatagaatttagagcttatgtctctatatacccagtacattgagtgtcttcatcactgttctattgttgtcaagagacgccatgtcaccaaaactacacctataaaagaaagcatgtaacatgggacttacttgcagttttagagtttagtctattattgtcatggtggaagcatggccgcgtggctctggaacagtagctgagagctgcattctaatctacaggaagagagagaaattctggacctgctatgggcttctgaaaccttaaagccactcccagtgacacttcctccaacaaggccacacctcccagtccttctaatccacaaatagtgccactcccgggtgactaaacattcaaaaaaaatggtcctatgggggccatttttattcaaaccacaatgggcacatatgaacgttattgtgagaatatacttttttttcttttttttaaaatatttttattaggtattttcctcatttacatttccaatgctatcccaaaagtcccccataccctcctccccactcccctacccacctactcccacgttttggccctagtgttcccctgtactgggcatataaagtttgcaagtccaatgggcctctgtttccagtgatggccgactaggccatcttttgatacatatgcagctatagtcaagagctcccgggtactggttagttcataatgttgctccacctatagggtttcagatccatttagctccttggttactttctctagatcctccattgggggccctatgatccatccaatagctgactgtgagcatccacttctgtgtttgctaggccccaacatagtctcacaagagacagctatatcagggtcctttcagcaaaatcttgctagtgtgtgcaatggtgtcagcatttggaggctgattatgggatggatccctggatatggcagtctctagatggtccatccttttgtctcaactccaaactttgtctctgtaactccttccatgggtgttttgttcccaattctaagaaggggcaaagtgtccacactttagtcttcgttcttcttgagtttcatgtggtttgcaaattgtatcttatatcttgggtattttaaatttctgggctaatatccacttatcagtgagtacatatcatttgagttcttttgtgattgggttacctcactcaggatgatgccctccaggtccatccatttgcctaggaatttcataaattcattctttttaatagctgagtagtactccattgtgtaaatgtaccacattttttgtatccgttcctctgttgaggggaatctgggttctttccagcttctggctattataaataaggctgctatgaacatagtggagcatgtgtctttcttactagttggaacatcttctggatatgtgcccaggagaggtattgtgggatcctccggtagtactatgcccaattttctgaggaactgccagactgatttccagagtggtttgtacaagcttgcaatcccaccaacaatggaggagtgttcctctttctccacatcctccccagcatctgctgtcacctgattttttgatcttagccattctgactggtgtgaggtggaatctcagggttgttttgatttgcatttccctgatgattaaggatgttgaacattttatcaggtgcttctcagccattcggtattcctcaggtgagaattctttgtttagctctgagccccatttttaatggggttatttgattttctggagcccaccttcttgagttctttatatatattggatattagtctcctatctgatttaggataggtaaagatcctttcccaatctgttggtggcctttttgtcttattgacggtgtcttttgccttacagaagctttgcagttttatgaggtcccatttatcaattctcgatcttacagcccaagccattgctgttctattcaggaatttttcccctgtgcccatatattggaggcttttccccactttctcctctatcagtttcagtgtctctagttttatgtgaagttccttgatccacttagatttgaccttagtacaaggagataggaatggatcaattcgcattcttctacatgataactgccagttgtgccagcaccatttgttgaaaatgctgtcttttttccactggatggttttagctcccttgtcgaagatcaagtgaccatagggtgtgggttcattcctgggtcttcaattctattccattggtctacttgtctgtcgctataccagtaccatgcagtttttatcacaattgctctgtagtacagctttaggtcaggcatggtgattccaccagaggttcttttatccttgagaagagtttttgctatcctacattttttgttattccagatgaatttgcagcttgctctttctaatttgttgaagaattgagttggaattttgatggggattgcattgaatctgtagattgcttttggcaagatagccatttttacaatgttgatcctgccaatccatgagcatgggggatctttccatcttctgagatcttctttaatttctttctgcagagacttgaagttcttatcaaacaaatctttcactaccttagagtcacaccaaggtattttatattatttgtgactattgagaagggtgctgtttccctaatttctttctcagcctgtttattctttgtgtagagaaaggccattgacttgtttgagttaattttatatccagctacttcaccgaagctgtttatcaggcttaggagttctctggtggaatttttaaggtcacttatatatactaacatatcatctgcaaaaagtgatattttgacttcttttcccatttgtatccccttgatctccttttgttgttgaattgcactggctaggacttcaagtacaatgttgaataggtaaggagaaagtgggcagccttgtctagtccctgattttagtgggattgcttccagcttctcaccatttactttgatgtttgctactggtttgctgtagattgcttttatcatgtttaggtatgggccttgaattcctgatctttccaagacttttatcatgaatgggtgttgaattttgtcaaatgctttctccgcatctaacaagatgatcatgtggtttttgtctttgagtttgtttatataatggattacgttgatggattttcatatattaaaccatcccggcatccctggaataaaacctacttggtcaggatggatgattgttttgatgtgttgtcttggattcggttagggagaattttattgagtacttttgtatcgatgttcataagggaaattggtctgaagttctatatctttgttggatctttctgtggtttatgtatcagagtaattgtggcttcatagaatgagttgggtagagtaccttctacttctattttgtggaatagtttgtgcagaactggaattagattttctttgaaggtctgatagaactctgcactaaacccatctggtcctgggctttttttggttgggagactattaataactgcttctatttctttaggtgatatgggactgtttagatggtcaacttgatcctgattcaactttggtacctggtatctgtccagaaatttgtccatttcgtccaggttttccagttttgttgagtatagccttttgtagaaggatctgatggtgttttggatttcttcagaatctgttgttatgtctcccttttcatttctgattttgttaattaggatgctgtccctgtgccctctagtgagtctggctaagggtttatgtatcttgttgattttctcaaaaaaacagttcgtttggttgattctttgaatagttcttcttgtttccacttggttgatttcgcccctgagtttgattatttcctgccgtctactcctcttgggtgaatttgcttcctttttttctagaggttttaggtgtgctgtcaagctgctagtgtgttctctctctagtttctttttggaggcactcagagctatgagtttccctcttagaaatgctttcattgtgtcccataagtttgggtatgttgtggcttcattttcattaaactctaaaaagtctttaatttctttctttattccttccttgaccaaggtatcattgagaagagtgttgttcaatttccacgtgaattttggctttccattatttatgttgttattgaatataacattatggtctgataggatgcatgggacaatttcaatatttttgtatctgttgaggcctgttttgtaaccaattatatggtcaattttggagaaggtcccataaggtgctgagaagaaggtatgtccttttgttttaggataaaatattctgtagatatctgttaagttcatttctttcataacttctgttagtttcactgtgtccctgtttagtttctgtttccacaatctgtccattgatgaaagtggtgtgttgaagtctcccactattattgtgtgaggtgcaatgtgtgctttgagctttattaaagtttttttaatgaatgtggctgcccttgcatttggagcatagatattcagaattgagagttcctcttggaggattttacctttgatgagtatgaagtgtccctccttgtcttttttgataactttgggttggaagtcgattatattcgatattagaatggctacttcagcttgtttcttcagaccatttgcttggataattgttttccagcctttcactctgaggtagtgtctgtctttttccctgagatgggtttcctgtaagcagcagaatgttggatcctgtttgtgtggccagtctgttagtctatgtctttttattggggaattgagtccattgatattaagagatattaaggaaaagtaattgttgcttcctaatatttttgttgttagagttggcattgtgttcttgtggctgtcttctttttggtttgttgtgggattactttcttgctttttctagggcatggtttccatccttgtattggtttttttctgttattatcctttgaagggctggattcgtggaaagataatgtgtgaatttgtttttgtcctggaatactttggtttctccatttatggtaattgagagtttggctgggtatagaagcctgggctggcatttgtgttctcttagtgtctgtataacatctgtccaggatcttctggctttcatagtctctggtgaaaagtctggtgtaactctgataggcctgcctttgtatgttacctgacctttttccccttactgcttttaatattctatctttatttagtacatttgttgttctgattattatgtgtcgggaggaatttcttttctggtccagtctatttggagttctgtaggcttctttatgttcatgggcatctctttctttaggtttgggaagttttcttctataattttgttgaaaatatttgctggccctttaagttgaaaatcttcattctcatctactcctattatctgtaggtttggtcttctcattgtgtcctggatttcctggatgttttgagataggatctttttgcattttgcattttctttgattgttgtgccaatgttctcaatggaatcttctgcacctgagattctctcttccatctcttgtattctgttgctgatgcacgcatctgtttccagattcctttcctagggtttctatctccagtgttgcctcactttgggttttctttattgtgtctacttccctttttaggtcttggatggttttattcaattccatcacctgtttggtcatgttttcctgcaattctttaagggatttttgtgcttcctctttaaggtcttctacctgtttagcagtgttctcttgtatttctttaagtgaattattaaagtccttcttgatgtcctctaccatcatcatgagatatgcttttaaatctgggactatctttttgggtgtgttgaggtgcccaggactgggaggggtgggagtgctgcgttctgatgatggtgagtggtcttggtttctgttagtaagattcttacatttgcctttcgccatctggtaatctctggagttagttgttatagttgtctctggttagagcttgttcctcaggtgattatgttagcctctgtcagcagacctgggagactagctctctcctgagtttcagagttcagagtactctctgcaggcaagctctcctcttgcagggaaggtgtccagatatctggtgtttgaacctgcctcctggcagaagttttaatccactcaccagaggtcctaagatcccatggagagtcctgtgaggaccttaggggtatccgcagactctgcgcccaaggtacgttggtgctgacgcagaccagaagagacttgtgaccctgatcaggccgggttttctgcttccctaattaatgcagtctcaggtcctgtgcgattggattggagcagaagttgtgttccactcaccggaggtcttaatatccctcagagggtcctgtgggggccttggggtgtccgcagactccacgcccaatgtgccccagtgctggggtgaaccggaagggcgggaatatacttttaacttgtcagaatttaaatggtcattcctcccatgtcccacggataatctagactatacctctgcagtgtcctggtggaatcaaaattgtattaatctcacttgaaaacttggactcaaacaagaaataaaaccttaactgcctccgtacctcttcccaggagggagagacctggctcccagctcacagaaagctccttggctgtccctggaagctctttgccttctcttctctcctctggttgagaacagctcatctctgtattctatccaacaaccctgaaggatttaacaattatcagcaaagccgcccgagctctcctggcacatcacaaatctatcctttcggagtttaattatttgttgagcttttcaggattctggtgtccctcccccggccacctgccggagataggtatcccacagatcctatcttgctattcttacatagtagaaaggaaacaaattaaagaccatggcttcatctcctctgggcttctgctccagatggcagcacactagaacattacttctcaaacttttaatgaatagccggaagtgaagacatctttaggggcccagggttgagaagtatgccacttgagtagaattcccagctcccccacgtgggatctaagacaaattatttaacctctctgtgcctcattttcttccagtgtgaactagcataacagcttctacttaaattagtttatgaactaattgggtataaacaaagcacttagatttaccatgctgcaaatcacaactaccacaattattacctgaactgcaaagccaagagttgtttgttccatgatatatacagggcctaatctaaattctagatgtcttttcagagtgaatcaaaacgccagcccgctatattgttgttttataggaatgtgacgtgtttattttaactatgaggcatgagtataatagttttatgacttggttaaaaattatgatttcctctgatcaagggaaatgatatttttagtttcccttgtaagcgtgtctatcagtggggcagctgttgttagagaaaccagctacctcagtgtctggagatgagagggttctggagacacaggactttcactgctcaaactgggaagatccctgccagctcagctttacgattacttcataaccagtatagatccatagagccgagagaagtgggtgtgatggtgctcatctcacagatacaaaattgctctcggtgtaacacctactgccttgacagtgcttctccagagctggggccaaacacaaagcctagcccatgctatagcctcgtgtgctctgccactaaactacacactgagctctgatttctgactcttgtcaaatccttgtaagaatctgagggttgcaactgcactggaataattaattataaatgtcaagtgtctgactgggcttcgtttttatcttgctcacgcattctgagactttttctttttttgctttacgatttccctctgatcatttttgtactttttttttttttaggtcaactcagatcaaaacatactcttgggataatgcccaggttatcctggctggaaacaaatgtgacatggaagatgagcgggttgtctcaaccgagagaggccagcgcttaggagaacagctcggtatgacacaagtcacaaggaaaggatgtttggtgaatgttgtgctgatcagagtcacaagagtgtgtgtggtgtgtatgtatgtgtgcatgtgtgtggtgtgtgcgtgtgtagtacatggtgtgtgtgtattcagtgtggtatgtgtgtgtggtatgtatgtgtgtgtattgtgtgtggtacatgtgtggcgtgtgtgtgcatgtgtgtggtgtgtttatgtgatgtgtgtgtgtgcatgtgtgtggtatgtacgcatgtatgtggtatgtggggtatgcatgtgtgcatgtgtgtgtgcattgtgtggtgcgtgtgtgtgtggtatttggggtgtttgtatgtatgatatgtgtgtggtatatgtgtgtgatatgtgtatggtgtgtgtggtgtggtatgtgtgtgtgtgtatgtgtgtgtgtggttgtgagtgtctgtgtagaatgtgtgtttggtgtgtgtgtgtggtatgtgagtgtgagtgtgtatagtttatcaagagaccttgacaaacaacagaccttctgcaaaccctgagtgtattccctctcatttcctgcagcattagttgagttcagaaacaattagaaacaaaagtgatggtaagaacctagtgtgagctcaaaaaaaaaaaatcccaattatttcatgaggatcccaggcctgccctccttgctccctcatcctgttctgtgttggtccagacatatcattcttcgaggagttgagtacttcattgcaatcactcttgttctctggttcctgttaaggatggtaatggcaaaacacaggttctgttctagattctgtacttcacagcatcaatgatgagccacagtagtgttaaagaagaattcttaggagacaaactcatctcttgagaatgtacctgctaaacaaagagctcttcgagaagaccttcaataagatggcatagtggagttctagaaatggccattccaaacacaaaacctacctgaagatgaaaatatcaccatgagtcagggggagtttcaggagagaccagtggctgactgattcaagacagttttattcaacacctcttggatggtttgtgtcagacattatagaggaacaaataataatgatatggaaagactaagggtacatataatacagcaaaacaaatgaagaaacaaaaacaggtcagtgagttcatgatgtagaggacagagacaagaggagagcaacaggaaaaaagtgggcagaggcaggtagagagagaagtctaccagcagggtctgggagagcaagggtggggcaggagtagaagatatccaaggagagatgatgctggcagggatgatgggtagggctgaacagtgcagcttggaggaggcaattgatgcaagaagatgggttaaataacaagatacattctgatggatccctagagaaggaaaaaaaagccaataaaaggagatgcagtgttataagtaagggccacagtggaacacagacactgaaagcagggaagcagcattgatgtgagggacaatcctggtcctgcagcataatacatagggagaagatgcaacaagaggtttcccaaagtaccttggccccagaagacacctcactatactcagcatctcaccctttctctgtctgtagtggtggcctcaactaacagttgatctcagtaatgaggcacaacccaaaacatgacccaaaacatgttatgggtgatcagagctttgctctattattggaagcatggaatgtcagcacagccattccccatgggtaagtcttccactgggaaatctcaagagctgagcagggcccgctctccaaactctattatttccttgggagatcaataagctcattattacactgaaagctgtcactggatgaccagagaaaccagtctacaaggcttcccctgcagccagctatgaaaacatcactagactgatatttaacctagaaatgctccttagcctctatattctccgtcataggacccctctcctcatgtcaccagcattggagagccttagaagtctgctagcatttcctaatacctcaggaagataggagtggagacaagtaggtcctctgtgtatgagagaaaaggaacctgcagggtgtccccatatggcttcctccatctcctttccctgtcccttggatttatcatctagctaggcatatccacctggaaggagaaaggctcctcagatgtgatcagtctttataaggaaagctaaaaaaaatacgtgggtccatgaaagatagaataacatcaaaaacaattcaatgtcattgtcaaaaagaaccaggtgatagctttattttttttaacaacttaataaacaacttgggtgttgataagataagatatgatgtggaagagaagttaaaataatgatgaacatatttttggaaatacttgtccccacatctctctcctgtactcaggatctcaccctttgtctgtagtggtggcctcaactaacagttgatctcagtaataaggcgcaacccaaaacatgacccaaaacatgttatgggtgtacacacacatgcacacaagagcacatgtacctgatataaacaccctctctagtccctgcacacatgtgggaaagtttctcaaattgagggatagacagattttatgctcctgtgcaaattcatccaatagtctctaattgattttttttttgctatgtagtcaataagactctgcagttgtcatgacaaccagaaaatgtgcctacttggagatcatttgcctcccatgtgattcattctcctcatgactacacaccctccacacatgatcaggagagacaattctaaaaactaaaaactcttcatctaaattacaaggttttgagaggttatacttttaaaatcaattagcagtaaaattccatttctgggagattcagtattccttttctacaggtcattaccacatcatgacagatggctctgaaagactccaagaggagcccctcgctcaggcctcaggacaatagcggacacccaagaactcacaacagaccaagcttgttgcaaaccacatgaggctttattcgaggaaagccagagctctggggacgactcatatcccacgcaggggtagaggagtcgaccttgaggggaaagagttcccagtttttataggccctcaggggggaaaggagaagggggagattaggggatttccagatctaaacaatgtctattctcaagaaatgggtatgggaggggtacaaggaaagagtctaatgaaggtgcagcaatgggcacacacctggtcagaacattggcagacacacaggttccaggagtggccagagcattgtgcacctctatttttctaaatcagtgaagctagttctgctaacactgacgtctatcttgccaatttcagggcttctgtgtccttttacattctgccaggatctttcagttcaaaacagctgctttgtttatctatttatgattaactctccattcttgatagttacttctgtatatcaattactcacccaaatgaagggactggagggaactatagtgtagctgactatacctgaggctgaggtctttggaattcttgtacgaagggtaggtactcttgtcaatctgatgtattctttaagtcacaaaacaagtgtttattagctgtttacagtatcctgggtacttggcatgcaatttgacatatgaccttaccttctaaaaataacaatcaggaaacgtgtgggtgctatatagacaatgaacatttccccaatctccctctcttgtatgttttattccatctggccctgagattgcagttccttgtcattaattctggggttcctcattcctccaccctgtccaccactgggttaagtctcctaggtagccatagaaatcttcttccaactgcttcttatatccctggcccgccacacccatcctacatacttccttggaagttcccattcaccctgaggtcttaactctacctaacaacaggcaaatcaaatgccttcagggaacctatggctacaattcaggttcctatttccagttggctcatctggggtttcaaatgaatttatcagcaccatcacaaactaactgctgaccttcaagtttcaaagttaatccctaggaagttatagtataaacaaaaacatttgtagtatcattttatactaacttttaaatttttattagacattttcttcatttacatttcaaatgctatcccaaaagtcccccatattccccccccccacttccctaccctcccactcccacttcttggccctggcattcccctgtactggggcatataaagtttacaagaacaaagggcctctcttcccaatgatggccaactaggccatcttctgctacatatgcagctagagacacaagctctgggggtactgattagttcatattgttgttccttctatagggttgcagaccccttcagctccttggatactttatctacctcctccattagggtccctgtgttccaaccaatagatgactgtgagcatccacttctgtatttgccaggcactggcatagcctcacacgagacatgagcagagtgtctgaagagagtgaactactgctcaagctgaacatgactctgtgtctgacactattcaacattttaacatttaatctattagagcatagcctagaacaacataggaaatgctttgcacttttaatttacatagttaggttttctctattagaaacagactctggcagaatgtcactttttatatctgtgaattctaagtcacatatactcatttgataactcatggtttgagtagaccgtccattcattttttaaaagaggagaaggtaaagccgtaggatggggtattctttcacacagcggcatttctggatgtgtgaggtaggacaagcagaatgtcattgttttcctggagatatagagaaatatatatatatatatatatatatatatatagatagatagatagatagatagagagagagagctaacgaatgggatttgcctctgtggactgtttctctaccatcaaagacaagagttggtcacactggccatggggtttgagtgtccttgaagacaagagaactgaaggatgtgaagtatcactgacatccagatgggaaagtctccctctggacttcggtaaccttgactctggtgggagctgagctggaatgacccccaatggtactgattttgactttagcatcctcatatatttccctgaaaacctaggctgccattgctagccaaggtaggaaagagaatggagggagctgtatgtgaagttgtctacttgtgggatctctgagctttggggatccctaggctaaccctaaggaactcccaccagggaaagttatcatagccatctatccccagggctaagttctgctccatacacaataaccttaaaataacctcgaattatggaatagatttttactgaatttactttcatcttaaaatccaggagggaattcaggtgtgcgtggctagtaagcctacttaaactcttctcccgggtcctgtgatcttccagtgatcccataatcctgggaaagaagccaggaatggtttcgttgttactaagaaagaatcctcctaaatacaatcttactcgtgctcaaattttctccttcaaaatatatccatcaaactggtacagacagtttcaaggagacttggggagatccaaagaaagagagtgtgggctgagatgttatttattaatccagtaaggatgcagagaaatccactgaaccttgattaaaacccatcaaactaaaaccagtaggcaagtgttcttactaaacagccattagagtcacactatatattcttgatggacatgggagagtgatgcttcgaaataaaatttgggaacatgacacagaattattttcatttattcattcattcattcattcattcatttattcaacctttaagttttccattcagtattgtcaagcactcgtcactagaaaattctagactccaaagggacacaatcacttcatttttttatttattcagtttacatcctgctcactgcctcctaccagtcactccctcccacaatccttgcccccacaccccatccctcctccctttctcctccgcatggtgggaggacccctggatatccccccaccctggcacatcaagtctatgcagagctaggagcatcctctcacactgaggccagacaaggcatcccagatagaagaacatatcccaagaactagccacaggttttggaatagcccccactccagtacacaatgacttttataagccagtctataggtctccaacagaattaaagacaagtgttagaggaggtcaggatattaagaacatgcccatccaggggcatggaggaaggccacgttgagagtgtttgctgcaggcttgaagacagaaaatagaattttcatgcataggcaaggaggtggtggcacctttatgaagaagaacctgtgtgctaaagaggcaaacccgtgaaaagatgacatatcaatgagaggccatttaccactgaagacactggaattggctctactggttctcacgaaccagtgctggagttgaaagaacagggtggcaagagtggatttcattttggactaagtaaaaaggtagcattcctaaaagtagggtgtttttaatgtcaggcagcgtatagggaaaattattatacatacttacccgtatctcaacatcagtttttcagatcttaaatatgttgttccagcagtacactatataaattataaaagtagtcttcatgtattaggatagtgttgaatcttctaaaagctgggttatataatagtaggtaatctgctgacaccactggttaaacagtagattggaggtaatggacaggaagcatggaatccatcaggagtggagcatagcacgggaacatggccagggcataaatcaggacaacagcattactcaggggacattaaaaaaaaatcaggccagctctcgatcgatgatagatatagatgtgtgtgtgtgtgtgtgtgtgtgtgtgtgtgtacgtgtatcacatcagaaaaatcaggatctctgaaatggagcatattctagtttgctttctattgctgtgataaacaccatgaccgaaagtaacttaaggaagagttgacttggcatagcagttacagtcagccatcaaggaaagcagaggcaggaaccgaaggcaggaactgaagcagagaccatattggctaactttcggccttgcttcttctggcttgctcagataccttttgcatacaatccaggccaacctccctagagtagtactagccatggtaggctgggccttcctaggtcaattagcaatcaagaaaatggcccacagccacacacagaggccagtctgatggaaggaattgttccaacgagattctctcttctcaagcacacctacatttctgtcaagttggcaacagctgtgagataccatcccttgttgactgaatacacaaacgcatctctaaagctacagcagctggagaaatgcatgcatccctgatggcggactccctccaagataacagtcaggtggcatctgaaggtttcatggctttgacttgagagtttcaggatgctggatccttggaggccctttagccagatgaggattctatgtgttgcaagtagccaccgacctagttcttttctatgaaattcacttcaattctaaaaagttggctccattaagtctattcctgtatgacataagaagtgtatataaaaacgaaagatgaatcttaagaacgagccaccaagcctctctgtgcacacattaactctttctaaagtaaaagatgctgctgttgtacacacacacaactaatccagtgccataagcatcagcttctcattacagtgttaagttctgcacaccaaggaccatttaataatctcagcaccaactccaaagaagcacaagcagcctgtgacagacatgttccccttccgtcctttttcaagctcaggccataccactgcctccgggcacgccagtttaatgaaggataatttttttccttcagttttttttttttaattattttctccttgggcctgcaaaacaattgcacactaaagcaggttgagtcgtcagcaactgtaatgaggctacagcatcgccccgtgcctatttttaaaactccaaccacctgctccacattcgcactgactgctcttcagcagtttttaaagatttatctaaatcttaattgccggtgtttaggaaagaacagggattgccaacttctggatttggcaaggagtcgcagcaatgctatttaaatgttctgagtacctggctgcacggagccgtctgtggaaaagtgcagacaccctaccattatttccgctggctcacattctttctggctaaggtttcccaggaggtagaaaacagatcaaggatactctaatgtgttggatatacttagataggcttacaaccatgtatgaaaaagggacagctcctgcatccaccttttcctagtcctttgagtttgccctgttattagcctcatctatgtctcgtaactctctgtcttccttattggcagctggaatttaatcctcagaaaatactctttttttttttcaagacagggtttctctgtatacccctggctgtcctggaactcactttgtagaccaggctggcctcgaactcagaaattcgcctgcctctgcgtatttctcccgagtgctgggattaaaggcgtgtgccaccacgcctggcagaaaatactcttgatgaacggagaggctgtacattccatgcatcccacattgctcaggatggtccagctggtgctcattcatctcccagtaagcatcgatagcactcagttcacgctcaaagtagctcactttgaatgagaggcaatatggaggcttggctggtgataccacaccctgtaggatcataagtggcatacccaatttgctcttatatgtcaggtctcaaactcttagactacccatggaaagacttttcaagaccttggcaaagccctgttctaatcatcattggtttactcaacagagctaacctgtgaagccctttcttggaagaaaaaaaaaaaatcttactacttcaaatctccacaacattcggccgcctaggaagcccccatcccctccaagagccacagagtagaaaactatatttttgctagagagattccagtctttcatcctgcttagcccatctcacaaatgtccccatcctcttgatttcctactctcacgcagaacccaccttggctccttatctcagagtaatctgcctgctgtgcctttctcaatgctacacccagatctaacccgtgcagcatttaaagtatgaatgaatgaatgaatgaatccagttcgaggtgagaaaggtctgtataaactactgacttccagtttctttttctcacaacacaaaagtgttaagaacaatgttactaaaattttaaagctgaatataagaaatgtaaactgtctcattttaattaccagcactgaaaaagaaaagaaaggaaaacaaacaagcctcgactcttctaaatcagtttggtgtgtttggttttggaactcaaaagggctcaaatccaggatgggctaagacacctggcaggggtccagatctgtttattagctttgcaccctggttggtgtgatttttccttttctcaaggtaaaattatcataactgacagtggtagataataaatcccaccaactaaactcacgggggactgatttctaattaaaaatgcttattattatttgcctccaagaaatgtaaatgccccacatttgtaactgcagatgtagttgacttaaacgtggtattattatgtcccagtaaacctatcagtaatttgaaaacatcggaggctaccaatgcattcaatatgcttagcctacaaacagcatgcctctttctttgacatgttcattccagttaaatcagtctgcatccaacataaatcctattctatattaatcttggatctctcatgtaatttactgaatactgttctgacatttagaagaagcaccattttttctaaacgtttaaagtaaacaaattgtcagccaaaccatcccgatgatggcttctcacttatttcttattctagtggttgcctctagtgacaggctcatgacattaagggaacgctgttgagcaggacaggctcactcatcctctcaatcgcacagacaaagctgtgcgtccgtccatgtagtttcatccagacccggtctccgctattctgcactgcaggagtctgaggctgtgtttattccttttccttccccttcaggaagttcagcgccatcatcctctgatggtctcaccttggaaacttgtggcttattagatcacagggagagagagagagagagagagagagagagagagagagagagagagaatgccctccatgttgggaatttgagagacacccttattcctttatggatctgtgaaagggtcccagtctcaccagaagtcatttgtgaatgttatgtggggagagttgctttctgcagaatgttaaccctgcgtactttgtggcgcttcctaactttgttctcaacaggggactttctctagtctctgaaacccaagtcctagcacgaagctctgtttgatgctggcatatgcttcatcccccatgtacatagaaaccgtggtatttcgtctgtgaaagccattcatggaaacgtccctgctccggctagatcacacaccctatcctgactttctcttctgcccttaactgtaattagtttccaatcacctggattggcagcctctgacaaggaagcagttgtttgtttaaaggaagaattctaaagatggcaaattttcatctccatctcctctgttctaggagaacaaagacaaaaaaaaaaagtctaaatataaaccatcaagagaacatatgaattaactgaattcttcagaatttatcaccatgaaaaataaatgcatttaaataatgctttgtgcagctctctgtgtctgctctggacagaatgaactgcctgcgaatggagctagagtcagattttctggggaattttctgacttttagaaactgcaattatggtaaatttggttaaaatatcaaatccagttgcaccaaaaatgtctttatgaaagccatccctttgtaaaataaacatatgcaaatcagaattcctgagcattaaagcatgttgctcaggctagctaagagtctccaccactgtttttatgaggccaacagagattattccattgtctttgggcctaaacctgccagaagacataaaagtcattaggaatgttctggaggaaagtgcctggggctgtggaaacagactctaatctttgccatggttttctacatgtgcaacatgtctacaccgctctactagaaagtgaatattttaaaggtgctacttcacagtactgtctggatccaaagcaatggaaaccaatgtgaatagcatagcacagcaatctttacatggtgctccacaaagatcacccgtctgtggatgtcacaatgaaacctcattcatttgggcactgctacttgaaaatgtacttcaatagctgctctgtttcctaggcctctctcccggcaaacataacctgctaattgataatgcacataaatgctattggcaaattgaaaatgctgtacaaagaacagttattgatgttcatgttaccagccccttaacaggcaagggtgggaattgtctcctttatcattaaaagcttaatgcaatgttaagaagttacaaaggaaacgtttcgtggatttaaaggaaccccacttggaaaatccttggcacttctgtgcacactaacggtggctcttgcaccttgactgacactcatctctctgaaagctcagagagagtcttgactttcttaccatttaagaggtttaatattttaatgtgaagcaaaagttattggtgggagttgaataattctacacttcttcctattgttcagaaatgcctttcctcatgggtaaataggactgctttgggtttttgatataacaaatttcccacaggacaaatctgaaatgatatgatatggagttccatgcttggtaaactccacctagaaataatgcagccgacaaagtgcttgcaagttcggtcgcttcataacaaagaacaaaggaataagtgattctttccccttccgtttcgatctgccagcttctcccaaccaattaatagcaatcaatcctgtaattagccaacatctgctgggcacctgcttctactagatgctgtgttagatatttccagggatagggggaaaccccaggtgggatgcacaatttaactggaggacaaaatgtacctagtagaggggactggaagggatagagagtgattggctctcctcctgggcaccatgaacatgatctagaattgaatcctagtgtttgtccaacattttatcctaaaggttgagaattatagcttccaaattactagaatgctgaattttacattgtatcaattttgtaactgaggtacccaaggagctgaaggagtctgcaaccttataggaggaacagcaatgtgaactaaccagtaccccccacccagagctgtgtctctagttgcatatgtagcagagggtggccgagttggctatcaatgggaggcgaggcccttggtcttgcaaagattatatgccccagtataggggaatgccagggccaggaagcaggagtgggtgggttggggagcagggtgggggtaggttttagggggggttagggatagcatttgagatgtaaatgaagaaaatatctagtaaaaatataataaataaataaaagttcttttcattctcaaaaaaatagaaattaagtccaaagtatatacttgaaaataattactagggaattggaaatgttcagggtgggtggttcaccacaaaagaccttaaagctgttacccaagggaactcggatttttctagaaggcttcaaactgaaatagccacaggggatgagcaggtggcataaataatttaaagagtgaagcagccaggtgtgaaatttacacatgatctgtttgttcattggatacacagggggaaagttcttacataaacagtggatgcttttgcctttctctgtgtagcttccaccttcccaccaatggtagagatatggatgccaaggaatccactaagagcacaaggacagtggacaattgcaacatcaatctcatgtcagggacaacaggaagggcagggacagtggtcagcatccagagagaggctccatcaaggatgtcagaaacaggctcattgggttgaaaacttcaagttttaatgatatttcccaaacgtgagtattgttgaggagcaacactgacaacatgttcagcaattcaagaacaggatgtgggtgtcagcagcaacataaagcaggcacacactcacacacttacacactcactcacacactcacacacttacacactcactcacacactcacacactcacacactcacatactcacacactcactcacacactcactcacacactcacacagttacacactcactcacacactcacacactcacacactcactcacacacttacacactcactcacacacttacacgctcacgcacacactcacacttacacactcactcacacacttacacactcacacactcacacactcactcacacactcacgcacacactcacgcacacactcacacacttacacactcactcacacacttacacactcacacacttacacactcacgcacacactcacacacttttacactcactcacacactcacacacttacacactcactcacacacttacatgctcacgcacacactcacacacttacacactcactcacacactcacannnnnnnnnnnnnnnnnnnnnnnnnnnnnnnnnnnnnnnnnnnnnnnnnnnnnnnnnnnnnnnnnnnnnnnnnnacacacacacacacacacacacacacatatatatatactatatatacatatgtatatatatagatatatacatatgtatatatatatagatatatacatatgtatatatatatagatatatatacttacagattgggtgggtggagcaaagctccaaccacttcacaaacattcacagacacatgtttttggtgggtggagcaaaatccaatgagctggtttcaaccacttcacatacattgatatgtacacacttacatatttgtgtaggttgagcaaataccaatgagtaggctccaacaactttattttgcctcccacaatgtatatatcccagaggaatctttcaagcagtatagaaattacaatgtgattacattccatttttcctttagtgaatgattatgaaaaaaacacttcacagcacaagtaaagaaaacaaatttcttgggatccaggagttgcctcacaagccacgtgaactccagtctcagacagggatacgtattgagcattcaccccaggattgatcgatcagggctatagaccacactccggagctgactgtgacactgagtccagattctacaggacttttaagcctgaaatctacaaacacctgtgccaagttactcaaccaaccaggatttaaggatagaggattttcttaggagcatgtctttgttgtacacttatcctgtgccaattggttggggtattcggctgtggcaggacacttacctaacctaacattcatgttctaacttgccaatcaaaatgtcagctacccatgtacatgtctctttctgtcaagcggaagttcccatggaggccttggagactcaaacttactctatccctactcaaactggaagtcttatcccaaatagtttcttatattggctcaggtgtctctcttatgttggggtccaacccagaggcagcttataaaatcaaaaaccataaaagcatagacataggtgcaggaagtgttacctggtggttgcttcaggtccaagcttcttgtggctaactctacaaagctgttctaattgacttctgttgtgaatggctttcaagaacaccaaagcacaaaacgtcttagtaacagctatgagaaggtttcctcatgacattagtaatggcacataatggcaggcttacagaggtaacattttacctaggccttaacaaaattattcccaagaacccacagacactcataactaagcaacttgttacaaattaacaaggcatgagcaagcaaggtaactttctcagcaggtttctcctactggcaggcagcaatttcaagttacaaagaaatgatcgattattttcttatttatcttaaaaagcagtattataaaaaatttaaaaagcacaaatctaagcttttaaataaataaaaaaaaaaacaacaatcagtcatttctactttaaatcctcatatttcacatctactcaccagcatttttttttattaaatcataacaggaagctgagggcaaggatggatacaagaaatgattatcgcctagatcaccagtcgagcctcagtaagagtcacatcagccaatgctagttagactgccattgttcttgttccttgacctcaaaaagtccctagctcgattaataagagtgtgcttttctgaacttcaaattgttccctaaggttttctgtgtccactaacaaaactatcataacctagcttcagtaacaatttgtttttccaaatgttctttctaagggcgatggtcatccctgaaactctaaagtcccaagttccttcccagagtcataattgaatcattaatctgcttcagcagcaatgtgattgtgagtgccacagacactgcccagtgaggggctggaagcccccttagaggtttcatacaaggcttagattaagagggatgtgaaggcaacaagtagagcaaacctccacagcagcacaaagtcctcaggacatggagtcctcggggctctgcctctctgaggcacacccatcttgcttgtgctaactggtggaccacattccatgagttctaaagctgttttgttgctcttcctgcatagcctttgacaatacaggggaaaatcctgattaaaagttcaacagtcttgggaatagatggaacactcagcaaatgctattttgactggggagagaggatacagggtggggttctttagggagactcatgggaagagctgccttggggtcatttagcagatgtggagggggcaagcgtgataggcctagagtaggtggagttagacctgagagctaggggaagtctaagagttgaggaatgaatgcctaactacatgacttgaattttactcaatggagagtggagaattccggtagccccgtgcaacctccagcaaactcaggcaccctcttccttatcagaagactaaactagagtctgtaagtctaagggcagggagaagaccttctgtgtggggactagcatccatcaacactttaagatgacccttgcataggttctaaatcatgccatctgcttaagcctggctgacaagagaaaccgggagcctgaaagacctgtccactctgtggtctatttatatcaactttagccttgggccgggctcctgttccaaattctggctgctttccttggccattcttcagggaagtgggtcaaattctcatctcctcccactcctaaagtctgtctcatggctggctccccaatatgggactagctaaaatgacagttggtcctgctgctctgaagtccttacttctggcccaactgtcacctgcctggcatcgtgattgcctttctcccacagctctggttcatcctattccatgggaaaattgaggaggaagctgtgtagtcgcaacccaaatgaagaaagaacccatttgtaatggaaaaggtggcaagaatgtaagctattgacagctagggatgaaatgatgcactaaagtacagtttggggtgttatgggggatgggggcacagtgatggtttttctttcaaatttaaaaggttagagagcccaaccagtgttcaagacttctgtcctgtcatggcttacacaggattatcacagtagggcgctgtgacatttcagttctcctcatgacagagtggcagcctagagcctgccaccttcagtgatcagcatgctttgggcctcatggccctgcttgcttccctgtgtgtaggagtctggaaaggtcccaggcttctctgtgctttgttccagggacatttaaggaacagggtaaagaaccacgccagcaagccagacctgtgtcactctccacaaggcccaggatgtgtgatgtctctgctcaccagcagagtccttccagatagtcatttgctctttcagctgtccaaaggcaaatagtttaatttaaaccatgtctgggcatccctatcattggttttagaaagggaaggagttgttctgtctaagtcaggtctggagaaccccaaggtaggggtgtgctggctgaggcaggtactcttctgagtccagagcagggatgcctctgccagagagcagttgggaggaaaaaaaaagactaagaactcacccatgtttcactaagcctgtccaccacttgcctgataaagccacatgcatgctaaagttactaattacagaccgtgcagcataaggggcaggtgttcagagcaaggagcagtagcctacttctcaggggacctgaaacggtagcctacttctcgggggacctgtcagagtccacagtcagcttgctacatcatcttggtctgcttctttgctcctgatgaactaacagcagcatccttggcagtgtgcaggagacaatctccagggttttgtaggactgtttgccaggcttctttgactgatgccggacttctgatgatgatggtgtgtgtggatgtaaaggtaaggttttctgagaacaagcctattaggtagtagctaaggtaaaaagaccaagacactggggtgtaataaccagaaagcccaaggagttactataagaataaagactccagtgtttgcatttgtcgttgtaagttaggccgcaattttaaacatgcttggacacagggatgggacagggatggcttctcacagagaaattttaccttgtgattcaaatggagacagaagtccatgatagacccccatttcccccagatctacacaactcaatgacaccatactaaaggctgtagtgttgaccttgtgctcccactctttgaactctgtgttttaggataaatagatttaggctgctggtcactgaaaaccagttttattttcggaacgctttgtagctgttcttctctagttcatagggagatgtggcttttgtaatcccacggtgtatttttaagctgttaaacaactggactgttaggttcactggcactcttaaagcccatgtaagtcaccttcgaattatttaaattaatgaaattgtgtgtgaattagtaactactcattaccctagaactgatcaattaactgcaacaaaactgtagctgccttcttcggggtacctagaaaggcagggaaggctaatgggtactctctgtctctaccatttcccagccaatcatgggaaggcttaaacaaatcactcatccattttccaccttcattttcttatctgaaaagtagacaaattaatagcccttgctcaaggacaaagtgagttaaaatgttcccagggctctcaatattctcctagactacacaaacgccagcgtggggtcactgacgctgctctccttgcccttcccagtttgtttggccccttcacccacattttcccacttgagagccatgataatgctataggacaggcagagcaaacaccataaattatgaaagtgagtgcggaagccataattttctcatggtgacagatctagtgtgtcagaccagcaaggtagctcagtacataacggagcctgctgctaaaccccatgccctgagttcaattcccagacccacatggtgggaaagaacagactcttgcttaccatcctgttctccacatatgtgtttcatacatgcaaattacatacatatctgaccacatacaatatataaaaaataaacaaacaaacatacagaaacagtgaagatttttttaaaatctagcatgttaacggtgggctgccaaggtacttgggccaataagcccccacactctcaccatatcacggcctcctcaccatgctgaggaaagagtgttcttataatgtgaagggctcctagacactctctcctgagtcccaggatcccacggtgtcttagggttttactactgtgaacagacaccatgaccaaggcaactcttataaggacaacatttgattgaggctggcttacaagttcagaggatcagtacattagcatcaaggcgggaagcatggcagcatccaggcaggcatggtgcaggaggagcagagagttctacatcttcatctgaaggctgctagcagaatactgacttccaggcagctagggtgagggtcttttagcccacgcccacagtgacacacctactccaacagggccacaccttctaatagtgccacttcctggtctgagcatatacaaatcatcacatacagaaagggatggaaattgagaacattttggattctgtgatcagagatcacgttactgttcccaacttgcgcaccatcatcctagggtgacctcataaccagataacggagttacatttaataaaggggggtgggagcctgtatctttcagcaatggctcagtgcttcatgttctgccctttcccagacgctcacatgtaaaagaagcacccgctgaaacgatgatagaaccgaaacttgtcccagatttgccccaaatttcagaattattttcctccaaagtttcattcagaggtctcacatctccggtgtggttttggaatcttctggaatgatgcccaaccctactaattctgggacaaaaacactagcacctagaaaatagcaagcaaagagctctgatgagtaagcaatgacatcgagcagagggtgcctgtcctgccctgccctgggtccatcaggaacgtaaatgatccagctgtagggaatgcaccagctttagaaaaatcagcactgtccacaccacctggccttgcctataggtaaatttctactctaagagaacggcgtgatcactgtgcagacacaaaacaataaaaaaagaaatagaagccaaaggtagactgaaataccttgcactgtttcctaggactttaatctgctaatgatctgtctcctgagtctggctgttgctcggatcctaacagagctgcagtcaaaatgtaacttgggtttaatcatccaatcaacagtagtgtcaaaaacttagaaattttaacttatgaaaatcatttattttttttcctttcaattcccttcaagaaaacaagtatttcttagttattaaagggatgtggacatagatgcgaagcagtggactgtgcttttcattttggtcccaggagccaggcattcactggatttaatcattttgaatctttgtgtctcctctgagatagggccagatgtaaccagaaggatttatagggtgtaaaattgagaatggattaaaaaaggctctctgtgttctgcccagcacatcctaaatcaacattccccccggtggaccagaccaatctccggctggccaattggggcagttgccatagcaactgacaggcaagcacagccggtagaatgggaatgcgaacaatggaatgataacattgtgtgcagagctgcattctgagatggcttccagacagccgcatcctggaagtggggtttgcccaccctccttgtgccatggttcccaccttcttgtatttttgctgctcaattaaaatttattgttttctttcctattcaaaaactttactgccataaatagtactggtgagaaggaaatctgcccccaccagaaagctgaaacagcgttacaaagactgcagggttattgcattaacactcagttcaaatacccagagattgaaggaggtctacggtaactcctgtgattctttagcgccacctagtgtcctgctagatactacttggtcccatgactggacagggaaaaaagaacaggattgaataggaaattcgtagtccctcttctgatagaatatgcacaggaccttttctaaatcttttgttcaaaaacgttaataactttgacataatacagcaatgagagaagaatggaagtcatgtcagttttagagaagactttaaaagactacacggcgaccagacaaaaaatcctcaggttttttgtctaaggcgtctcacttttctccaaaaagtcagccttgaagctgaacacaacaattcacaccaaggtggccaggagtcagaacaagggataaccctgaataatatagcacccgaggatacaggataagttccagtaacggacttacaccaactaaaccccgccccaacccctcactgcctagcaataatgtcatcgagggggtgagtcactgattaagtcagagtccacagcatctagttgggcctggaaaagcagtcgcagacacgccccatgctttgctcttaatccagccaagtcaacaaagatgtatgagcacaccagaggcgggagcaaggagtcaggatgagaggactggctggtgagggttcctaatgatactactactgttaactcttgatttcctctcagaaaatctctctgccgttgcagacatcatgaatgaatcagtagagacaaataaaatgagtatcatcaacccctctttataactctctgctctggtcagtgggtagcgcttcttgtccagcagtcatctccggtctaagaaatcgcacccatctcccaccgctgcctttgccccatcgacattcaaaaccgcaactgagtccattggacttcagaaacgtgaaatgatgggcctgtttctgtgtgtttcctgcagggtttgagttttttgaaaccagcgccaaggataacatcaacgtgaagcaaaccttcgagcgcctcgtagatatcatttgtgacaaaatgtcagagagcttggagaccgacccagccatcacagcggcaaagcagagcacgaggctcaaggagacccctcctccaccacagcccaactgtggctgctaatgtcccccacacaggagctccaaggggctccagagcagccaagaagcagcattgataaatggtctattagccttcgattatactgcctaataattatttgaaggaagtctttgatggcagtggcccatatatgcattcaaaccgtgagcaatttcctgtgttaatatgtggcaaacttgctcttatatttgtaaggatcattcatctataaacacctgctacttgcatgtaacttatcatttatttgtctttcataatctttttggggggtgcaacctttttctcaattaagctattgcagaaactacagactataattttactgcaaataactttcatgccacggattcatatcatgcttttcatttgtatggatgataacctagagtccctttgtgtgtgcgacatgtgtgtgtgtgtgtgtgtgtgtgtgtgtgtgtgcgcgcgggcgccttgcgtgctg

SEQ ID NO: 3241 - DNA, 1314 bp, Mus musculus
agaacgcttgtgcggagtcaggagcggacagctccggtgctgatgttggagcgggctacagagccccacgcgtgcggagtgttgcggggagcgcgcaggctgtgcacgcttgaccaggctcccggaccagcgctgtcctagcaagagagaaaggacatttgcctacaatgagacacgaggcgcccatgcagatggcctctgcacaagatgccaggtttggtcagaaagactcttctgaccagaacttcgactacatgttcaagttgctgatcattggcaatagcagcgtgggcaaaacatctttcctgttccgttatgccgacgattcctttacatctgcattcgtcagcacggttggcatcgatttcaaagtaaaaactgtattcaaaaatgagaagagaatcaagcttcagatttgggacacagcaggccaggaaagatacaggaccatcaccacagcctactatcgaggggccatgggcttcattttaatgtatgacatcacaaatgaagaatccttcaacgctgtacaagattggtcaactcagatcaaaacatactcttgggataatgcccaggttatcctggctggaaacaaatgtgacatggaagatgagcgggttgtctcaaccgagagaggccagcgcttaggagaacagctcgggtttgagttttttgaaaccagcgccaaggataacatcaacgtgaagcaaaccttcgagcgcctcgtagatatcatttgtgacaaaatgtcagagagcttggagaccgacccagccatcacagcggcaaagcagagcacgaggctcaaggagacccctcctccaccacagcccaactgtggctgctaatgtcccccacacaggagctccaaggggctccagagcagccaagaagcagcattgataaatggtctattagccttcgattatactgcctaataattatttgaaggaagtctttgatggcagtggcccatatatgcattcaaaccgtgagcaatttcctgtgttaatatgtggcaaacttgctcttatatttgtaaggatcattcatctataaacacctgctacttgcatgtaacttatcatttatttgtctttcataatctttttggggggtgcaacctttttctcaattaagctattgcagaaactacagactataattttactgcaaataactttcatgccacggattcatatcatgcttttcatttgtatggatgataacctagagtccctttgtgtgtgcgacatgtgtgtgtgtgtgtgtgtgtgtgtgtgtgtgtgcgcgcgggcgccttgcgtgctg

SEQ ID NO: 3242 - protein, 227 aa, Mus musculus
MRHEAPMQMASAQDARFGQKDSSDQNFDYMFKLLIIGNSSVGKTSFLFRYADDSFTSAFVSTVGIDFKVKTVFKNEKRIKLQIWDTAGQERYRTITTAYYRGAMGFILMYDITNEESFNAVQDWSTQIKTYSWDNAQVILAGNKCDMEDERVVSTERGQRLGEQLGFEFFETSAKDNINVKQTFERLVDIICDKMSESLETDPAITAAKQSTRLKETPPPPQPNCGC

SEQ ID NO: 3243 - DNA, 924 bp, Mus musculus
tagaagacttctgggtttccctctgaaagaaagccctccatctaaacccgctgtcccttccatccctcatttcggtctcgcaaaccactcctccaagcctttccattgtgctctttcgcctgcataagaccttcatctcctttgtagtggggagacttacttgaggctatcagaacctccggctgcaatggagctgtatggaaagatggcctctgcacaagatgccaggtttggtcagaaagactcttctgaccagaacttcgactacatgttcaagttgctgatcattggcaatagcagcgtgggcaaaacatctttcctgttccgttatgccgacgattcctttacatctgcattcgtcagcacggttggcatcgatttcaaagtaaaaactgtattcaaaaatgagaagagaatcaagcttcagatttgggacacagcaggccaggaaagatacaggaccatcaccacagcctactatcgaggggccatgggcttcattttaatgtatgacatcacaaatgaagaatccttcaacgctgtacaagattgggcagcccagacacagaaacaggcatgatgtgttttctatgcacagttgatgacaaacaatggaaataatatcagtgtactatgaagaaagcaaaccaatgctctcagctcgaaccacattaagaggtaatgaatattttgccttacctttaccccatacaccgagactcctgctccttccaaaatatgcatggaatatttgagttggactgccttatcttataaattttattactgagattattattttgtttaaaatgggggtatatttgtaaacaagttagtataaattaaaagtacaatacctaaaggtaaccagaaatgtcacctcagcaatgggaaatatctgttcagccctcacagctgaaagtt

SEQ ID NO: 3244 - protein, 130 aa, Mus musculus
MELYGKMASAQDARFGQKDSSDQNFDYMFKLLIIGNSSVGKTSFLFRYADDSFTSAFVSTVGIDFKVKTVFKNEKRIKLQIWDTAGQERYRTITTAYYRGAMGFILMYDITNEESFNAVQDWAAQTQKQA

SEQ ID NO: 3245 - DNA, 967 bp, Mus musculus
agaacgcttgtgcggagtcaggagcggacagctccggtgctgatgttggagcgggctacagagccccacgcgtgcggagtgttgcggggagcgcgcaggctgtgcacgcttgaccaggctcccggaccagcgctgtcctagcaagagagaaaggacatttgcctacaatgagacacgaggcgcccatgcagatggcctctgcacaagatgccaggtttggtcagaaagactcttctgaccagaacttcgactacatgttcaagttgctgatcattggcaatagcagcgtgggcaaaacatctttcctgttccgttatgccgacgattcctttacatctgcattcgtcagcacggttggcatcgatttcaaagtaaaaactgtattcaaaaatgagaagagaatcaagcttcagatttgggacacagcaggccaggaaagatacaggaccatcaccacagcctactatcgaggggccatgggcttcattttaatgtatgacatcacaaatgaagaatccttcaacgctgtacaagattggtcaactcagatcaaaacatactcttgggataatgcccaggttatcctggctggaaacaaatgtgacatggaagatgagcgggttgtctcaaccgagagaggccagcgcttaggagaacagctcggggactttctctagtctctgaaacccaagtcctagcacgaagctctgtttgatgctggcatatgcttcatcccccatgtacatagaaaccgtggtatttcgtctgtgaaagccattcatggaaacgtccctgctccggctagatcacacaccctatcctgactttctcttctgcccttaactgtaattagtttccaatcacctggattggcagcctctgacaaggaagcagttgtttgtttaaaggaagaattctaaagatggcaaattttcatctccatctcctctgttctaggagaacaaag

SEQ ID NO: 3246 - protein, 169 aa, Mus musculus
MRHEAPMQMASAQDARFGQKDSSDQNFDYMFKLLIIGNSSVGKTSFLFRYADDSFTSAFVSTVGIDFKVKTVFKNEKRIKLQIWDTAGQERYRTITTAYYRGAMGFILMYDITNEESFNAVQDWSTQIKTYSWDNAQVILAGNKCDMEDERVVSTERGQRLGEQLGDFL

SEQ ID NO: 3247 - DNA, 290912 bp, Homo sapiens
  misc_feature (1)...(290912): n = A, C, G, or T/U
cacctggaaaatcaggtcactcccaccctaatactgcccttttccaatgggcttaacaaactgcacaccaggagattatatcctgcacctggctcagagggtcctacgcccacagagcctcgctctttgctagcacagcagtctgagatcaaactgcaaggtggcagcgaggctgggggaggggcgcctgccattgctcaggattgagtaggtaaacaaagcagcctggaagcttgaactgggtggagcccaccacagctcaaggaggcctgcctgcctctgtaggctccacctctgggggcagggcacagaccaacaaaagacagcaataacctctgcagacttaaatgtccctgtctgacagctttgaagagagtagtggttctcccagcacacagcagcttgagatctgagaacaggcagactgcctcctcaagtgggtccctgacccccgagtagcctaactgggaggcaccccccagtaggggcggactgacacctcacacagccgggtactcctctgagacaaaacttccagaggaatgatcaagcagcagcatttgagattcaccaatatccaccgttctgcagccaccgctgctgatacccaggcaaacagggtctggagtggacctccagtaaactccaacagacctgcagctgagggtcctgactgttagaaggaaaactaacaaacagaaaggacatccacaccaaaaacccatctgtacatcaccatcatcaaagaccaaaagtagataaaaccacaaagatgggggaaaaagcagagcagaaaaaccggaaacactaaaaatcagagcgcctctcctcctccaaaggaacgcagctcctcaccagcaacggaacaaagctggatggagaatgactttgacgagttgagagaggaaggcttcagaagatcaaactactctgagctaaaggaggaagtttgaaccaatggcaaagaagttaaaaatttgaaaaaaaattagactaatggataactagaataaccaaagcagagaagtccttaaaggacctgatggagctgaaaaccacagcacaagaactacatgatgaatgcacaagcctcagtaaccaatgtgatcaactggaagaaagggtatcagtgatggaagattaaatgaatgaaatgaagtgtgaagagaagttcagagaaaaaagaataaaaagaaatgaacaaagcctccatgaaatatgggactatgtgaaaagaccaaatctatgtctaattggtgtacctgaaagtgatggggagaatggaaccaagttgaaaaacactctgcaggatattatccaggagaacttccccaatctagcaacgcaggccaacattcacattcaggaaatacagagaacgccacaaagatagtcctcgagaagagcaactccaagacacataattgtcagattcaccaaagttgaaatgaaggaaaatatgttaagggcagccagagagaaaggtcgggttacccacaaagggaagctcatcagactaacagctgatctctcggcagaaactctacaagccagaagagagtgggggccaatattcaacattcttaaagaaaagaattttcaacccagaatttcatatccagccaaactaagcttcataagtgaaggagaaataaaatcctttacagacaagcaaatgctgagagattttgtcaccaccaggcctgccctaaaagagctcctgaaggaagcactaaacatggaaaggaaaaactggtaccagccactgcaaaaacatgtcaaattgtgaagaccatcaaggctaggaagaaactgcatcaactgacgagcaaaataaccagctaacatcataatgacaggatcagattcacacataacaatactaaccttaaatgtaaatgggctaaatgctccaattaaaaggcacagactggcaaattggataagagtcaagacccattaatgtgctgtattcaggaaacccatctcaagtgcagagacacacataggctcaaaataaagggatggaggaagatctacaaagcaaatggaaaacaaaaaaaaaaaaacaggggttgcaatcctagtctctgataaaacagactttaaaccaccaaagatcaaaagagacaaagaaggccattacataatggtaaagggatcaattcaacaagaagaacgaactatcctaaatatatatgcacccgatacaggagcacccagattcataaagccagtccttagtgacctacaaagagacttagactcccacacaataataatgggagactttaacaccccactgtcaatattagacagatcaacgagacagaaagttaaaaggatatccaggaattgaactcagctctgcaccaagcggacctaatagacattacagaactctccaccccaaatcaacagaagatacattcttttcagcaccacaccacacctattccaaaatttaccacatagttggaagtaaagcactcctcagcaaatgtaaaagaacagaaattataacaaactatctctcagaccacagtgcaatcaaactagaactcaggattaagaaactcattcaaaaccactcaactacatggaaactgaacaacctgctcctgaatgactactgggtacataatgaaatgaaggcagaaataaagaggttctttgaaatcaatgagaacaaagacacaacataccagaatctctgggacacattcaaagcagtgtgtagagggaaatttatagcactaaatgcccacaagagaaagaaggaaagatctaaaattgacaccctaacatcacaattaaaagaactagagaagcaagagcaaacacattcaaaagctagcagacggcaagaaataactaaggtcagagcagatcagaaggaaatagagacacaagaaacccttcaaaaaatcaatgaatctaggagctggttttttgaaaggttcaacaaaattgatagactgctagaaagactaataaagaagaaaagagagaagaatcaaatagatgcaataaaaaatgacaaaggggatatcaccaccaatcccatagaagtacaaactaccatcagagaatactataaacacctctacacaaataaactagaaaatctagaagaaatggataaattcctcgacacgtacaccctcccaagactaaaccaggaagaaatttaatctctgaatagaccaataacaagctctgaaattgaggcaataattaatagcttaccaaccaaaaaaagtccaggaccagatggattcacagccgaattctaccagaggtacaaggaggagctgttaccattccttctgaaactattccaatcaatagaaaaagagggaatcctccctaactcattttatgaggccagcatcatcctgataccaaagcctggcagagacacaacaaaaaaaaagagaattttagaccaatatccttgatgaacattgatgcgaaaatcctcaataaaatactggcaaaccaaatccagcaacacatcaaaaagcttatcgaccatgatcaagtgggcttcatccctgggatgcaaggctggttcaacatacgaaaatcaataaatataatccagcatataaacagaaccaaagacaaaaaccacatgattatctcaatagatgcagaaaaggcctttgacaaaatttaaaacccttcatgctaaaaactctcaataaattaggtattgatgggatgtatctcaaaataataagagctatctatgacaaacccacagccaatgtcatactgaatggacaaaaactggaagcattccctttgaaaactggcacaagacagggttgccctctctcactactcctattcaacatagtgttggcagttctggccagggcaattaggcaggagaaggaaataaagggtattcaattaggaaaagaggaagtcaaattgtccctgtttgcagatgacatgattgtgtatctagaaaaccccaatgtctcagcccaaaatctccttaagctgagaagcaacttcagcaaagtctcaggatacaaaatcaatgtgcaaaaatcacaagcattcttatacaccaataacagacaaacagagagccaaatcatgagtgaattcccactcataattgcttcaaagagaataaaatgcctaggaatccaacttacaagggatgtgaaggacctcttcaaggagaactacaaaccactgctcaatgaaataaaagaggatacaaacaaataggagaacattccatgctcatgggtaggaagaatcaatatggtggaaatggccatactgcccaaggtaatttatagattcaatgccatccccatcaagctacccatgactttcttcacagaattggaaaaaactactttaaatttcatatgcaaccaaaaaagagcccacattgccaagtcaatcctaagccaaaagaacaaagctggaggcatcatgctacctgacttcaaactatactacaaggctacagtaaccaaaacagcatggtactggtaccaaaacagagatatagaccaatggaacacaacagagcactcagaaataatgccacatatctacaactatctgatttttgacaaacctgagaaaaacaagcaatggggaaaggattccctatttaataaatggtgctgggaaaactggctagccatatgtagaaagctgaaactggatcccttccttacaccttatacaaaaattaattcaaggtggattaaagacttacatgttagacctaaaaccataaaaaccctagaagaaaacctaggcaataccattcaggcatgggcaaggacttcatgtctaaaacaccaaaagcaatggcaacaaaagccaaaattgacaaatgggatctaattaaactaaagagcttctgcacagcaaaagaaaccaccattggagtgaagaggcaacccacagaatgggagaaaattttttcaacctactcatctgacaaagggctaatatccagaatctacaatgaactcaaacaaatttacaagaagaaaacaaacaaccccatcaaaaagtgggcaaaggatatgaacagacacttctcaaaagaagacatttatgcagccaacagacacatgaaaaaatgctcatcatcactggccatcagagaaatgcaaatcaaaaccacaatgagataccatctcacaccagttagaatggcgatcattaaaaaatcaggaaacaacaggtgctggagaggatgtggagaaataggaacacttttacactgttggtgggactgtaaactagttcaaccattgtggaagtcagtgtggcgattcttcagggatctagaactagaaataccatttgacccagccatcccattactgggtatatacccaaaggagtataaatcatgctgctgtaaagacacatgcacacgtatgtttattgcagcactattcacaatagcaaagacttggaaccaacccaaatgtccaacaatgatagactggattaagaaaatgtggcacatatacgccatggaatactatgccgccataaaaaatgatgagttcatgtcctttgtttggacatggatgaagctggaaaccatctttctcagcaaactatcgcaaggacaaagcagcaaacaccgcatgttcccactcataggtgagaattgaacaatgagaacacatggacacgtgaaggggaacatcacacactggggactgttgtggggtgggggagaggggagggattgcattaggagatatacctaatgctaaatgacgagttaatgggtggagcacaccaacatggcacaggtatacatatgtaagaaacctgcacgttgtgcacatgtaccctaaaacttaaagtataataataataaaaaaagtaaaatattttccaacaccttacttgaagaagaaagtataatcaattatccttagatcttatatcctgtttctcaaccagcaaaggagagataactatcagattgcatatctttctgaatgaggtatttgacttataatttaatgtttggtaattttaatgatttcttagtaaaagtatggtcaaattatgagacagcaaataagtgttcatgtccaaagtagtgattattgaaatgtcatgtatttacaaagaagtctggactggaagtcacatgaactgtatgttagttctgtctctgtttgtaattagtgtgatgctatgtgagtcattactcatctttgggtctttatttctttatctgcaaattaagaaagaagaacaaaatgatatttaggttcctttgaagatcttctagtcaatgtctctcattctacatttataattagatgatctttttaaacatatttaggggtacaatatactttcccagagaatatcattgatctgattactctttcctataactccttaaagcatttactggtaagagtggacaagcagttaatcaggcactgttctgccactcatgttttttattattgttatgttacctatttatctatctggtctccagaattagtttgtagtccccttaaggatgaagatggtgtcttgtctttttgaccctcctcatttgaaattataatagataaccctaactataatgaaaatagttgatacacttaaaatttgattatattaataaattgcaatatactctcaaaatagttgtctttttccaatatttgtaacagcactggatgactcttgggctttaggcaggttatttcacttttctgggatctaattttgtactcagaaaatggaagaattgagctacattatctgtaagatcccttcttagtgtactagtctttttaaaatgctatggaagggccacgtgaggtggctcatgcctgtaatcctggcactttgggaggctgaggagggaggatcacttgtggccaggagtttgagaccagcgtggccaaagtagtgaaaacccgtttgtaacagaatttgtgactttcaactgggcacatgtccaatcagaataaagatgacatttttcagcctcctttgtaaaaggtatggtcataagattaagttctaggaactggaatataagagctgtggtgtacataaagtgatgaagaaatgcccttcacctttcgtccttcctgctagctggaatgtggatgtaagagttggagctcaagcagccatttaatgaccttaggaatgaaattcatggatggtggcctgatttcaagcaaagctacagtgctcctgctctgattttagctagtcatcttcagtccacttttcttggtttatctgactcctgactagattttttttcctctttgcacaccttaaattctcaactaagacactatgaacaggacaaaattaagttccccccaatgttttttaaaaactccagctttaggacaaaattaagttccccccaatgttttttaaaaactccagctttaaactaaactttcatgggttcttccacaaataaaagacatactaaaaaatccgaagatatatataattttagtgaaatgttgagaagggataaacttctcaaagaacagtaattttgcaagataaatatttataaggtttaaatatgttctatatcagactgaattctgagaatttcagaaagtgatgatagtacaatatacataagaagttgttctgaagaaaggcaggctctaagtagctaagcaaatattattaaatgccaaacaattctatacatttaaatgtcaggattattttgttggcatttctcttgaaaacaatttttaaagagatgcatctttagatacatcttaattttaaaaattgcagaagtcatacttctaataagttgctactgtgatacgtattggtattggattttcttttaactttccattttgttattagctaatttacacgaaacttctctaagcatcacactactctcaactatgaggtttatgtttttaaatatatgccttttctattttttttttttttcagatgggggtgtctcactatgttgcctaggctggcctcgaatttctaggttcaaatgatcctcccaactcagcctttagggtaactataactgcaggcacgctccaccacacctggcttaaatgtattttctgaatagttataaaaactacttacctaggtgatatcgcattacattctcactaattgcaagattagaagacagattatagagttgttaaataatacaatcaactaaaattaatggaaatattgaatatggtaggttcccaatattagactgttgcattattgagtccataccgtgacatttttgaggtttgcacctttgaaaaagtgttacacatagattcttttaagacaatgtttctcaaattatggcaagggaaccacttgcatcagaattgctggagtgtttatttaaaatgctaatttccagacctctcaaaagatctagtgaatcaatctctacctgtggcttaaaaattttaactttaacctccgtctcaacagattttcaagtacgtttaagtttcagaacctctgttctactgctgcaatgaagtttaaagctgattcaagttattccttccatacctccatgccaatatcacaatcattcctttttcactctgcctccgttataattttgacttcatgacaaggcagggctgatttgctggatgatcaacgtttacttttaagtagagagggctgtctctagatagttacagaggacatggatagtcatacctatcagtcaactgacaggaaaaggataagtctaacaaaagtacagttcctagatttcaaaaccatttttttgaactaatctgggaggagtatagttgtaatataaggaatgactttgtgttaaagaaaggacaggataacttaatagaggtctcccatctcattctgtcacggtgcttttgggttccggtgatgaatgtgttcattttatgtggcttgctctgggtaaataacccagtgccctatcagctctgcagcccgcggccagcggcagtgtgtgcgcgctaatgacggcggaaggtgcctgggggagggcctggggaggggctggccagcgctatcgcgcccctggcacttcctaagagactgagccctttctctgcagctgcagcttggattccacgctttccctccagaggaaagaagccctccatctaaatcagctgtcttctccacatccctcctttttctctccgccagacgccacccctaccccttctattgtgttgtgccttttcattttagccccgcttcctacgtagagccctaacctcctttgtagcgagggcacttgagaatttctgaacctcgagttgtaatggagctgtatggaaaggtaagcaggcgaaaggagttccttggggtgcttagccagaaatctcgctttcacgcacttcggtgtgcgggttgtgtgtgtgactatgtacgcgcgcgcgacttctcagtgcaattatgcggataaaccactttccttatgtgtgtaccgttaatcgtctttctcccctacgtttggtgaatgagattgtaaaactgccccactctgcctaaggaaacgtagaaactttcccgattcggatggggaggggtagggcggagagtcccagagaccagctctggcttcgtttgcattggaaattagcacaaggtagtgttgtttcctaatcagaaaatcaccatctacttccgaaggcgatagttagcaaagaaaaatctccagctgagataagctggggtcacattcgcctgcccctggcgaggaaaagagcaggggagactgggagaggtaacccaggagcgtttggaaaggagtagggaggctccgcggccgagcccgactggcggatcgagcctgtttaatggtttgcttgcttgccgggagttgtagttcaccgctcgcccgtttgccgggaacacccggagggcgagactacagctcccaggagtgcacggggctcctcggcagtacgcgtgtgcggcgccaggagaggacagctccagtgctgatgttggagccggttagcgaaccccaagagtgcagagtgtggagcgtggagcgccgggactgtgcacgcttgaccggaagcccagaccagtgcggtcctagccagagagaaaggacatttgccaacaatgagacacgaagcgcccatgcaggtgggtccataaagaaagagtggcctcgggaggaattgaaagagatgcttttccccttgctccgcgcacaagcagttcaacgtaaggaaaggtctaggcggtcacccgcggagatgcggctctgtgacatgaccctgggaacagagttgggtttctttacgctctgtgtggctgtgattggggctgtcttgatgagggatcgggctattcgcaatctttctaggctctgtaaagaggataagagtgtctgtctaaaatgaaaacccaagcaaacaaaagtcagaggagcatgcaatctcgtgttggcattgatctcctctcttggcatccggggtttgagatcgcggtgaaaactcacggatttaaggcagatagatcagattcggggttgaaggctccccactggagtcggcatagagcgaattccgcttggttaaaggcgcattaaataaagagaagccaatgttaggctcctcaaagtcccctttcttcagttaggctcccagtatcagcaaaaaatagcaaacacatcggggcttggcatatccctgagctatgccagcatcactgtccacacaactggtttactctgttttggagacagccccctctgagctttcctgtgttatgtgcccatttgttctccgattccccatttcaatcacattcttaggtttgtttcctttgagaaatgcaaaggactctggtgcagaagtaccactgcctaagcatcttgcttaagttttgtttttaagtaaagatgagtgataattctcgtctctatgtactaccagttaacgttaaacatcagcttgtgtttattaatcaagcagtgatcctactgtgtaacagaaaggcattttatgagtggggttgagagaagaatagaaaacatcatttggaatgtgctgtctctcctgagaacccacctctgctgccaaacccaagagtataaatatttgacattaattcggacttcagcgttttccaactggtttcttcatgaatcaaggactttaaacatatgctttgatttacttttaatttattttatgggttatgtatattaagaaccccttactggactgttagatgaaaaatctatagaatttaattgtttgttgggtgattatataagggaagtcctcaaattacctatgagttattgaaaatttgatttgttccagggaacagtggcccctttgtgtgtcttctaatacctctatttgtgacttagcttttcattatagacctgatgtgaaaagaatctgaacagacaataaaggtacaggctgttgcaatcaagatatattggtttatgataattttctattactggagatactaccaggagccaactggctaaattaatcatatttaattataagtaaacactaattgtagactttaaaagtagatcattatacttcactatgtatatgtatattaaaacatgtacatcttaaatttacacaataaaaaagatttccaagaatttttgaaaaataaagtagattgttaatatttaaagtaaactatgtatgcactgatattttttcaatcaaaataaattacgaaaaatttaaccacactgtatatcaattttgctttcttacaagagttgcttagaatgttcagaaaggtcattaaaatattacagaactgtattaatgtttcaggaaacagttaaaattattttttgtgttcaccaactatgtagtaggcactgtgattttctattttagtcaaaactttaatgaagaactaaaataaaaataaggtaaaatgaaattaatttgcttgtggatggagttattgtcatatttataatgtatttttagtcgttggactaagtttttgaaatttaaaatttccaaatgctgtcatgagtaatgtacattttaggaaatcaaagacttttttagcatatttaattaaagcacatacattaattcaatttaactaataaattgttgttatggtgaccccatctccattattatcaattttcaaaaatatgtaataatagataggataaaaactataagcttactctgaatattttaaagtaacaagtaatgtttcagcaccgatatttctgaattgtaatcacatttcacgtgactttgatatatgacaatgcaacaagataaataattgactttttttttcatttaaagactgaaccacatcatcattttaaatatatgccccaaatatttttttacttaggtctgtagaagatgactcacaagcaaaacctcattttatggttccataaaataagagatttcttctctgcttttaaaaaatatttagttcatttgttgatgtgaaagaaaatgagctttttaatgtatttgcttatttcccaatttacttcttgtattttcttaaatcaaagaatccttttaaaaatcatgtaaggtcttttaaaaagcatttgatgtatctatataaataagttgatgttctgttcgaggtagttatctttgatatgtgcctattttatgaagagtatttctttctgaattgagggaaaatgagggataattgttttttatagtaactaccaaaataatatacagtgataatctctgacatctttatttcctttctaatctaaataaccaggaatagcatttggtaagtgtcccaagtgataggcttagaattctaatgcaggagatggtcatttgtatcttctcattcagtgtatacatgaatcctgaaggccaaatgagatgagaaataacagttctcatgacttgaggacaagactctggttaacaaattgtcatttgattcaggagccacattgaacaaattctagtttatctagtgctttacctgtgctgagccctgtgacttagatttcattgtatttgtgtgtatgtataaaacaatttttatatgtatatatactatataacaatcatacatatctatggatatattttacaagagtatttacaaatatatttaaaaatcctagcagtcactattaccctaattataggcatgatcactcgaacttattaagactaaataactttcccactaggatagagtaaaatttccgccagatctctctgtctggaaaacccacgttctttcctctgttacttttgattccccaagaagacataaattggtggtgtaaagaatgagacaactattgatataatttgagtcattcatttggttcagaagaaagaaaaattggccctatcttcttcttataaaataaacttgcataaactaaacagaatatttgaaaaggggcaatgttttaaaaatggtttgcttctatctattataatttctggcagggtcacgtactctcttacaggaccaaagtggaattcattgtctctgactaaatgcttacttttccaatttgttatccacaagcttttggggtcacttcataaatgcagtcttctgactattgaggaaaattcaaagaaatatatctacccaaaacatggagcagagtgccaaaaaaaaatgtttggctaaagatgaggaggattgaagaaggactatagatgtaggctgaagatgaagtggagctaaaaaccattagttatatattaaagttagccatactgtacacaacaccaaattacaaagaattaaagtctaaatatcactgttttatttggctatggaaagtacatggcatttttgcacttcattattgttgaattcctaaccatatccatcctcagtgatcatccctctatctttctgagaaatggacatgtagtcctcatcctttacagaaacagaaaatccctaattgactttagagaaatgagaaattcttccttactccatttgggctaattgctcaagtatccacttttcttctgtaaaaggaagtggaggatagcaagaaaacttaacctatagcaaaaattcacttttgtagtataagaatgcttttccattgaaactgcaaaattatcataattttctgccaccattctaagcttatactggaattggcaagtcctttcttcaccatcatattccaggaaggaaatatatgtttatgctgaggaataggttttcttgaaactactcttgcccactcaactcgctaaatacaagcagctgggccacctcaaaaaaatgttcttttatatagattaaaggttttccaaccatttttccctttcttaaattaatgtggctcagaggttctgtgggaatcatcttagcaggtcagtctattaccaaggatactacagcctgtgaagattaaatctttgagagttattcagaataacatagatctttagcatttttcgttcattagtttataggtttttagataatatttatatacattgaaatgcacaaatcttaagtgaacaatttgataaattttgacaaatgtataaatctgtgtaacacacaccattataaagatatagaacatttctaatcatccctgagtattccttcatggtttttcctaattaatatacctatgcagtaaacttttttaggtgagacttgaacttgagatccctgggttctcctgaccaatcacgggttagctgtgggattttcctgtgtctcctctctccctgggaaggttcaaaagtcactcagccctgcagagtgacttaaccataggagtttgatttgttctagaacttcatatagttctgtagaacatgcagtatgaacatactgtggaacaaaaaaatatgttcttgtttgagtctggcttatttcgttcagcataatgtgtatgagattcatccatgttgttgcatgtttcaataattcattccattttattgctgaatattatacttttaaaatcaatttaatatacttttaaaattcattatcctgtttatgaacttggaggtaatttctaatttggggatactaagaataaggctataaatgttttttctattgttcttttttatgataatatcttttcacttctcttgggtaaatacctaaaagtaaaattgctggaataaatggtaagtatatattaagctttataagaaacaatcaaatcttttgccaaagtgggaggaccggcaattctcaccagcaatgtatgagagagttttagtggctccacatcttcaacagcatgtaatgtcagtggtctttttagttttggccacttggtaatgagtgttttctggtatctgattatgatttaaatttgaattttcctaatgatgaacggtttttagtatatttttatgtgcttattggccacttatatatcttcccttgtgaatcatgggttttaaccttttatgcatctggggggtttgtttttattgtttagttgcaagagatctttcatcttcagtttagtcctttgtcaagtcaggtagatatataaataaaggtttctcccagttggtggcttgtatattcatattctaaatagtgccttttggtgaggatttttttgaattttgatgaaatttaggttaattaattatacctggggtctgtatccagactctgatctgtttgtcctgactctgcgtccagaggccttgctatatttatttctagttttctttaagattccataagaatttcaacataaactatcatattatttacaaatagagatagtttatttcttccttcccaaagactctctttttttccccatatcttattgaatagaatagaacaaccagtacaatgttgaatagacgtgatgacagcggacatccttatcttgttccccattttaagagggaagaccttccgttttttatcatcaagtgtgaaattagctgtagggttttgttactatgtttctttgttttggtatagatattatttattatattgaacaaatttgatttctcggttgatgagaaaatttgtttttaacataagtgggtgtcaaatattgtcaaatgcttgttctacatctattgatgtgattgtgtggtttatctactttattttgttggatttcatggatggattttttagctaatctggcattccttagataaaccctattggtcatgatatattgtcctttctatatatagctggattaagcttgattatattttgttaagtatttttttgcattagtcatgatggatattgggctatgattttctcttaatgccttcatgaagttatagtattggaattatgcttataaaacaagctgagaagtactctttgcccctcagttttctgaataattttgttgcataagattagcatagtttggtttgttaaatgtctactagagttcaccatgaagccagcggagcctggagttttctttctgaaaattttaaataagagttttaatttttaaagatttcattgatatactaatatctctattatctatctatgtatctccctttagtatattgtattaggcagaatagcatccctcccaaaattctccatggcctaaccctgtaacgtgtgaataggttacattttgtaacagaatggactccgcaggtataattaatattataaactttcaaatagggagattaacctgcattatcaggttggtccaatctaattacaatacctcttaaaagtagagaactttctctcattgaatttagagtgttgtggcagaagtcagtttcaaaacatgaaaagaattgttggggtgaagatgaagaaggctgtgtgtcaaggaagcagggacctcagtcctacaaccaccagcaactggattatgctgacaatctgaatgagtttggaagtggaatctttcctagactgtccagatcaaaggccagtccagccaacacattgattttagctgggtggacctgagcaaagtgagcagaggacctagctgagatttctggctcagaaaacaataagtgggtgtggttttaaatatccattatagctgcaatcgaaaactaaatatgcatataaaaatttttctatttcattgtgagtcagttttggtaaattgtgtttttcacttcatttttccaatttattaacacaaagttgttaaaaacatttttaataccttttaaatatctctaggatctgtagtgatatcccctttctttcctaatactgatcatctgaggtttctccgtctctctcatgccagtcttactaaatgtttatatcagtattaatgtcaacttttacctttgttaattttatttagtttgtattttattgattttagctgttgttttaaaaactatatttgtgtttcttatacttacttagtagaagcttttctttatttagattcttaaggtataaatttggttcacttatttatttatttatttatttatttattttgaaggcagagtctcactctgttgcccaggctggagtgcagtggctggatctcagctcattgcaatctctacctcctgggttcaagcgattctcctgcctcagcctcctgagtagctgggaacacaggcgcccaccaccacacccagctaatttttgcatttttcgtagagacatagggtttcaccatgttggccaggctggtcttgaactcctggcctcaagtgatccacctgcttcagcctcccaaagtgctgggattacaggtgtgagccactgtgcctgtcaggtcactgattttaaatatttcttttctgctaataaatataagcactagaaatcataaatttccctctaagtactgcttaagctggcaagcacaaatttctgaatgtagtatttacattacattttatttcaaactatttggcacttatgatgtttttgtttaatccatgggtttaaaagtatatttaatttccaaatacttgggtatttttacagatattttattgatactgatgactagttaaattctattgctactatggaagatattctttaagattttaattttctaaaattgttgacttgtttttagttcagcatgtggactgactttatgaacattccatgtgtgcttgtgtgtgctgtagttgtgcagtgtagtagtctctaaatatcattagggttatggcattgtgtggtgttgctaagacctttaatatccttatcgattttggtctatttatactatcaattactgttaaagaggttttcaaatctccagctattattgtcaatttgcctacttatccttttagttcttttgagttttttcatatattttgatactctgttattaggtatacacacataattttaaatgtgtctgcctgagtaatttttccttttatattatgaaatgtcccactttatctccagcaatactccttgtcttaaagtctatattgtctgatattaatagagaatgcagacactcttgccttcttaatagtattttcatagtatatatatatatatatatataattttatttattttcaacttatatgtgtctctatatttaaagtgtgaatcttgtggtcagtatagagttgggcttttcatttttttccagtttgaaaaatcactgcctttttcttggtccattttcatatattacaattatcagtatgattgaatttaagtctaccattttgtttttttaatttattctgtttctttttctttctctgtttcgtttttatattcttttttgcttaattacatatttttaggtatttcaattcctgtattggcttttcttttctttttctattttttttttttttttcgagatggagttttgcacttgttgcgcaggctggagtgcagtggcacgatctcggctcactgcaacctctgcctcccgggttcaagcgattctcctgcctcagctttctgagtagctgaaattacaggcatgtgcaaccacacccagctaatttttgtatttttagtagagacagggtttcaccatgttggccacacccatctcgaactcctgacctcaggtgatccacctgcgtcggcctcctaaagtgctgggattacaggcgtgagccactgcacccagccctctatgttggcttttcaactgtgtatctttgtgtatttttggtgtttatcctacggattacaatatgcatatttaacttattatacagtctacttagagttaatattatattacttctcataaaatatagtaattttgctatgatataatttcatttacctcattctttgtgaaattgttgtcatatgttacatctatatttgttataaatctccaataaagttttataattttagctttcaatagcaatctgtatttttttaattaagagaagaaaaaatgtatatttatttgtgtttgtctttcacctatgtaccatttctggtacatagtttctatctggtatcatttttcttcagcctgaacaacctcgattagcatttcctgtaggatagatctgctggcaattcattctcttagtttttgttcatctgataatggttttttaaaattttgccttcatttttgaataagagttttgcctgcatataaaatttcttgttgattttttcagcaatttaaatatgctgtttcgttgtctgctgatctcctttataatgtgagttcagctgttcttcatattattgtgcccttgtatgtaatgtcatttttttcatctgactgttttcaagattttctgtttaactttgagtttaaacaatttgactataatgtgcctagatgtcgttttatttatatttagtcagattggcgaattggataagcttctcagatacataagtttatatttttccctaattggaaatatatttagccattacatctttaagtattttttcatccaattattctcttctttttccttttgatattgccaattacatgtatgttagaattctaatatcatcccacaactaactgaggctcggttcattaaaaaatttttcctttatatttgtcagattgtatgatttctattgatttattttaagttcaatgactttttcttgtgtcatcttcagtcttttgttaagcctgtccaggaattgttcattttagttattgtacttttccttttaggctcagtagtggctctttttacactagaaacttgtttccaagtgaagacagatattaactcttgggatgaggtacttgagtattgaaagaggttaataagattaatttataatagtgtgcagaaactaaggaagcacagtaattaactgagcttcttataaaaaaggtgatagagaaatgtaaataataacattagtgctttgattatcttttgcagatatttttggaaaaatacttatgtttacatttccatgtcatttaattacatttctattgagcattgttcttgtgatactgtacttttttatgtgtttttcaaattaaattgtgggcttcaagatactttttgaaattttaacaaggtgcaaaattgtaaaaataaaataactttaacaattactttcttttgccaacttatgtattccttaatggcgtcaactctgcagaaacaaaatgccttttccaacaccaacatgtttcagattggtttgaagtgtgctgtcagttctgttgagataatgaagtatttttgcattcactaaacaatgaagccataggagtaagtattctaggtcttcagtcctctagtgaatggtgaaaagaaagggtcagtggttccttgctgtactctccagcaagctggttggcttggggatagtattagtaacttaggtctagcgaccttcaaaaaaaccacattttatgcctccttggcctcctatctgcgaaaaacatggaatcatagccacttagctcctacagtcttagctttttatgtctggctacccgaatcataatctaacggtaagaggtaaggtcatcagcctctcatcacttgtctgctgccacttgtttaactctagctcatcaaagatcaatgggcgttacttgctagccaccaagtggcttggatgatagagaaacttacaagccaacactgatgaataatttctgttcaagtggccatagctcaagggatactaaagagcctgaagaacagatatgtttaccaactggcaaattatgaccctcctgtgactctcacctattggtgttagctctaatagaagatagtttttctttagaatgtttgatccactgaacacctgtctgagtggcaggactgatgaaaaagaataacagaaacacagcacacctgtgatgtgaacattcttttatgaatgtgcatgggtgggtttgttctttgtaataaataatagtagcagtagcttttgaatggaaagcagggatgattatgactatgaaagtggctttgtaagtcatcctaattggtacagttatacaatttggaaacaaaaacatgtagattatgaatacaccaagtttttcacagataatccagatattcctttgtctcgtaagtgcatggacaacaaggtgcttgttcctatacatgacctaccttgatggatgaaataagggaggcaagatatcaagatctagaaccaatatttatagcaaatctcaggaggaatttttcaatggctctttttttaatgttttgatattttttaaatgtttagtgtttttaaaaatgtttaatgatgaaaacttattgggaaacaaatgtattaatattaacatgtaggcttttttttttttttttaccccagtgggaatttttagagtaccttactagatatttttaggagaggttttctttataccacatagcactggatatgtccattctgtttactctttctcctcaggaagaggtattcttgtaagagctattcctcattttgtgttctccatttggacacaggtctcctttagctgtcaatgctttctaatggagcgagggggaagtaaagcccgattgtgtttatttttaaaaatgactgatggagaaagtcaaggccttcttccacagagtttagcagagcagagttgcatagctttgagaacatatttactgtttcctactaggttgtccctcctcaaagtctagtagggtgcttgcagtgagttatatcactggtcctcagaaggttctggcttttaccagggcagagataattgatgaaacacatttctcagaattcagcttgactgggcagactgggcattgtagggtatagacccttctctgcaagagtcaacatcatgatggtgagatctgctgagctatatcaccaagaagggtgtctggtgaagacagcagctggtggagagctctaggatcatatttccatgttcccagggatcttggcctaaatgtcagattactcagtcacctcatagtatatccctgaggccttgaccacatatatgtgtcctggcttccatatgaacgtttgttaatccagtgatttctaaacctgactgatgaaaagaatatatgaagtgtttgaaaaaatgacagatttctggcctcactctaaatattctaattctcccgaatttcaggggagttccgcatgtctgagaattttggttctagtgtaccctaaaagtatttcattttgtattcctaaataaaaatgtatccaactggagagaacaggtatttgaaaacacaatgtctggtgttttttgctgccaagaaatgatgagaaaccttatgtatattttatcatatccacaagaaaagttttgaacgattctttacattttgttgctaagagagaggcccttcatttttacaaattgacatctgcatatagaaagtgtgaatgtcaagaatgtttgatgagttttttctaatgttttaaacttacttttgttttatctaagttgtataaggggaagatggctgcttggctattgggagggatgtggggtttggactttcaaccaattctcttgtttgcatgccccagccaaaactagggtgacccaccacctagctggctggttttagcactgaaagttctgctgtgtaccatgaaaatcctcattcccaggcaaactaggacaattggtaaccctacccataccctataatcaagacacttggtatctccaattccaaggcctttccaggttctgccaggcaagagttcttgtgaggtttttcagcaggcttaggattctgctttctcaagtctattcactttcagattccaaacttttgttgacctttcttttctactcttgtctcctgtctacttctctctgtctataaagattttgctcttgtgaaatccctttactattattgtagagaggtttagggaaaggatggtgatcgccacatatgcaagattttacatatatagtaaatatatatataaatatataatactatataatacatatattatatataaatatataatactatataatacatatattatatataaatatataatactatataatacataatatattatatataaatatataatatataatacataatatataaatatataatatataatacataatatattatatataaatatataatatttaatacataatatatataaatatataatacataatatataaatatataatatataatacataatatattatatataaatttataatatataatacataatatattatatataaatataataatatataatacataacatataatattatatttaatatataatacataatatataatattatattttaatatataatacataatatattatatataaatatataataatatgatacataatatattacatataaacatataataatatataatgcataatataatatataaatatataataatataatacataatatatattatataatatatataatacataatatatattatataataatatataatacataatatatattatataatatatataatacataatatatataatatgaattatagaataggttatatatgatataataagtaatatggagtacactatatattatataatatatgtgatgcactatatggttatctaagatatggggttaaagggtgtggtatacatcaagggtgaataacgagggcggtcgtatatgatatgatataggaaagtcggtgatataatagtatggggagagaaggagaggagataataaggtattggaaggggacggtggctccttaatgaggaatgggtgggggagaaggctaccataagggagttgggggaggagggggtgctcccccatttgtttggtggggaagggcggctcccccttttgtttttagtagggataggcgggcaccaaacttggttttgtataggggggggcgggccccaacagcatttttgtaagagggggggagggcaaagggcgatttttggtagtggggnnnnnnnnnnnnnnnnnnnnnnnnnnnnnnnnnnnnnnnnnnnnnnnnnnnnnnnnnnnnnnnnnnnnnnnnnnnnnnnnnnnnnnnnnnnnnnnnnnnnnnnnnnnnnnnnnnnnnnnnnnnnnnnnnnnnnnnnnnnnnnnnnnnnnnnnnnnnnnnnnnnnnnnnnnnnnnnnnnnnnnnnnnnnnnnnnnnnnnnnnnnnnnnnnnnnnnnnnnnnnnnnnnnnnnnnnnnnnnnnnnnnnnnnnnnnnnnnnnnnnnnnnnnnnnnnnnnnnnnnnnnnnnnnnnnnnnnnnnnnnnnnnnnnnnnnnnnnnnnnnnnnnnnnnnnnnnnnnnnnnnnnnnnnnnnnnnnnnnnnnnnnnnnnnnnnnnnnnnnnnnnnnnnnnnnnnnnnnnnnnnnnnnnnnnnnnnnnnnnnnnnnnnnnnnnnnnnnnnnnnnnnnnnnnnnnnnnnnnnnnnnnnnnnnnnnnnnnnnnnnnnnnnnnnnnnnnnnnnnnnnnnnnnnnnnnnnnnnnnnnnnnnnnnnnnnnnnnnnnnnnnnnnnnnnnnnnnnnnnnnnnnnnnnnnnnnnnnnnnnnnnnnnnnnnnnnnnnnnnnnnnnnnnnnnnnnnnnnnnnnnnnnnnnnnnnnnnnnnnnnnnnnnnnnnnnnnnnnnnnnnnnnnnnnnnnnnnnnnnnnnnnnnnnnnnnnnnnnnnnnnnnnnnnnnnnnnnnnnnnnnnnnnnnnnnnnnnnnnnnnnnnnnnnnnnnnnnnnnnnnnnnnnnnnnnnnnnnnnnnnnnnnnnnnnnnnnnnnnnnnnnnnnnnnnnnnnnnnnnnnnnnnnnnnnnnnnnnnnnnnnnnnnnnnnnnnnnnnnnnnnnnnnnnnnnnnnnnnnnnnnnnnnnnnnnnnnnnnnnnnnnnnnnnnnnnnnnnnnnnnnnnnnnnnnnnnnnnnnnnnnnnnnnnnnnnnnnnnnnnnnnnnnnnnnnnnnnnnnnnnnnnnnnnnnnnnnnnnnnnnnnnnnnnnnnnnnnnnnnnnnnnnnnnnnnnnnnnnnnnnnnnnnnnnnnnnnnnnnnnnnnnnnnnnnnnnnnnnnnnnnnnnnnnnnnnnnnnnnnnnnnnnnnnnnnnnnnnnnnnnnnnnnnnnnnnnnnnnnnnnnnnnnnnnnnnnnnnnnnnnnnnnnnnnnnnnnnnnnnnnnnnatatattatataatatgtaatacacaatatatattatataataatatgtaatacacaatatattatataataatatgtaatacacaatatattatataataatatgtaatacacaatatattatataataatatgtaatacacaatatattatataatatgtaatacacaatatattatataataatatgtaatacacaatatattatataataatatgtaatacacaatatattatataataatatgtaatacacaatatattatataataatatgtaatacacaatatattatataataatatgtaatacacaatatattatataataatatgtaatacacaatatattatataataatatgtaatacacaatatattatataataatatgtaatacacaatatattatataataatatgtaatacacaatatattatataataatatgtaatacacaatatattatataataatatgtaatacacaatatattatataataatatgtaatacattatacattattatataagtatatgtaatacattatacattattatataagtatatgtaatatatattatacattattatataagtatatgtaatacattatacattattatataagtatatgtaatatatattatacattattatataagtatatgtaatatatattatacattattatataagcatataatatataatacataatacattatatataagcatataacaatacataatacattatatataagcatataacaatacatagtacattatatataagcatataacaatacatagtacattatatataagcatataacaatacatagtacattatatataagcatataacaatacatagtacattatatataagcatataacaatatatagttcattatatataagcatataacaatatatagttcattatatataagcatataacaatatatagttcattatatataagcatataacaatatatagttcattatatataagcatataacaatatatagttcattatatataagcatataacaatatatagttcattatatataagcatataacaatatatagttcattatatataagcatataacaatatatagttcattatatataagcatataacaatatatagtacattatatataagtatataatataatatagtacattatatataagtatataatatataatacattatatataagtatataatatataatacattatatataagtatataatatataatacattatatataagtatataataacatgtaatacattatatataagtatatgataacatgtaatacattatatataagtatatgataacatgtaatacattatatataagtatatgataacatgtaatacattatatataagtatataacatgtaatacattatatataagtatatgataacatgtaatacattatatataagtatatgataacatgtaatacattatatataagtatatgataacatgtaatacattatatataagtatatgataacatgtaatacattatatataagtatatgataacatgtaatacattatatataagtatatgataacatgtaatacattatatataagtatatgataacatgtaatacattatatataagtatatgataacatgtaatacattatatataagtatatgataacatgtaatacattatatatatatatatagctgaaagccttttaatgattcccaatattgaaataatgatattgtagacttcggtgattttccaaattcagtatcagagattaagttaaactttacccaaacacacttcaaagctgtaggagaggacagttttcctacagtgctttgagttcctggggttccctttcttatcttttcttaccacttggattcttccccttattagtctagacatgaaactcagctctctccaggtttctacaaaattccacttgctcttaaggatttcatgagtttagcagatttttagaagttattcagtgtcaggcagtgttctaggacaggtcctatcacagggaatatggcctttggctacgttctcctccttgtagtgtgtctggatcacagaacacttctatctaaacacagatgcctcagtgtcttagcttctaccccaagaggtatattgataaatactttttgtggcatatcataacaattgaaaataggagaaaatttgagtcatctatttcagaaattatgaaagtctcaggaaagtgttgggtgttaaaaccttttgccctctgaagttaggtaataagagaaagcatattctgtaaaactaaccatttgcatttcagagaatagcattggtgggaattcaagaagaagaatatcaaagataatcatggaagcctcacttgagcgtttaacacataccaacacttttcctttgctcatctcgctattcttattatagatgaggaaactgcagcttaggataggtaaaaacaaaacaaaataaaacaaaaaccttgcctaaatgttcatgagtagcaaaggggcaaatagcagggctgggattccttctttggcagcctgactcagggcatgtgctcttatccatactcacatcccactaagaatgtggaatgctctttttcagagatgcatctgcatgcacgtaactttagaaatagaaaataggtggaatggtattttcctacttcttactacactgtgatttataaggcctggattaccagtagctgggtcctgtctgccatcccaggactgcaaagcttccacatttctgagcagggaccagggcctgagcttcaggactacatctgaatctagtcctgagcttcaggaccatatcattgcagctgtcaggattgcattgtcagggtctaggggctctcctagccactgtcattcctgttccagcagaccttgcttacaatcctctctctgtgttctggggttctcctttactctgctgctgccaagactcagtgtgggctatctccactctgggaaaccgctggaaccaaactggaagtaaactacatactatgggctgagagaagaacactggcctttgatactagtaggaccagttttcacatggtttgataaaattcatctcctttttcttttttttttcttttttattatactttaagttcagttttgtgtagattctgaatattagtcctttgtcagatgtatagattgtgaagattttctcccactctgtggattgtctgtttactctgctgactgttccttttgatgtgcaaaagctctttagtttaattaggtcccagctgtttatctttgtttttactgcatttgcttttgggttcttggtcatgaaatccttgcctaagccaatgtctagaagggtttttccaatgttatcttctacatttttatagtttcacgtcttaggtttaagtccttaatccatcttcagttgatttttgtttaaggtgaaagatgaggatccagtttcattctcctacatgtggctagccaattatcccagcaccagttgttgaaaaagggggactttatgtttttgtttgctttgtcgaaaatcagttggctgtaagtatttgcgtttatttctgggttctctattctgttccattggtctacggatctatttttatatcagtaccatgatgttttggtgactatggccttatagtttagtttgaaatcaggtagtatgatgcctccagatttgttctttttgcttaatcttgctttggctatgcaggctctttttggtttcatatgaattttagaatttttttttctaattctgtgaagaataatggtgatatttttatggggattgcattggatttgcagattgcttttggcagtatggtcattttcacaatattgattctacccatacatgagcatgggatgtgtttccatttgtttgtgtcatctatgatttctttcagtaatgttttgtagttttccctgtagaggtcttttgcctcctcggttaggtatattcctaagtatttttatttatttatttttgcagctaatgtgaaaggaattgagtttttgatttgactctctgcttagttgctgttggtgtatagaagaggtactgatttgtgtacattaatcttttatctggaaactttgctgaattcttttatcagttctaggagctttctggaggagtctttagggttttcaaggtaaactatcttatcatcagcaaacagtgacagtttcacttcctctttcctgatctggatgccctttatttctttctcgtctgattactttgggatcagactttcaatacgatgttgaagaggagtggtgagagtgggcatccttgtcttgttccagttctcagagggaatgctttcaacttttccccattcagtgttatgttggctgtgggtttgtcacagatggcttttattacattgagggatgtcccttgtatgccaattttgctgaaagttttaattataaagggatgctggattttgttgaatgcttttccttcatctattgagaccatcatgtgatttttgtttttaattctgttatctggtgtatcacatttattgacttatgtatgttaaactgtccctgcatatctggtatgaaaccctcttgatcatggtggattatctttttaatatgttgttggattcggttagctagtattctgttaaggattttagcatctgtgttcttcagggatatcagtctgtagttttctttattggttgtgtcctttcctgattttggtattaaggtgatgctggcttcatagaatgaagtagggagggttccttctttctctatcttgtggaatagtatcaaaaggattggtaccaattcttctttgaatgtctggtagaattctgctgtgaatctgtctgttcctggacttttttatgttggtaattttttaattaccatttcaatctcactgcttgtttttggtctgttcagggtatctgattcttcctgatttaagctaggagggttgtattttttccaggaatttatccatctcttctaagttttccagtttacgtgcataaaggtgttcatagagccttgactgatcttttgtatttcagtggtgtcagctgtaatatcacctgtttagtttcttagtgagattatttggattttctctctttttttcttggttaatcttgctaatggtctatcaattttatttatcttttcaaagaaccagctttttgtttcatttatcttttgtattttttgtttgtttgtttctttcaatttcatttagttctgctctgatcttggttatttccttccttatgctgcttttgtgtttgtttttttcttgttctagttacttgaggtgcaaccttagactgtctgtttgtgctcttcagactttctgatgtgggtgtttaaggctatgaactttcctcttagtactgccttagctgtatcccagaggttttgataggttgtgtcattattgtcattcagttcaaagaatttttaaatttccatcctgatttttttttgacccagtgttcattcaggagcaggtcatttaacttccatgtatttgcgtggttttgaaggttccttttggaattgatttccagttttattccactgtggtctaagagaatgcttgatataattttaattttcttaaattttttgaggtttcttttatgacctatcatatggtctatcttggagaaagttccatgtgctgttgaatagaatgtgtattctgcagttgttggatgaaatgttctatatatatctgttaagtccatttgttccaaggtatagtttaaatccattgtttcttttttgattttctgtcttgatgacctgtctagtgctgtcagtggagtattgatgtcccccactagtactgtgttgctatctatctcatttcttaggtctgctaataattgttttataaatttgggagcattaggtgcatatgtttaggattgtgatattttcctgttggataaggccttttaccattatataatgtccctctttgtctcttttaaccactgttgctttaaagtttgttttgtctgatatacaaatagctatccctgctcacttttggtgttcatttgcatgaaatgcctttttccagccctttaagtttatgtgagtccttatgttttaggggagtctcctaaaggcaggagatagttggttggtgagtttttatccattctgcgattctgtatcttttattaagtggagcattaaggccatttacattcaatgttagtattgaaatatgaggtaccattgtattcatcatgcaatggtatttttgttttataggtcctgtgtgatttatgctttaataaggttctgttttgatgtgtttccaggatttgtttcaaggtttagagctccttttagcagttcttgtagtgatggcttggtaacggtgaattctctcagcatttgcttgtctgaatatgactgtatctttccttcatatatgatgcttagtttcgctgcatacagaattcttggctgataatcgttttgtttgaggaagctgaagatatggccccaatcccttctagctcgtagggtttcttctgagaaatctgctgttaatctgataggttttcctttataggttacctggtgcttctgtctcacagctcttaagattctttcctttgtcttaactttgaataacctgatgacaatgtgcctaggtgaagatctttttgtgatacatttcccaggtgttccttgcgcttcttgtatttgaatgtctagatctctagcaaggctggggaagttttcctcaattattcccccaaatatgttttccaagcttttagaattgtcttcttcaggaacactgattattctaaggtttggtcatttaacataatcccagaccccttgggggctttgttcatattttcttattcttttttgtctttgttggattgggttaattcaaagaccttgtcttcaagctctgaatttcttttttctacttgttcaattctattgctgagattttcctgagcatttcacatttctaaaggtgtgtccaaagcttcctgaatttttgattgttttttatttaagctatttccttgaatatttctcccttcacttcttgtatcattttttggatttccttacattgggtttcagctttctctggtccctccctgattagcttaataactaactgccttaattctttttcaggcaaatcagggatttcttcttggtttggattcattgctggtgaactagtgtgatttttaggggtgttgaagagccttgttttgtcatattatgagggttggttttctggttccttctcatttgggtaggctctgtcagagggaaggtctagggctgaaggctgttgttcagatttcttttttgtcccacagggtattctcttcatgtagtactctcccccttttcctgtggatgtggcttcctgtgagccaaactgcagtgattgttgtctgtcttctgggtctagccacccagccagtctacctggctccagcctggtactggaggttgtctgcacagagtcctgtgatgtgaaccatctgtgggtctctcaggtgtggatatcagtgcctattccactggaggtggcagagggtacagtggattctgtgaaggtccttagctttggtggtttaatgctctatttttgtcctggttggccttctgccaggaggtggcactttgcagaaagcatcagctgtagtagtgtggagagggaccggcggtaggcggggccttagacctcccaagattatatgccctttgtcttccactaccagaaaggtgggtaggtagggaaggactatggggagtgggactaggcctgtctgagctcagactctctttgagtgggtcttgcttcagctgctgtggggcatgggggtgagatttccaggacactggagttgtggaagtattatggctgcctctgctgagtcatggaggttgtcaggaaagtaggggaaagccggtagtcacaggcctcacccagctcctgtgcaaactgaagggctggtctcactcacactgtgaccccaacaacagccccaattctgtttccaggtggagggcaagatgggcttgaaaacttgcccgaggctgtctgcctcccagctgtgaaagaaaaaggctttagttcttccccagcctgtgaagtctgcaagctggattcagatttgtgctcttccctgagttctggccaggaagatttttgccctattaaaattgttacaaagttcacctagagaattccttctccctgtggagttttaaccgctgctcctctggccaccgtccagatggatccctgtggtgccaggcaggaatgggctgcttggggacccagagagctcgcagggcctttctgctgcttcctctacccctatatttctcttggcttggctctctaatttaactcagctccaggtaaagtctgaaacttctcccacaagcaaaccttcaacttctccagtggggtgtgtttgggagaggagggcctccctttctcacttctacagttggggcactcacagtatttggggtgtctcctgggtcctgcaggagcagtctgcttccatcagagggtctgtgggtcctctcagaattgctgtttttttcttgcggtcaatctggagctaaaattcacagtgcaagcctccatacactgctctgtacaggtgcaatctagtcctgcctcccatgcaccatgattatctctcctctcagattcccttaatttcatctttaaaatggagatgattttggttctgcatgtgaggagcttggaagtcatcacttccatcttcacactagaaaaaagctgaacaaactaaaaatcaacaactcttcttatatctatcagagaaatgaagtcacagggcaaatcactgccccttgtaattggagtgacagacaggcagataaagaatatcacaacttaacggagcagaaacttctgtgggaactagcactgaagtagaaaaacctgaactggctgggcgcggtggctcacacctgtaatcctagtactttgggaggccgaggcaggaggatctcttgaggtcaggagttcaagatcatcttggccaacatagtgaaaccctgtttctactaaaaatacaaaaattagccgaatgtgttggtgggcaccaagcgcttgtaatccctgctacttgggaggctgagacaggagtctcgcttacacccgggaggtagaggttgcggtgagccaagatcgtgccattgcactccaacctgggtgacaagagtgaaactccatctcaaaaaataaaaaagaggtcttccgttccaagatggccaaataggaacagctctggtctgcagctcccagcatgttcgacactgaagacgggtgatttctgcatttccaactgaggtacctggttcatctcattaggactggttggacagtgggtgcagcccacggagggtgagctgaagcagggtggggcatcacctcagctgggaagcacaaggggtcagggatttccctttcctagccaagggaagccatgacagactgtatctggaaaaatgggacactctgcccaaatactgtgcttctcccacggtcttagcaacaggcagaccaggaaattctctcctgtgtgtggcttggcaggtcccacaccaacgcagccttgctcactgatagcacagcagtctgagattgacctgcaaggtggcagcctgatgggggaggggcatccaccattgctgaggcttgaataggtaaagtggctgagaagcacaaattgggcagagcccaccgcagctcagcaaggcctactgcctctatagactccccctctgtgggcagggcatagctgaacaaaaggcagcagaaacttctgcagacttaaacgtccctgtctgacagctctgaagagagcagtggttctcccagcacagggtttgagctctgagaatggacaggctgcctcttcaagtgggtccctgagccccgtgtagcctaactgggagacacctcccagtagggtccgacagacctcatacaggtgggtgctcctctgggatgaaacttccagaggaaggatcaggcagcaatatatgctattctgcaatatttgctgttctgcagtctctgctggtaatacccaggcaaacacggtctggagtagtggacctccagcaaactccaacagacctgcagctgagggacctgttagaaggaaaactaacaaacagaaagaaatagcatcgacatcaacaaaaaggacatccacaccaaaaccccatctgtaggtcacaaacatcagagaccaaaggtagataaaaccacagatggggagaaaccagagcagaaaagctgaaaattccaaaaaccagcgcgcctcttctcctccaaaagatcgcagctccttgccagcaacagaacaaagctggatggagaatgactgacgagttgacagaagtaggcttcagaaggtcagtaataacaaacatctctgagctaaacgagcatgttctaacctgtcacaaggaaggtaaaaaccttgaaaaaaggttagatgaatggctaactagaataaacagtgtagaaaggaccttaagtgacttgatggagttgaaaactgtggcatgagaactttgtgatgtatgcacaaacttcaatagccaattcgatcaagtggaagaaaggatatcagtgattgagaatcaaattaatgaaataaagcaagaagacaagattagagaaaaaagagtaaaaagaaatgaacaaagcctccaagaaatatagaactatgtgaaaagaccaaatctacgtttgattagtgtacctgaaagtgacggggagaatggaaccaagttggaaaacactcttcaggatattatccaggagaacttccccaacctagcaaggcaggccaacattcaaattcaggaaatacagagaacaccacaaagatactcctcaagaatcacaaccccaagacacataattgtcagattcaccaaggttgaaatgaaggaaaaagtgttaagggcagccagagagaaaggtcgggttacccacaaagggaagcccattagactaacagctgatctctcggcagaaaccctacaagtgagaagagagtgggggccaatattcaacattcttaaagaaaagaattttcatcccagaatctcatatccagccaaactaagcttcataagtgaaggagaaataaaatcctttacagacaagcaaatcctttacagacaagcaaatgctgagagattttgtcaccaccaggcctgccttacaagagctcctgaaggaagcactaaacatggaaggaaacaaccggtaccagccactgcaaaaacatcccaaattgtaaagaccatcaatgctatgaagaaactgcatcaattaatgggcaaaataaccagctaacatcataatgacagggtcaaattcacacataacaatattaaccttaaatgtaaatgggctaaataccccaattaaaagacacagactggcaaattggataaagagtccaaacccatcagtgtactgtattcaggagacccatcttatgtgcagagacatgtgtaggcttaaaataaagggatggaggaagatctaccaagcaaatggaaagcaaaaaaagagcaggggttgcatctgacaaagggctaatatccagaatctacaaagaatctacaaagaacttaaacaaatttacaagaaaaaaacaaccccatcaaaaattgggcaaaggatatgaacagacacttctcaaaagaagacatttatgcagccaaaagacacatgaaaaaatgctcatcatcactggccatcagagaaatgcaaatcaaaaccacaatgagatactaactcatgctagttagaatggcgatcattaaaaagtcaggaaacaacagatgctggagaggatgtggagaaataggaacacttttacactgttgatgggagtgtaaattaatttaaccattgtgcaaaacagtgtggcagttcctcaaggatctggaactagaaataccatttgactcagagatcccattactgggtatatacccaaatgattataaatcatgctactataaagacacatgcacatgtatatttattgtggcactattcacaatagcaaagacttggaaccaacccaaatatccatcaaaggtagactggattaagaaaatgtggcacatatacaccgtggaatactatgcagccataaaaaaggatgagttcatatcctttgtagggacatggatgaagctggaaaccatcattctcagcaaactatcacacaaggacagaaaaccaaacacagcatgttctcactcttaggtgggaattgaacaatgagaacacttggacttagggcaggaaacatcacacactgggacatgttggggagtggggaggagggggagggatagcattaggagaaatacctaatgtaaatgacgtgttaatgggtgcagcaaaccaacatggcacatgtgtacctatgtaacaaacccgcatgttgtgcacatgtacctagaacttaaagtataataaagaaaagaaaaacctgaactataattgcattgctggaggctcagtgtggaccagtcagagagaaaaattccagggggtgccagtcttggggagccccttcatactttttacattttaccttcaggagccctagcaggtcctccagtgaagatcagagaaaaatgtctcatttttccagcaggggaaagggggaagtagcctttgaaatgtaccagaaggttctgttcctttaaaagggggatgctaatggttgaactagttacaccttctagggatagtgcaaagattaggtgtgataatacatgtaaagcacatagagcatgtaagacccgtgctgctgttattatttagccatattcctatacataagctgagggttattcacctctactaaagaagctacacatgagttggacatccagagaaaggctgaaaggagaaaggtgaaatttagcttgaggaatgcctttatacctttaaaatgtatagtggtttgcatcttgaaagcattaccataatttggcatactattgtatacattctcctatgaatcccataaaatagttattcattccctgctaaggtaaagaaaaaagataaataaaatttctgaatctgaccttttccgggcccctttacttcagaagccaggattaggatttaaactttccagcgtcttggccacttcttgttccctgggcagccctttcagcttgatggtgagttgtaagcagtgaactggttcctgcaagagcaaacagtagcagatacatggagaaattgctggccagagattgcaaagcacatcacaattctaatcgattctgagagacaaacgtggagacctgcaaacctgtgcacagatgaggacttttaccaggagaaatcgcctggagtccagatgacagacttttggaaatgctaacttcaaatgttttctttcttggctttaaaaatttagcctttactttgaagctgtcagaaaaaaatgatttttgtttttctgtgtgtgtgtgtgtgtgtgtgtgtgtgtgtgtgtgtgtgtacatacgtttttatttctcttgggcaaatccctaggagtgggattgttaggtcatatggtaaatacaatttaacttcatgagaaactgctaaactgtttgtcagagaggctgtgccattttaaacagtctcagcagcaatttatgagcattccagttgctccacatccttgccagcaattgttgtcaggttttaatttttttttctaattgtagctgttataataggtatacagtggtatctcactggggtcttaatttacattttctaatattaacaatgttgagtatgttttttgtttgcaatttgccattttcttttctttttttcacaggtgacaatgattgaggtttgaatttatgtgtttctgcacttccaatacatatatcccatccttatttttacccttctaatttcaaagaataattgcatttttttttggataatttaccctagttcctccttccattctttaccttagcagggaatgacttagactattatcaatagtagtagctggaacatagtaactttatttatttaacttttaagtttaggggtacatgcgcaggtttgtatataggtaaatttgtgtcatggagtttgttgtacagattatttcatcatccaggtattaagcccagtaccccttagttatttttcctaatcctctccctcctccccacccttcactgttctataggccccagtgtattttgttcccctctatgtgtccgtgtgttctcatcatttagctaccactcgtaagtgagaacatgaagtatttggttttctgttcttgagttagtttgccaagaataatggcctccagctccatcccatgttcctgcaaaagacatttttatggctgcataggattgccacattttctttatccagtctaccattggtgggcatttaggttgattccatatctttgctattgtgaatagggcgataatgaacatatatgtgcatgtctctttataatagaacaatgtctggtcctttgggtatatacccagtggtgagatcgctgggtctaatggcatttctgtttttaggtctttggggaattgccacactgtcttccacaatggttgaactaatttacactcctaccgacagtatataagcattcctttttctctgcagccttgccagaatctgttattttttgattttttagtaatagccattctgactggtgtgaaatggtatctcattgtggttttgatttgcatttctgtaatgatcagtgatgttgacctttttttcatgtgtttgttggccacatgtatgtctgcatttgaaaagtgtctgttcatgcactttacctactttttaatggagtttttaattgttctcttgtagatttgtttaagttcctcatagatgcagtatattagacatttgttagaggcatagtttgcaaaaaatttttcctattctgtaggttgtctgttcactctgttggtagtttctgttgctgtacagaagctctttagtttaattagaacctatttgccaatttttgcttttgttgcagttggttttggcatcttttgtcatgaaatctttgcctgctcctatgtcaataatggtattgcctaggttgtcttccagggtttttatagttgtgttttatatttaagcctttaatccatcttgagttagtttttgtatatcgtgtaaggaaggggtccagtttcaatcttctgcatactgctagcccgttctcccagcaccatttattgaatagggagtcctttccccattgcttgtttttgtcaggtttgttgaagatcagacagttgtaggtgtgcggtcttatttctgggttctctattctgttccattggtctatatgtcttgtttttgtaccagtatcatgctgttttggttattatagccctgtagtatagtttgaagttgggtagcatgatgcctccagctttgttctttttgcttaagattgccttggctattcatgctcttttttggttcaatatgaattttaaaatatttttttctagttctgtgaagaatatcattggtagttaaataggaatatcattgaatctataaattgctttgggcagtatacccattttaatgatattgcttcttcctatccatgagcaaggactatttttccatttgtttgtgtcatctctgatttctttgagcagtgttttgtagttgtttttgtagaaatctttcagttccctggttagctggttagctggttagctgtgttcctaggtgtgtgtgtgtgtgtgtgtgtgtgtgtgtgtatatatatatatgtatatatatatatatatgtatatatatatttggcagttgtgaatggaattgtattcctgatgtagctttcaacttgactgttattggtgtataggaatgctagtgatttttgcgcattaatatttttgtatcacgagactttgctgaagttgtttatcagcttaaggagcttttgggccaaggctacggggttttctaaatataggatcatgtagtctgcaaacagggatagtttgactccctgtcttcctatttggatgcctttgatttctttctcttgcctgattgccctgaccaggacttccaatactgtgttgaataggagtggtgaaagagggcatccttgtcttgtgctggttttcaaggggaatgcttccagcttttgcccattcagtatgaaacgtaataactttgaaacaacttatttttgtttttcctcatcagatccacagaatggcttagtacagtttagatttgtgagtggccaagtgaattcctgtaagtaatttctttttcctgtgttgtttgaaaaacaaatgtgaacaactctgaaggaggctgtggttacatgttttaatcagaggtaaccgatttggttcctggtcaatagaacttctgggaaaacagtagttaaaatttaaaatgacacaacaattaaatccatgatctattcactgctattgaaccaaggcctacctggaccaacaacacagtggctttccaagacaccaacttttaaaggttaagaatttgcttcacattttgaattccttaatgacattctgttgaggtctcacccgtagatttatatattcaacaggctaaaaagttaattgttatttgtctaaaaagtgattaccattttgatgagggccttagatgaacacataaaatacatactgatcaaatttaggaatgacaaatctgaaaaagataactaatatttttgatgaagggattgtcagatcacaattgaattgtaaatcaaagcaaacaagaggaaatttaacagaatacacataaaggttgacactttcataaaaaaataagttgtcaaatatagaatgggaatagaagaaacctatgttcataacagttaatgtgaaaatagtgatgagcattttaagtcaagtgtgataagatataatggtttcattctactttggactaagtaggtaaatatctagaatattgtgaccaattatgaaagccacacatgggactttgaaaatctgaagaggtgtcagttttaacctagcaggatgtgttcaatttttcagacacgtcctatgtggaagagaggctaaatcagttgggatcatccaagcaggaggagagaaagcttatggagcccgaggggttccttcagatacctgaagttctctctatgctgtaaaggcttcttcacagcatagtaaacatcttgctgctcagtgtgaaggatgaagctaggacaacaacctcagatgatggatgccatgaaagggacatgggatgggtgggaagttgcacggcctttgaagattctttccaactctatggttatttgttatttgaagttcaagattaatgccatttgaagagttatttttgtatatcttttatgaaatttgatgttccccttgactgttcctattttcaaatttcagctatgtttccccatgaaaattttgagaatgttcacatgactttagtatttagagatatcagtaaacttacatagtgcctgtctgtaaacctctttgacattcgtatgctgtcaaattgcttcacttgtggtctcagcaagattagggctgtttctttcttcatcctctgagctaggatttatttcattattctgaagttatacaaaaacacacatacattccaaatgcatatctttttggctctttgtggaatcttattaggtgtgttaaattaggaaatagtacaaaaaaaaacccataaacagtcttcaagagtaagtgagttaataacttttcctaattaattctttagaggctcttcctgagaagaattttgctgggtgcacatgtccaccagctctgtgtccctcctagaccccctcttttgcccccattaccttctttgctgctaccacaacaaggtatattagcccttgaaattaaagatgttgctgtcccagttgtgcttgtcttcacctaaatgcatacagtcatattccaaaagactatatattagtgatatctatatagttcacccttcatatacatgagctcccgtgtgtggagtgaactaattgcagatataaaatatttgggaaaaaatttcatgtgtactgaacatgtatagactttttttcttgttatcatttcctaaataatacagaataataaccactgtttacatagcatttacattgtgttaggtattataaataatctgtacataatttaaactgtacaggagaatatgcataagtcatatgtgaataccacaccattttatatcaagtacttgagccatctgcagattgtggtgtccatgggaggtactggaatcaacccctatagataccgagggacaattatgtttcttcaggttttgaaaccaacttaattttggaatgggacctgaagttgatagcagcagtcttcattacaacttttgaggtatcctagagatcctcgggcctcagtttgaatgccaccgtagggttatggggctgtaacagatagtaagctatcaggccaagtaagtgagcagctctaggaaatatatagtgtctcttttctggctgtggcttagctgaacattcttaccagacccccaaatccagtctggttcatatgaaaaaaggtaaaataatcttcttaatgaaggccatttttaggcctgtttgaatttagcagctcatataggagaggagcattaaatgatgaaaggacaatgtctgcaggaatagcactgccaaataaaacagttaactggctttctgggggaccagaaatcatcatggcaaaagatcattgttcaaactagtggtcaagagttgcaatcctacttttgccctttggccggcatgtgttggggaaagttgaccttagtatgtgggctggtgggccaaaaaagaaagtgatgctatctgcctgttttagaggccgacctctgcccactgggaagcgtttgttataggttttcacaatttctaaatatatttgtgtggctgtatagacttaaaaagagaaatgcttaagcttatgtttaataagaaaatgtaaaatgcaatttgagtctttattatccttaactttcatgaaatacccacgggttttttgtttgtccttattcttatacataaaattgtgttatcttgctggcattaagtatttgtagaagagaaatacacaatctcaccatttccctttttcctttttcctcagttttctgtaaacatacgtgtacacacacacagacacacacacacacacacacacacacacccctgacttcaggtaaccagtgttgtcctagatgaggctgagcactgtttcctgtttctaacatttttccatctcttggagcctctcccttttcctccccctaccccaaagagaaacaagtaactattaatcagcttttatgggaaatggaaaatagactctctagcctagcattgtacaatagagttttctgcaattatgccaatgttctgtatttgcactgtccagtatagtagccattagtcatatgctgctattttgcacttgaaatgtggctagtaggattgaggaactgaatttctaattttgtttcatgttaatgtaaatttaaatcaccatatgtgactagtggctaccatattaaacagaataacaattgccaaataatttatagcatcagaaactgtgctgagcaaatgtactaatcagtgggatgcaacattctaaatacctcttttctatattgagccaaatggtacttagaagtaatgcaatatcatttttgatagatgttaagatgatcatcaaaaaagatgaataaaagccaatatccacctaaagcatttgtaattgattgtagagaccattttctattttatgctagatgctttacatatcgctttacagctgtatcatctattattttcacaagaattccaagttagatattatattttcccatttcatctaaggcaggaaactgcagcacaccaatttaaaataacaaaccaaggtcacacagccagtaaagagtggagccaagttttgaacccaggtcaggctctcctttgatgcatttcacaatgaatatttccgacatgatcttctagggcacttgcgcatgcctccctagtcgtcatttggaagtagggcaggtgtcaagaacatgagccctggcaccacactgcttgtttgaatcctgcctctactattaacacctatatgaagttgagcaagttacttaataatatctctgggcctcaattttctcattttaatatggaaatattaaaagtacccatctcattgggttactgtgagggattaaataagttagtatccggcacattgtttgaactatatatatttgccatcataattatttttaatttaaaagacactgccctttatgttaggatgttgatttgatatgataataaatgaagtagagatatgctttgggtgtgcttccctatgaaataagagagattcgaatcattcagataattcaggaagaaataccctgctgttcagccactttggtgtctctgtcagtaggattataaagtttcagagcccacatgccctggccaatttctcatctctttgcttgtcatgttacccttatagacatcccctttggtgtctttgattggttctgaatgctgagcagtgacatgcaccaacacagctggaaaggcctgtaagatttgctattctgtcttccagcagggaattattgccatggataccaatatcagaggaagactggggagcactcaccactcgcctcctgagtgtctgacatctgtttctggcaaggccaataatgagtatgctgctagcttcatatcaaatgagagtctgatctacacctattttgtttttgttttgttttgtttttatcacagatggcctctgcccaagatgccaggtacggccagaaagactcctctgatcagaactttgactacatgttcaaattactcatcatcggcaatagcagtgtggggaaaacatcttttctattccgttatgcagatgactcctttacatctgcattcgtcagcacagttgggatcgatttcaaagtaaaaactgtattcaaaaatgaaaagagaatcaagcttcagatttgggtaagtggctttgaactggcagtgttcttcaggctggggtgttgaacatatccatttgtaagggagaaactttctgccttgttctatccccagggcatccacaagcctcaatttccagcttctttgctgcagaacattctgtttcaaagaaagtagtggtgatgcctctttaagacatgaggggtgaattattattatgccttgttgtcatgtggtgctccttaagagtcttcagaataaaaaaaaaatccaaacctctatcttgttggtggtggaaggaacactttaagtctggctttgccttttatgatctctgtaaccttgagaaagtctgtgactccttctctgacatttttgtaatctataaaataagctaagtggttctgggtttttaggtcacagaaagcagcctctcctgggcatttcaaagaagaagataaacaaccaaatataggaaaagtgtaggtttagacccttcataaagctccagatagaacttcagagatggtctatttatactgtgcaaactgttttcaactctaagagctatgtttatatatgcaaataaaacaaatgaaatgaaatatttatttgaaacagggtctttccaaagtagaaggttctcccaaagttttgagaccatttggttagctttttgcctctccttacctccagaagaagatcagaggtagcttagccaaactggtgggataaatttaggagaccagtgagcaaaaaacagaggaaaatctatgtggatagcaggtccaaggcatataaaagatggagcagccaatttaaaaaaattgttacaccaaaaaagactgatgtattaaatattttatggacatcgtaatatgtacataggaagaatgtttctacagtaagttttggcacctttttcctattcctttgtacctctgccactcaaattgatttgatctgtaatcaggcatttcccaagaggtgttttctagctccttctgagacatttacaacagctactaccatttggtgctggtgccaggattgatcaataggactgacaataaccctcccttcataaatatggaaagctaaaaacaaaaaacaaacaaatcgcagagtagaggattttaacttttttaaaaaagaaaacagccctttatttaaaaatctgtataaactgaatgacctttacacatcctaaaggtcttattaaagtagaaatttaaagtaatatttaaagaggcaggtatatacacagacaggtaccttcttatgtagcttacaataggctgttactattttacttgttctaactctagagtctttcaaatctaattataaatcacgtaagaatttgtacaagtagaccttaggctgggcatattccctgctccatcattccccaaagccatttttattgggagtgttccttttcagaaacttgacctcaattaatggagatacctatcacacactcctctgtatggagacagaaaaagctttgtccattgcttcaagtatgggtcctgattcattctcttccttttgaattgcaggcaatccaattgttatatgatacatttcatattaagttttaaggaaggttccttaattctcaggggctttggtgaatggaaaattaaattaatttggaaacgatacatcccttaactccatgacaatgttctttttactaatatgaaagaacaatcattcctctggttgatagctccactttttcctctcttctttctgtcatagagataattaaaaatagtggttagaatcatttagataaagcatcagcatggtgtgttaagccagtcttataatttctggcaaattttcagtgtaggtttttgacagaaattctttgttgaggtgcaaaattatctatcttcaatgtaaatcagatatatttcaaataatataaattatttttcacacttaaaaattattttctttaaaacaatgctggtaccaggccagtgctaattcactcaccttttttttttggcattgaaataagttatttatgtctacatctcacttctggatgaatatagctcttctctgagccaaccaaagctcagatccctgagctgcttctactctaatacctcctcatgctgctcagtttccataagttcatgaaaaagtctctgaaatattattatcttcagatttgcctctaatcttctacaatctactagtttcttattaaaaaaaaaaccctttaagtctatagacagtcaggcctgggacctcattctagggcctccattctcctgctctgtggatgcccacactcccatcagggttcagccacttgggaatccttcactttcccccatcgtcagtcacaatagtagattaatagccattactatcattgcaattaaaacataatccaatttcttcctctttaggtacattaggagctcttaaggcacatctgattttaggagtgtgaaaatcagttttataatagtgtatacaatactgtatactattatatgtactattgtggtctgttagattgtgaaacatttaaaagaagtacaatacaaagattttgtgcttatggaacttgtagtatagttagaaaaggaaattaacactcgttggataattatgtacttctataagcaaatatcaaattgtataaatattatgcatagctagcatttattgaatacataccatatgttaggcattatctttgccttatttctaattctcacaacccaacttttaatttattactatcctattttacctgagaaatctgcatgtaggacagttaaataagtgaaataacttgttcagggttgcacatgctgaatggctaagaggggattccaagctaggtctatcacattctaacactgctctaattaagagtcttcttgactaatgtggtggttattttttttgaaaatggcaatcttgagtgatgcatctgggatggtgaaatgtttttgaaagagttcacattgaaggcatgcaggagaagaaataatgaggagcaacagtggtatgcttaagtataggcattcctatgataattccaggaatccttgcattatgctataatataagtgtgctggaaattatttagttgtaggtagttatgattgtttaacaactctcacaaatcacttatttggaaatatatttagcacagatggcttgtcatctcattgtgctttaataaccaagcagtgaactgctcttcccaacttatagtatttttatgcatttatattatgtgtaaataattcattaagatccacatcatcttagcctattatatatttcaaagaaaagaggcaaaatggtttcatagtatgaaagccatcgtgggttgaaacactataccattttctctaccaagacaggtttcagacattgatttaatttggatcactctattcattttaaactgcccccaaatagaactgtttctaagttaggaaaccaagatatagagaggctaagcgatttgaccttaccttacagttagtaccagagcagagcctaaaatccaggtctcctgctaggtgggctagtctggtttctactacattatacttcttctcaaggtaagtgttgtatgacaaaaattgtaataaatctcaacctggttgtcagtggaatcctccagctatagaaaaaaatcaaacttgaggccaggtttcaagtatgatttttgtttttatttttatttttttgagaaggagtctcaccctcttgcccagcctggagtgcagtggcgcaatcttggcccactgcaacctctgcctcccaggttcaagcaattctccagcctcagcctccagagtagctgggattacaggtgtgtgccagcacacctggttaatttttatatttttaggggagatggggtttcaccatgttggccaagctggtctcaaactcctgacctcaagtgatccactcgcctcagcctcccaaagtgctgggattacaggcatgagccaccacgcctggcctcaagtggcatttttactgggtcaggaaggaagagcctgagtgggaaagcgctcctcattttctacttgatggtttgctttcttgtcacatgctgcatagggattttctgattcttcaaactggattagtagatttgcaacagtctacattcaaataaagcattttaacaagtaatagacacatttatacttcctgaatgcgttacacctcctctctgtggaagcaggaaagaatgggagggtcagagtacgcagggttcagattagctagtttgaacaacttcaacttactctgggacacaggaacgatccctcagttgcctggcacttaataagtcctggagcgattagggcaggtggatagtggcccagagtgtgaaagccctataatggaggtggttgggagtgtgtgctctggattggttggtttgcctttgaaaagagtgctccagtaagttgtttactatctctagaaactggctaatcctgggagggtcagtccctgcagaatcagtgaggccccaaatgtcaaagcatcagaatacaaaaaataaaaaatctaaaaataaaagacatggttaatatggagggaaagttcttggggcctcaggggcagtctctgtcactaatttcactctgacaaatgctgtgattcccaactgtctcactacaggattggtatatttttgggtctcagtatttggagacctagtacattgagtcaggaaaagatctgacagattttctggctcaacctcctcatttgatgatactactaataatagcaacatttatcaagcccagtgctgacccataaaataagcactttatgtttccatgcattttaaaatttattttttgcaacaaccaaataaaccaaggtggtattattagctctcttttatagcaaggaaacagaaaaccagaaagacaaagtgatttgcccaaggttatagtcacaagcaggattccaacctgggcactgagcgcaaagcccatgtacttgaccacatggtagaagagatccagggaggccaagtgatttgtcagaagtttcagatctgatattaaattccacatattttaattcatagcaagtactttttccatgctgtataattactcagtatctttcagtagtttcttatgacctgtccaagatattatttatagttacagaaaagaaccagttgttttgcttggaacttactatctggcagcatgagcactttgtgcattatctgttttgtgtttaaaacacatagatatgcacagaaggagggactggaacacattcaactaacttcttcctgcacgtttctggaatgctgtttctgctgttggagaacgtgaacataaagaaaagggcatgaaagaaggagtctaatggcataaatacctacaggaaaatatttctgcctataatctttgcatttggtgctcaggtggcctagtcaccctacccattgattccaggaaaacaatcaggtcctctggtctatttataaggaaacaacactttctgcccaggcaagcttcttaagaaaaccaccaaagccagtgacagctgccaagaccattcttggtgctgtcatttgtatgctcttttcccccatcacatttcttctaacttagcatctgcttttcctgagagattgagaaaggcaagatttagttttactcttgagagaaagctgatactgtgtctgaaatgtcaagatgcctgaaaacattcactctgtcaggcagctgaacgcaggagctcctacatcccactgtgtttaaccactcttctcagcattgacaaaatacaaaggatggtacgggcattgttcctggcttaatagagcttaccaactgcatgggaagacaggaaaacaaacatagaagaaaggatcaacctgtggatcagtaactgtgttctgccaaggggtagagtggcctagtggcttgagcagggactttggagtctggtgacccagggttcaaatgttgtccctgattctcactagggtttgacctcaagccctgacttctctgtgcttccatttcctcgtttatgtagtggggggaaataacacctacccctgagctgttaagtatttgctatggtaaattatacttagttcaatactgggcacaaaccaggcactcacaaatgttagttttcttcttttctaaaaatagtgtaccaaaattcagacttttgtattcaattaagtaatttaattgaatccaatacttgttggtgcctactgtgtgccaggcactgtgccaggcattggacatataatggtagagcacgccaagggtctgccatatggagccataaggagatcgaattccactgctgctataaatggtccaaaaggcctgagcacagcacacacagggaggatgcccaacaccatcctggggactcgggaaggtttcctgggtgtaacaacaatgggaaggggaggcctattttaggtgatcagtgcggattgatacaagatgctaactgagctaacaaagcctgattttcctcccattttgcccctgtttgagcagaggtggattgatactgttggggcttgaagcttttacagtttgccagtcctctttaaggaaaaagatacacaatgtctttcttatgaataagtgacagaaagcaggtgaccatacaaacacattgctaaagcccacttggaaggtacccaaagcctaatctttaatcagcttcatggaaatccacctctacttttgtcgaaaatttacctgtgattctatagggactgacagacacatgtgggagatgggaaacattgacaactagtaccaaagagcaatgtacagtggaacatgcaggcaaagatgtgtgaagacagtgggataaagaagaggcatcggggcaggagactggatttgagacctctctgtgtaaccttgggacaaatgacttcacctttctgggaagcagttatctgatctgtaaaatgaagaggatccactcaactgaaaaaaaaacaaacaaaaaaaacccccaatctggcattcagtgatccctaatgtgccacatacagctgtgtgtggtttataggtagtgagttatctaatcctcacaaaaaccctgtgagatagatgctattcttgtctttagtttacaaatgagtaaactgaggcatagagtgtgtgaataccttgcccagggtcacatagacaagaagtggctagcagatttaagtatggaccacctagctttggagctttttctcttaatccattctgctgcaccctttctctataagtacaacatttgagtaattgctctcgaccagccactgtgcatattttatttgcaatgctggaaattttatttttaacctcaaaatgttggtattaatattgctctttataagataagaggaaaccaagactcagagagtttaaataattcccccctggtcacataactctttatactgcttatagagtaacttcaagccttataactgattaaaataataaatcaaatggtagccaacaatcaatggaggaaaaagtttttccaggaatacataaggtaaaatggacaaatcatgacattatattccatccagattaatctctttcatgatcctctagtcagcccaattcctacaggacttctatcccaagactgctaagcagctctcaaagcttctaaaaattcaaataccggccgggcactgtggcttatgcctgtaatcccagcactttgggaggccgaggtgggtggatcacgaggtcaggagtttgagaccagcctgaccaacgtggtgaaaacccgtctctactaaaaatacaaaaattagccgggtgttgtggtgcacgcctgtaatcccagctacttaggaggctgagacaggagaatcgcttgaacctgggaggtggaggttgcagtgagccgagatcacgccattgcactccagcctgggtgacagagtgagactctgtctcaaaaaaaaaaaaaaaattggaataccatagttttggtaacagagaacggcagttctgtgtaactgaaatttcaggtaagtaaagcttcacattatgagaactttaaaccaattaaatcttttaatgaaaattcttctaatatgtgctgcacatttgtttatcataagggaaaaaaagaacatgaaagataagccaacttgacgctcaggattatcagcatctgatgatgttttctgtatacttggttctacttagtatgttttcttttctttcttcagtgtcaaactgtccgtcttcatgtttctagctgctttcctttctcattctaatttttagctttcattaagtttcttttttcttataaaccatgttcattgtcatttgttagccaagttgagaggaaagtggctcaatatgtaggtatgaagatcttttaaattagtatgcatgagctttgtagtaggggcactggggagatctaatttagtctcacagaagcctccctttgcactgttttgtaatcttcataaatttaccaaccaaaatgtttaatctgcctgaacacattggtgttacttttatattaggcctattctagacttacttggttctaaatccccctaagacaaaaatatcacacagtggttttgtgatcaagaatgggccccaaagccaggctgtctgagttcaaattatggctgtaagatttgtggatattatgaccttggacaagttaattaacttctccatgccagtgttttcatctgtaaactggggacaataataatattttgcttatagtcttatcgtaaagatgaaataaaatgatatttacaaagttcttagcacaatacctggcatatagtaagtactcaagaaacaaatcattattatttctctcaacagcctttattttatgggccaaacctatttaacgccatactttctgaaatagcaagtagtagtactttttttggtaaataaattgccagtttgcaggcaggtatttatatgaagaacttcaattttggtgtcctgaagtaatgatatatacaagcatattgacaaggtggcatatcttctggattgctctctggatcacctggattgctctcaccaaccactggtaaattttaatatgcccaagtgcagtgagctgtgttgttgaggtgtttcctggtgttttggagccatctatgcatttaaatagagtcatcaactgcacaggaaaggcaaaaccatacagcttatttattaaatgctcataaaattgatgccctgccctagagcaaaacaattataaatcactggatccacagagagctgtaattcacctattgggatatgatttcctcaggatattgcctactgatgtcagcagcttctggtctaagatgtgagctgtgtccatgccaccaggtcacctgtagttatttttctattgattcatttacagttatactgaactgaccagtttttctggcattaaacacagcttaaattcggtgcaaattaagcatttaattaccccatatttatttttcaagccagacttaagaaaaaagtacagcatttttctagttggatagtacttattttcagtagtaggcatattcttctttttccttgtgcttttactttcctaacactaattttgctagtcctgaacattgccactgtggcagctaaacagcgagataagagatagcaaatgtgagcatcacttgatacaaatcactttgctgaaggtgctgatgcatatgaagggaaggaaagcaaggtctccatcttgttttactatctctggagcaactaaatcaatttaaaaatgtttacaaagcatcggggccaggcgcaaaggctcacgcatgtaatcctagcacattgggaagctgaggcaggcagatcacgaggtcaggagattgagaccatcctggctaacacggtgaaaccccgtctctactaaaaatacaaaaagttagctgggcgtggtggcaggcgcctgtagtcccagctacttgggaggctgaggcaggagaatcgcttgaacctgggaggcaggggttgcagtgagccgagatcgtaccactgcactccagcctgggcgacaaggcaagactccgtctcaaaaaaaaaaaaaaaaaaaaaacagtttacaaagcatcgtgtgagaaacaatagagaaacaacagaaaagtacaaaggagacataaaataaaaaagagttgaagtaggtaaagtatgagacagggttttggagaaaaacaaagaggataattttagggagtttaatgattttacaaaggtgtgtgcaggcttagggaagtaataagggaagatgcagactccagagctagcatcagagagtcattaccacccccttggactgaagggaacagagaaagagcagttaggaaagacctgtagctgtagtaataggagaaggacattacattagagccttggccttttagaacacagccactgccaatcagtagctcatcatggaaggggccacagatgccttggacctctcattcatcccaccttctgatctcttgcctgtgcttctcatgggttgaacccaccttgaggttagtggaacagggtggcaactgctctgttttagcagttcacaaaacttagtccccggagcacagggtagggtgagatttggtaaggagtggatctggaaagcaaagaaacatatccagcacaagaaagaagggctgggattcagagggtgccttccgccttgccaggctgagcacgctccctgctgcctgagcaaggttcccacacaacaacagccgacccacactggcctctgacaaacatgtttcctccaaaagataagtcaatctgttttttataaagggctgggcatggtggctcatgcctgtaatcctgacactttgggaggtggaggcgagaggattgcttgagtacccagaagttcaataccagcttgggcaacatagtgagacctcacttctggaaaaaaaaaaaaaaaaaaaaaaaaaaaaggtgaaatttatttaattatttatttaatttttaaaaacacttgaaaagaatattacttgttataattaaattcttctcactcttttggtaatctggcaggtggtagatttttttaaattttttttgttggagatggcaatcctccgtcaattacccatttgtatttatttattaacattattttggttttggaagcccaaatatctgggattcagtgatgtggagggtagtatagacgcccctgggctatgtatagctggacagtataaaggaagcagctggagagccaggcaggggctgtattttagtcaaacaactcctggtgcagcttaaagcaccagacatttatgaatgactgcagtgtgctacgcaaagtgctaggccatggaggagagggagccaagagtttttaagcttcctatcttctagtaacttactaaataatgacatagaaacaggcgtggaaataaacaaaagaccagccaaatgagaataggcttagctatagcaaagggatcagccaccatcacttgcattttggcagagactcaaaggcaagcagaggagtgggaaagctttataatggaaaaaaggggagcgtttatgtatgccctggttgcaggctgttagcatggggaaactgtaggcatgctaacaagaagtgagacatcctatgttattggctggtggtgcatattttgctttctttgattgatcctaaattggaagcagggacaaaaattggggaagctgtcagtgattaatcaagtcctggaccttttgggaaaattattacaaaagtttttgctaagcctccaagattgtcactaattagagcagtgtggcttcccgcaagtctgacttctaacaggctggctttcctggtgtttattgtagataaggaggttggtttcctgggaaggttgctgcaggttgtgggtcaaagttctgcttttacatgtgttctgggtgttgtctatttgtacgttgagtctcacaaatatacctaactcagaaccaactttaataagagcagcaagagagatagcacaagaaaaagtaaagggttttgggtgtctgatagcttggctctaggcaagttattaaactctgtaatgcattggttttaattttctataaaataaggataataatatttgccttgcaggcaaaatatatttggcttgtagggctgttttaaggaattacctaacatgtgtattgtgcctcttttggtgttctcatattttttgaactcatttcacccttaaaaactattgaggtcatcaatgaccttgtttttatgtgggttatatctactgatatttaatgtattataaattaaaatgaagaaaattaaaaatatttattttcattttaaaataacaataaacccattgtatgtacacataaagaacatattttaatgaaaaataactgcattttgaaagacagtacaattagtgagaaaagtggcatttaaaaaaatctcattatatctggcttaatcaaagacagctgatttttcatatctgtttccttattcaacctgttgctgtatcacacatcatgtaacctctggaaatttccactgtacactcatgggagaaagacaatgagaaaggcaaataaaaacttggtattcttgtgagagtagttttcaattcagagaccctctgaaagactttaggaaccttcagaccacattttcaataccactgctctagaccatagaaggcactcatataaatcattaataatattagcagaagactacagcagtgttggcatttatcacaaggggcacttctttatagaggtctgtcttgataaagaggccttgttgttgtcaatgattggaaaactcctatatgctggcagattaaaggcaggagatcttctgacaataggtggcttccctggaagccaggtctgaggctcaggacgaagagtgcaggtcttgcaaatgaagactaaaccagagagaagttcttatttttcagcagtatctgagtgagagaatgagtaaatgaaaacacaaatacacaccctttataccagttattttcaacaatatggcaacagcaagtgcaaaggactggaaaataggtcctgtggccccacctcactgctcaaatctggctcactggagcaacagtcttcccagttctgagaagagaggcaggtgacaaatatgatgaatcctccttcctccatcctccatttgctttacaaactgggcaactgagtggagaagccattgggttttctggcaaaattctgaaaaagggagcatagctggtgaaaacaagctcctggaatctgaaatcccagtctttcaaagtttatcagaagctaaatgttcaattacatgaagttatgcatgactgataggctaatgtctcaaatatttaatggtatttaaattttaaaatagtagtttgtgaagcaaaggaatgaatgagctttcagcaacaagttaaatcatgggtcatcttccctggactcttcagattagagtccctgtgtgaaggctgactcagactcacaaggcatattattgacactttactgtaattgagggggagaaatggactgatataaattatttcattttaattaaacaatggatctgtcctcctactataagaaaggaaaaaggtaatagttttgttttttggggtttttcctctcttcaaattttgcaaagcaattaaccttcaggttaagacaaaactcagaatattttatctctaccacttaatttgtcacaaatttacagtcaattggaaatataataaaagagtgagaattgaaagcatttttcttactttgctgtatggctagcttctgcaaatgctgtagcaagttctgtacatgtggttttgagaatgaaattctaaattgagttttataatgacataaaggctgaaagcagagattaaaggagagaggcttcttactcagagactggtgaaaatccagatctgctgagacctttcagcctggccttgatggtgacacatgaaagtgattctacagttgggaggcactcaagtttgcagatggcctgatctcacaatatgagagagattcacatatgaaagcaaccagacaaagaaggctgtagaaactagaagcctgggtgaacagttttttacgctggggtttatcagaaccattgtctcccagaggagtgtctggtcaataattttaacataggaaccatggtctctacagacctcaaagtgtggtcccagagtcagtcccttgtcggaatcacttggggaatttgttataactgtagattttgaaccccatgtcaagcctactgaattcatatctctctgtaaacagaagcagggaatatggatttctaataaacttcccaggtgataactgccattctgagaaacagttcatcctgtcatattgtgtctgttcacggagggctgaagggaggtctacttcagtctataaacattgatgatggatcggggaaggggcagaccaaggtctttttctcagacctccttctgttttctgtagccagataacagtcttagattggcccaaatatggcagcaggctgtaggcctattcttcgagtggctgtggacagagggtatatgtgcctggagaatagcatcaaagcttaagagcttctgacatactgtatttgacaatggttctacttgctctttcatccccttctcttctttccctaccagcctattatcatccccttccctctctccatgactgaatacagtcccacttctgtctgattgctaactttgctttggattctttctctttcctcctattcactacattcttagctattgaagtttagaagcattttctctccattcaccttcatctcagttttctattctagtctctgaactggacatgaagcaaaatgggaggttctaatactatctctgtctcaaccaaagagatgtttgtctccttaagctttttggcatttcccacagtgatttgcaaatttctttttatgtcatggagtcatgtctttaaaggaaggcatatggaaaattccaatgactagagggaactgacctgttttcagcaggctaggaagcatacggtttcatttcttcaacttcccaaccccttacctagaggaaggcagagagggctcatcctggaaaaccattgctctacaacatcttttagaatgagggcagaagaacctacagacacatctctggcagactccatccatggggtaagcccctttagagatggcagatcttatggaaagagcccataaagtctcttaaaactagactataggaaggaaagtagagggggaggcacaaacgtaaagacatctagcccacagggaatctgccgtaactctaacataacttgtgtatttgtgtgataaggattcattagtaaatagtgccaggaaaaacatttaatatggacattctctccaggtagagaagagaaaaaaattgagatgagaccaacagttaaaactttccatatctgaataaaagtcatattattaagagatacatgaataatctatcgttcagattttgatttttcttaactgcctcttccactaagttatatgggctcctatgggttatgggctggacattatttaattcaggagtctcagcatctagcattattggcccacaggagatctcagtacatattgaattaatgaatgggtatagtaatatctaacagagttatgatcatgctcgtttaccctatacatatttacttgttaaatttgtttgtttgggccacgtgtggtggctcacgcctataatcccagcactttgggaggccgaggtgggcggatcatgaggtccagagattgagaccatcctggttaacacggtgaaaccccatctctactaaaaaatacaaaaaaaaaaaaaattagccgggcatggtggctggtgcctgtagtcccagctactcaggaggctgaggcaggagaatggcgtcaacccaggaggcagagcttgcagtgagctgagattgcgccactgcactccagcttgggcaacagagcaagactccatctcaaaaaaaaaaaaaaattgtttgtttgtactcctaaattttatttagatatttttagttctcacaatcatcactgttcttctttcccattatttcaggagttcaggttgagggatatttattcacaccattgaaaagtttaaagaaatattatacagggaaataagatcacttgggagaactctgccttccagaagcaagtgtagcattctggttaggagcacaggccctgatgtcaaactgtctgggttcaaatgctgaatcagctccattctagaggcttcctaacttctctcaattctagtttctttatctgtataatgggcatattagaatatctcccttatagtatggttatgaagaataatcaggataaaacatgcaattcatttaacacagaacctcataaatggtaagactcaagaaatattagttcttgttattatttgtggcttagaccaagaaaaaattcaacatccaatctcagaaagttgtgttttgccactttgaaactttcccctgttaatataaaactactaaatcagagtgccccaccatcaccacctcaggtcacacctccctgactctctccttgagaaaaatagaaagttgtgcaagatgcctcccaaatattataaactttgggccccacagaacctgggtctatggcagttcccaagtcagtgggggagaaaagctgaagcagtgtagtaacaatatattggaggttgctgatcctcttcgcagaagaagatgaagacttatttcaagatgaagacttttaattggactaaaataaactgatagagatagtgaggtaaagacagaatgtgagataatataagcaaaaaagcagcactttttgatacaagtgcattattgaattcaattaactaaaggtaccacagtaaggtcgatgtttgatgtaaaaacactcaaagaggtgacaagaatattttctgtccagtgttcagtgagtgaagggataagtcatcagagctatcacgtgtccagagtcacaacactggaatacccatctagatgtaaaagttatcagctctcctctgtttttcttgaagacaaagtgggaagagatgtgctaaaatggcaaaggaaaagtttaagaacaaatgcataaggaagactgtcttgttttgtcaaacatgggaagttacatggggaggttgctgtccattcttaatgggaactttccaaaggaatgcattttaatctgggtgcaatggtgtaaagaaagaaagcagtgaattggtgacttataaaggctcctgcctccaaaaaacccctttttaaattaaagggtgtcatctggcacacagaatagttccctgagcttacaggaatgatttctacagatattttttagccagacggagaattgtcatcctgggaatcaaaatcagactaattttgtccagacctagaaacctcctgggacttggctagtgcaggtgcctgtcaggaccagggtttgtacatcgtcagattctttcttcctcctctagccccagaggctgtgctctagagcatactttacctctagagtagttgtcccctgagcatttgttttctttcctgacacaggaaggaagataaatactgttctgtcacagtttgagaaggcagtccatgatcatgatatagctaataaggtgctcaggagggaagagttcactagatggtggacaacgcgtggtgtttggtaataggagatatatgcaaaatttgtgttaacaggttatttaattctgtttactaatttatacctgcatttgggaagtagagaaaagaacacattgaaaatcactgagtatattaaaaataaaatgctgtcaaattaggaaagttaaagaacgggccaaagagaatatagtattacattaattacctgtttgactcattgcgctcaagccagcaaacttgaggcagctgaaataattactgtatttattattttggctccaccccagcttgaaaaccaatccttcttggatgaagagaatatataaaatcaaaacatacttgttcacctgctcagtttcaaagagatcttctgtctggtcttcctggtatcccaatttcctagaaactggtttccctgttcttctatcccagctctctagtagatgggttcctgcccaaatgtgcttccctagtatcccagtccttttagaaactacattcctgatgtgaatgctaatctctgtattcagtttgggttctggtcaagtatccatcataactggaacgttgaatcctgtcttttgactcatgtcctactgtggatgcctcttgattagccatcaccttgcttttgcatttctgcccctttatttacttttgccttatttatctgcctgcactgtgttcttgagtcttctgatttgactccctatatcccagtccatcgtttggattttatatccaccaaatgctttctccagtctattttcaattatgttaatatcattttgcttgcctcctctaattagaaaagaacaaataaagaggaacaaaatgtgcctgaccaggatgaaaaataaatcacccagaaagtggtgaatcataagccttggaattgtctccttttcgttcccgaagaacattgttgcaatgagaaggcaataacagaccaccaaaaagataggaagggcatatgagaatttcaatctccttatttttgtgatgtcaaggcctttcatatgtgtccttaaagttcctgcatttgtaaaatttttgcatattcaatacatcacataaaaaattttggaaaacctgatgaggagcatatgaaaattggaagcatgaataggaaagaaacttttaataataggttagttatttgttgctgttgttgttaaattcacaattagtggaaagtaaccatggaaagaatgggcatgttgagagagcattatcattttttttttatttcaaagaactttttttttttttttttactattcagtttgaatggtttaataatctcttccaattccccatccctgatgtcacaaaagtgtcatatttggaaaaccaaaaggtttaataatcttttagtaagcctttctggcttcctgaactcaagaaagaaaatcaaacaaaacaagtgttgaacattcaagctgtattctgtaattttttacctgcttttcttcttcctttgttcttctgtcttcctctttccctttgtctctcctgctatcactcactctctctctaaatgactagatattcattatccggatatattctgttgctggaacagtaaaagatctgtgatttctatccccgaagactccagattttttctgggattttcctataaaaagacttaactgaagaagaatagacaggatttagagaaactctttaaattttggatatactataagttccaaaattaatatattcctttgaaagataaaaatttttaaaaggaaaggtggaaagacagaaaaagtagttggagctacccactcaaggcttagtcataattaactttaatactgaagtagattttttggaaagatgattagctttcattagtgttttaaaagtacatatgttcattgtagaaaatgtgcaaatacaaaaagtagaaagaaaaagacatcactggaaatcttactacccaaaggtaactatttggcatacagctttccgatttttccctatatatatgttccatattttaaagaaaatatacatatgatatcaccaactgtgttttcacatatatgttatgaatcttttctaaaatatttaaatatacattgaaatcctggttataagtagcaacacaggagtaatttatttaagcaataccttattactggcttttcttttttcctgattatttttgtcattataaataatgataattttcaatggtataaatacctctttgggtggataagtcccagaaaatagaattttgaggttcttacagttatgttgcctagttgacatcctaattgctgtgattttacacttccaacaagagggcatgagatgcctatttctttgaaccctgcaatgcttgtcataattattcttttgattgccagttttgaattcattatattttccctttcatcttttgaggtgtcttttcatttgcatttttttctttataagttactaacttttctattgttctgtgcatctttattttcattgatttgtgaggctttttcctcttataaataggcttgtttttcctgaaaataagcttttctaattctttgcattttgtttatggcatgttttggtcatccttaattttttttattctcatggagttatatttatcaattattttcttaaaaataaatgtatccaaaagacaagccatactaatgttaaaaccattataacattttctaaagtccgtgttattttataattataacccactttacaactcacatagatatatgttaggtgtgagtataatagaaacctcagcagactaagaacctgtagaaaagcaatgtcagaacagagaaacaaagttcagaattgaaaatagcaggaaacagacattatatgtcacctcgggcactgaacgtatgcaagctgtatatggatcactgttagaagctcttgaagcagttgacatcaacactaggaaatgatctttctttgttcagtagatcaaaatatagtaacaggtgtgtagcaggtgcctctgagttccctacaaggttccttggcctgcatctgatgttagccccaatggcagcgtgggcaggtctgtgcacagtcagcatcccacctcaagcacaccatgcctgccttactgcatttgccaaggcttttctgatggcacagctccctagatctacacttgcaagtgtggcctggaagtgcagtgccttgaaacactgccactctcacactaaccctcatctgatagaagaccagagccaggagataagttattgagtcttccctctttcgaatggacaattctggaaagctttctgtatgcttttcagataatagctgtactgaaacacccttgctcattgaaatgagtgagctaggaaaggagaaaaagacaatgtaaagatacattatcgatgaccttgattttttttaaagatacattatgaaggtatgcatgatatatctttacattgtctttttcttctttcctgtctcaccctccctgtcttagtcagcttgggctgctataggaaaatactataaacaagttgctcaaacaacaaaaattattttctcacagttctgaaggctgggaagtccaggatacctgtgccagcagattcagtttctggtgaaggctctcttcctggtttgtagacagctgccttcctctgtgtcctcacatggcagagagaggagagagagccctgatctctcttcttttaaggacaataatctcatcatggggaccacctcctcatgacttcatctaagcctgtttaccttccacaggcctcgcctccaaatgtcatcacgctggggattagggcttcaatatatgaattttgggagaacacaaactttcagtctcctcagtcttgctccctgttgcttcactcctttttcccagaatcacctcccaaataaaccacctgctcaccacaagttccctcctcaggctccacttttaaaggaactcaaattcaaatagtgtcttctctaaaacttatctgttaactgtgcttggatgatataaaatcatgttttttcaaagatctattttataattgtaaagatgttacccttccttccccagtgatgtttcattgtcatgaattcctaacatttccattctctttctttatccacagattctgtcaattaatcaatgattttttaaatgtactagggaagcttactacataaagggaatctactgcacacaggggcataatataaaagtgcagtcatgctgggtattcccagtgcctttttaaagtgtgggcttgatttctttcccagcctctctccaaccaacaaagactaaagagagagaaaggggagcagcctctcctggttcctttcctgaagtcaagctcattctggcctcttggaaaggaggaacttccagctgctggcagccaatatgtctgcctgctttggagctatttttcatgacctatatctctgccaggaaaatgaatgtcaggaatgtacatcagaacttgtaaagtaggatagccttcccctctgcctttcccccaaaccttacgcgtttaaaataactcggagtgtggaatgaggaagggaagattgaggctgactatgcaattattcagactatattatttctatttggataaacattgatcccacaaatgccaggaaagttggcaatcaccattgtagagagtgctccattaaaatttatgagccaacatactgtgaggacataattattatttataattacttccatgatgctcagtgctggttttgagactatcttgtgtcaggtggtatataagatgccactgaaatatctgaccctaaaaatcctctcataagtgtggccaaaggatactgaaatgaaacagtagaatagaaaatcagatgtctttcagagacagtgttgtcagagaaggtgtcttctgtaggatgctaatcacacttaacatcattttataaagaggacatcaattcttctgctgttaactggtactctagtgcaatattgtaattatactaactttccgatcatctgacaacagaggcttccaaaagacagttttagttgagttacctttttggtattttgtactcttgttttaggaataaagaaatacatatttttcttaatcagatcattccttggattgtgatttatcccatcaaaccaaccatcctggagccatgttcataaatgaactgctttagctgcttttgatctctcctgcaggctgactgtcatcacctgtcagcaacttcatataataagatctggtgtgctctgtcagtttgtatcagagcaaagttaatgtgtgagtgcaaaaagagttgacccctaaaagaatggaggtgtgctatgtgctggtgcaggctgtactcagtagtcaatagaatgcgtagagtctctgtaaatgtggtatttaaggaacaggctgttttcactgtgtaccgttgtttagtttttccaatcctcctgctgtggcccacttacgaaggagaaaacaagagagtgcacagaagcctgccaccatggtagctccgccagtgtgcgtggtaacaatttattttcatattggtcaaaatgttctaaataattttaacaccagaaatagcatggaaatggggaactaaattataaatgaaaaaccaggagaaatgctaaggatgggacatttcttctccatttctgattttttctttccaactggcacccatgatgggagcactctggcctctcttctactccttactcagcattacccagagtggcacatctgactagtgagttgggagagaaaacaaaacaagcaaacaaaccttctgcaggagtttgctgtctgctctgttcctcagggctgcaggtttcaggaagacctgtcccttcagcaccatctaggtggaccagtaacttctatgactggggagaagtctgtctacctctagggttttcacacctaagccgctgtctccaatgtcagcctcatctattaactgttttgttctttttctccactttttgttttaaaaaagagttattatttatgtttttttgtgttgtaaaatttctggaatatgtctgaccaatattggcttgtggcaagtgtagttgttaagagcacaggctccttgggcacataacataactcccttgtgcctcagttctcctctagaaaataaggacaatagtagtaacacctgtgcatagggctggctattgtgggtacactgcaccttgtctagcctaacttcctttctatgagccatttctattatcaagccatgccatttgcatgatgagctgcatttgctgtcagcctaatgttgattctaaacatggtgaactgttttgaaccattactgaactatagaactctagaaccaagtgagacttaagcaatcttagctttaggttctagttcaatggaagataaaactgaggcacccagacctgaaataattcatgggaggttgtacacggtagcaccaaagctggacattccatctgaccagactccagatctattgatttttcttctacctgagctttctttctctcttataactatttctgtcgactactctcctcacattcactcttccaatttaatgcagttactaagtctagtcaccaaccacattctacctacaagggattctataccaggcctcaataaaattttaagcattataaaacaacaacagtaataatagatagtgctccctgagattcacagtatatttttcctgttagagaaagctgagttgtgacttgcctgaagtaatcatgtaagaaaagcctactagaaaaacagtgctattgacttgtgatggatggtttttcctttataaccaagaacatttttaaagtcatatatgtatttcttgattgctcttttaacttcacttcttcctccctagagaactcactcttctgtttgaaacatcgcggggagtgcaaactaaatacagtattgaagtaaaatccctgcaaagctaatgaactattttatgtaaagtaaggcaggaaaccatttcagtagtggtggtgtaattaattggttgtggccacacagaggcaagattttagaaatgggcaatttataatagggatcttagaaggtcacatgtgatgaattgaaaggtagaaaatcattactttcaatcatgcatcaacctggaagccaaatcagactctttaatgtatgttttcaactgagagcagtttgcctaaatttcaaaaaggaaaatgtgatacatttgccaacagtctgcctgtatagctaattaccaattacatatcataaagaatctgatacctgtcatgttgtaacagatttcccaagcatggggcatgtggctgagcatactagcagataattagagtcataacagctaaaagaacattgtccttttaagctgaaagaacattgtccttttaagctgaaagaacattgtccttttaaaatcctcaatcttatttcaatatggaataatcctttttcagtgaatttaggataaatgacataagtatcagttggccggcttatttttatgcatgttcagctattctgattctggtgacacctgtggcatttatttttaggaccctagtaaactataactttttttttctttctatatagcttagaattattcttctatttaattatgtttagaagttggaatccattagctgggcatggtggtggacacctgtaatcccagctgcttgggaggctcaggcatgagaatcatttgaacctgggaggtgaaggttccagtgagccgagattgcaatactgcactccaacatgggcgatagagtgagaaactctgtctcaaaaaaattggaatccaggttaaattggtcacaatgttaccaagtcagaaagctcacaatgcagattgcaaaatactaatgaggacatcactgattttcatctatatcaaggtgtgtttaaattgctaaagcaatactgttttagttttagtttttgtttttgagatggagtctcgctctgttgcccaggctggagtgcaggggtgtgatctcagctcactgcaacctccgcctcctgggttcgagagattctcctgcctcagcccccgaggagctgggattacaggcacctgccatgatgcctgactaattttcgtacttttagtagagtcggagtttcaccaagtgggtcagggtggtctcgaactcctgacctcaggtgatccacctgcctcagcctcccaaagtgctgaattacaggcgtgaaccactgcacccagccgagcaatactggttttattttccacaaatactggccctctatgacataatatttgtggaataaaagaacaacaaaacattctattaattattttgtgagaaattgagtcagatagtagcctaagattaagaatatggattctacgaattggatttcaattctagctctgccacgtattagctggatgactgtaatggaattacttctctgagcttcagttgtttcttctagggataatggtaatgataccaacttttcagagtgctgagaggatttgatggcataatttgtgtaagatgcctagccccgtgcctgcatggtaggtggaagatacaaataactcataattatgatatctgagacatcaggcaccgggagaaaaagccagtcacttttaaggaaactcagttccattttagactgtaaagtttgagtctctgtggagtggagttgtcagtgggtctcaagcctggcatagaggtcaagattaaagattaagattttggagctataaataggttgaatcgagaatcaagaagaaatgttcccatcctaactatttctcctggttcttcatttaaagtttagctccttattttcatgctatttctggtataaaaattatttaaaatattttgtccaatataaaaagaaagcgttaccatgcacacttgcagagctaccatgatggcaggcttctctgcactctatctttttcccatccctaagtgggccacagcaggaggactggaaaagctaaacaggagcacacagtgagaacagcctgtcccttaagcagtgcatttacagagaacaaatgaaattctgatttggctatttcttggttaataaccaaaccgagtaattcaagaatcaagtaatattaatgagaaagtgatttatgatcaaagcagctatcatttgggaaacagaatttcccagagagtgtttgaggtagtggagacactaggaaaggaaaggagatgtgattcagatgaaggctcctgaatatggctacaaggtagtcagtagacatattaggatcattcagggtcaaatgagactgaacacatttccctctgtaaggtttattaggcttcagtgcgtcagcaagtgccaggggctgattattagcaccacagtatataaattgagagatcaccagattctaattttctcttgtacctctcctaaatgaatgtgtagagcatgtatttccatgaccaatcatgtgtctcacttctaatagaagaaaatatgcttcagatttacaaagatgcatgaaatacaactagctggaaatacagaagaaatgtagcaccaattactctttgagtaagataattgttggaagttttaaaagtgataaaaagtaagggcacaatattcattcatccacctacccacctacccaccgtcatgaacatccaccctttgccaggcatcgtgttcaaagaggaagaagataaagatctgccttttcaaaatcagacaagtgaaaatataagacagggtcattagtgtaatttgtgaaagactggaagtaactaagcagtggatatcatagcattttcatggaagagtgcaggaatgctttctggaaaaactgataacttccctgagccctgaggtcaagaacgaattaattgaagagtgaaggattggtgttgagggtcaggaatttccaggcagagggagcagaatgaggtgaagtggacctggggcccacagataactgggacctgactggtcaggtagggcctggaggtgagtaactaaggacactctttcccacgttaggagaggagagactgattccagaaacaaatgtcgttcacattcagtgttgcctattaggatttggacagggccataagtgggctctggagtgtgcgggacattctacccgcactgaacctcattattgacccttggttaaaagtttcacaaaaggagcgaagtcgaatgattttctccttttgggatatgcctgatttctattttggcttcattctttgagtgataggaagcctctggagcaccacccatcctcatcccaaggctgagttaggggccccctttctgttctcatagcgtcttctctcactgcacctagcatagtgtgttgtaactgacacaaacagcttctatctcagtctctcgagaagcataaaacaatgtatttatttaatacctctgcatccttaatgctcggcacagtgcctgacacactaagcattgataaaggttcattgaaacaattagtctacaaatacatgagttagatattctggtgaattttaagaaaatctattatacataaggttttctcggtggaaaaaaaaagaaaacattaacagcgcaagcttcacaccagtaacccaccgagcaaagtacaatgttctctctaggcacttgacagactcccaggcctgctgtggggttagagtgagaaggaagaacaaacctttcactggtgtacactaagctccttcagatgggtggggagtgctgtacgtggagggcagggcacacagtgaaaatagaggcattgaaatcaattttgcgtgctgcccagttttgcctccagctttctgtgatcacactctctcaccacttgtgggggcagggaaagccggccccatgcatctctagggtgggttttagtgcattcattaaatggcaagaccagtgatcagtcatggccgacatattcaattaggagtcttgcaaataattctcctcaagctgccccttggcaccttctgctgtatagttttaaagtgtacagaatcagctaaggagaatagtaatcacactctatattgcttatcctgtgttgcaggctggaattattagttctaggtccacctataaagtatccagatatagaggcacagtattgcttgatccaatattcctctttagaaactggacctcaaatcaaatgtagatcctctgttttgaaaagctactggataaggcacttaagccaattaaaagtaaagtcagctctcaggatgataaaaatcccaacataacagctttgtagctacaaagatactgtattagtccgttctcagactgctataaagaacttcccaacactgggtaattttattaaggaaaaaggtttaattgtctcacagttctgcatggctggggagccctcaggaaacttacaattatggcggaaggtgaaggggaggcaagtttagaccttctcacatgggagcaggagagagaagagtgagaaaaggaggaacttgccaaacacttataaaaccatcagatctcgtgagcactcactcattatcatgagaacagcatgggggaaccacgcccatgatccaatcacctccctcccactgggtcccccctcgacacgtggggattatggggattacaattcaagatgagatttcagtggggacacagccaaaccatatcagatactttagctattttttaataaactgaataatcattttctctctccaaaactttgagatctatactttggctgacagtccgtgccttcaggcagcctcacaagaatatctgagaacagacagtattgcgttgcatccagggtaagtaaccaccataaaattttttcaatgacacgttgaagttaacaataatcctaacccttggatgtaatcatgcacacaatctcacgtgaacctgaattaactaaccaggtctccatagtgaaaggatccacgttcctttgataatgagtatgatgtagcactttgacactcttgttctctttacaacaactgtttggggttaaatcaatgtggttatcatgttttgaagatggaaaacagctgaataaaaaaatgtgacatagtatagggaatataatatcatttttagattataaaaaccacagtttttatctaagttttgaaatgaaataattccatgggtataagctgatgactttgcttccctgggccacagtttcctcactggaaaatgagagctaaaactaaaaagtcatgaaagtccttctaagaaataaagtccactggttcatggagaattctacatcctaaagttaattaacagaagaccccaggttggcctccctaattgcgttttaatttactttttctcagcacactgcttttctagtagtaatgattttgtttatttacccatccacccatccatgcattcaacaaacacttattcgatgagtcccgtagattctgtgctgtgtgtgcaaagatgaacaagactccctgcttagtgtcttctcttagagagatcacaatctaatatgtgattgcttgggttttgagtttgtgaaatgagcttctcaatataaatggaaatctctcatagttttctgtaacgtaaagggaaatcatgcttcaaaatgtaatgaagtagaaaataaaaacaaaatattctcctgtttcttgaaaagattttaccacaagatctggaaacttgtttcttgaaaagaacctaaaggtctttgtggaatatttcatagcctctaagagagacaagtctgaacttagaatttgctcatctttatcagtgtaaaatagatgcattaaaatactcaagtattttatgccatatttttatcagagcaagctataaaagatacaaaagatcttaaaagatgctataaaacctccaaatctaaggaggttaatgcaataaaatttaattctgagtcatgtaaagtccaattctgattttctcctgggggacagttctcctgagcagccccatggggcttctgtcttatggcttgtggctatctcaaggcttcatcatcctgtagcttcaagatttccctgttgttgggaaaatgatctcacacccagtgcttaatcaccgaggttataaaccaaacatcagtttccttcacattccttcggcaagaactggtcacatggtcccaccatgctgaaaaggaagcctagaaatgtcctggctagacagccacttcccagtaaacatcttagttggttatgttatggtaaagagttgctgtctcaagtcccgcaattgctctaccacctgctggtccactgggagctcctgaacctccctacggtctggtgaccaaatgcccaaaactaagtaggatctaagacattgtttcaaagttctgcctggaatcccttctgattagttgatgcctattcagtactgattattaaatatttgacatagcacgtcagcatctagtatctttgcaagctccattttccaaactcactggcactaacttgcttgctgtggtcactgacctctaatttcagatctcttcctttggacctgatgattggtaccttcctgaagtgcttcatctttccttgccaggatacagacctacttctctcaaaccctcacttaaggcgacccatctccaccttactgtctgcccatttcccctcccaggtctcttaaccaccccagaggagccccacattctcttaaccaccccagaggaggctccaaggcacccagaatcttcataatttccctttctgggtctcttactgtcacgcttcaccaagcccgacaagctcttgtctctccctgcttacgatttccctctcagtcttcctcccacaaagagagattttcatccccacctcatcgaaatctgggtgaccaatattatctttccaggaaactctgaactctgtagccaaagcagtgaacacatctctgctaacgttttaatggtctgcccatcacagacagcacatttgcctgacatctggagactgctgaagataaagccttagctcaaaaagcagcactctctgttgttttttcaggcactacagcagcatcaaactgcacttttcctcccctgtctatggtgacctctaattctttcttccttgcatttctgactttctgcctttctgtttataatttacaatttatatggaaagaattttcaacatctgaccattacaaactgaaagaaattgcataatattgctcttggacctagaattaagtgggtttacaaatcccaactcatgtagccagggaccttttaaataaataaacattaaatactggctttgtaccagttaacattttcttaaatatgatatgagggtttctaactctggtctccattcaaatttaagatgcaagatatatatttggggctagtgatttagtaatatcaggtaagagatcagagtctatgaagaaggagaggaaataagagaaatgaagtgagacagtaaaaagagggaagggagagagaaggctagcatacagaaaagagtagcagtcaagaaacttgaaaagaacaaaatgtaaaattctggtttttgaatgatgaatgacaaataataatgaatgaatttgcaagtaatacggtttaactggttgaataaggagaacccctcagaatttctgatacatgtgataattggcatacgtgtgctaaacattatcaatagagcatgatggagtcctttcatacctcagtttatcagctttcataattatagttgtaaattatactaaggaaactactcctgtataaatacatatggtcatatttgctaagcctcttttatcatctctaaaggtgtatctgcagatggtttgagtccaggcttttaacagccatgattccccctatgaattactgagaattggctaggaaatttctgagacttatttggtaaataacttccacaacattcttgtacattccggtaagaaaatatacaagtctaaaagaccagtctcaagggcaaagaaaaggggaaaactaggacctgaaatagaaaacagctttgaatgtttttatcaagcaggatcactcattattcagagaaatcactttctctgtgccaagactgaactgggcatttggatccataggagctaggtaatgtctttgcaacatttggagcctgtaatgtgtcactgacatgagaatattgaacttgggcaaattagaccctatttaaaatcaggttgtttctattcactatgcaacctgcaggatcagcaatagaagtagcaaccccagtgctttcacataaactatgtcacatcacagagttgtgaggtagaaatgctgatctgcactagctgtggccacagtaccattgaccacttgcttaatcatgactgacactgagtgtatttttctagcttcctatctctttttcatgttttctgtcaccattaaatgagtcaatatttgaaactgttagtggttctttggatcagttgtctttaaagtgacaaggatggtggaggtgatggtaatggtagaggtgatattcactccagggggtgcacgagataatacattagcatgaaatgttagaaaatctatttatactattaaaatctatttttatgtatgttcttttgtttgcacatatttctgatattagtacagtagtaatatataatttattatgtatgcatgtgtatgcaatccaaataaaactaagcattatatggacttgatttcaacttcaatgaatttatttaattattcattcatccaacaaacatcgtttagcacctattttgttccaagcactatgctgggcattgagaatatgatcgtaatcaagataaacccaagtcctacattcagtagtagagtcggtatccactgaggactggttccaggaccacccccatccctataccaaaatcgcctgatgctcgggtctcttagataaaatggtgtagtgtttacatataacgtacgcacatcctctgcatactttaaatcatctctagattacttataatacctaatacaatgtaaatgctatgtaaataattataatgttgtattgttatttgtattctattttattgttgtattattatcttttattggtttctttgtcctgaatattttccatacttggttgtttgaatccatgtttgcagaactgatggatctggagggcaggctgtaattctaagggtgataagtgctatgtaatcttataataggggcacttggcctagtctgcgattgggagctgtcaaggaaggcttctgacttattattcttgtatagttttcttttcaagttggaaaatattttacaatgttctctaaggaattgtcccataaagtatagcatctacaatcaatttatattctctaagtatatggagcgtctatatacttagagaatataaattgattgtagatgctatacttagagaatattaatgatcaccattaatatagtgtctacaatcaatttatattctccaaggaggagaaacttatctttttttcttaaaacttattttttttcttaaaatgtaatgagttatattttttcttttctccattgtctactataaagatgaaatcattattgcatgaactgtacagtcagaagtattattatatctaagcttagagcaggttgtccagaggctgctattattccaccagggtataacaggagagatgcagttaattatacattgcaacttgcagtttcaaacctctggtactggtacatacacatatacacatctatatatttagatgtttaggggtttttatcttgataaaggaaaaaaaaaaaacaagagaaaagatgaaataaatgtgttgatgacagtttgttaattctgtgccagtaccttggctttaattactgtagctttataatagtttcagtatttggaaggatactatttctctccatattgtttattgctagaaattttcctctattacttttccagataaactttagaaaaattcgataacttccaaaataaaaatctgttgggttttttaaaaatcacgttgaatttgcacgcaatttagggaaaaaaaagctatttttgtattattatactttaacttctaggatacaagtgcagaatgtgcaggtttgttacataggtatacatgtgccatggtggtttgcagcacccatcaacccgtcatctactaatgtagatgtttctcctaatgctatccctccccttgccccccaccctctgacaggccccagtgtgtgatgttcccctccctgtgcccacatgttctcattgttcaactcccacttatgagtgagaacatgcagtgtttggttttctgttcctgtgttagttccatctcacgccagttagaatggtgatcattaaaaagtcaggaaacaacagatgctggagaggatgtggaaaaataggaatgcttttacactgttggtgggagtgtaaattagatcaaccattgtagaagacagtgtggcgattcctcaaggatctagaaccagaaataccatttgacccagcaatcccattactgggtgtatacccaaaggattataaatcattctactataaaaacacatgcacacatatgtttattgcagcagtattcacaatagcaaagacttggaatcaacccaaatacccatcaattatagactggataaagaaagtgtggcacatatacaccatggaatactatggagtcctaaaaaagaatgagttcgtgtcctttgcaggaatatggatgaagctggaaaccatcattctcagcagaaaatctctattttcacaatattgtgatgaggtgttggtaagacatttatttggtgatggccactgaagcacatgagagatacaggaactagtaacaaagatctggacatcattagtcttgagctgatagttgaagtcatagaaagatacattttatctcaacttaaaaacaattatcatcaagttttgtgcatcctaattcccacaatcttctattcacatgtaatctacttatggtgcccattattcatatcataccagcagccttaagaatatacaaagtgttttacattaaataaccccagaactgaatcccaaaactataaaactttatattttctgactttctgactaatttaatgttttctgcattttctttttcttcatcatcaccttgctggcctaatttcttcaggtggcactttttgttagatgagctggcttagtctaagcatttgattttaaagcttagagcaatctaagggtttctaaagcattcttaggtccactactggactataatatatcatgtaggtaatgaagtattgcttggagtgtgcaatgtacccaagggaaatcatttttaaaggcagatattaaaaggttttcttggtagaggatttatggattctttccaaagagcttagcaagttaagttatattttaaatggggaaataagaaacaattacaaaacaattttactttaccctacaagattcaaatccaacttctcaactagattatatgacagagtatatatgtgattatgccatttaattataatttaaatgtttttaagtcacaggaacaatctctattacaaagaggttgcttaaataattacttatataattacttttcccatttttaaatgaaatcttcatatttagatgagaaaaatttcaggaaattcccattgtgataaaaagtcattataaggtttgtgtaaagcaagcagcagtgaagtcctttcatatcatgctctcactctctcttctcctctttttccctctctctctctccaatgtatcccaaaattgcatttgaaaatcttttactgtatagctgtctttccaaaaatgcttaaacatgtttgatagtgatgattcagactcatttgttcatgtattccttcattcaacatttattgggtgcctattacgtcccaggcaatatcccaggtagtggggatataatgtacaaatgcctcagagagcttatatttctgtaggtgagacaaacagtaagtgatgaaatataaattatgcacatataattttaggtagtgataaattacatatatacatactctttttctctgtacttataattttatttatgatagatattatacagaaaataaagcaggatacaagggacaaagacagacctatatgatcagggttgctaaatacacagctttgctctcatgcctccaaagttatgcagatcagcaagaagaacaaataaaccatctacaacttaagttctcatcataattaagatagcaagatacaaaacctcagggaatactttagtcaagttttcttcctgtggcaccaactaaaaatgagcctcatccagtcaagagatgaatgaggagtctttggcaaaaggttttgcagtgaccaatgaaatacattaaaaacaaagatgggacaagtgtggaagaattgtataaaaggacatgttttgacaatctagaaatagcaaacttaagaaatggagaagagacagagaaagataaaaccggaatcgctctttgattgtcgtgtaattgttgggaggcaaaggctctagtttaaggctgacaaaccaaatagtagaatgttaagggaactaagaactaggtcattatgaaaggtaaagagtaaaactaatgactgcaacaagccatcttaattaacaaaattttttttaaaaagagcaaggaaacattatttggagaattaaatatggtaaatacaatgccatggtaaatataacccaaaatattatgacagatttgagatcaagcatatttgccatatcaatactatatggtcacatcacctgttaaaaagaaaagggtttcagaatggctgacaaagtaaaacctaactcttttttttttttttttttttttttttgagacggagtctcgctctgtcacccaggctggagtgcagtgacgcagtctcggctcactgcaagctccgcctcccgggttcacgcctttctcctgcctcagcctctccgagtagctgggactacaggcgcccgccaccacgcccggctaatttttttgtatttttagtagagacggggtttcaccgtggtctcgatctcctgacctcgtgatccacccgccttggcctcccaaagtgctgggattacaagcgtgagccaccgcgcccggccctaaacctaactcttacatggttgataagaggcacaccaaacaaagagacttagaaaggctaaaataaaggtatcaacagagatacgtaaggcagacgctgaccaaaaacaactagaagttttgatctagtttacacacaaagtagacttatagcccaaacctacagaatgggataaataaaacatttcataataccaaagacctctatttttcagcatggtgactataactaatcataatgtactttgtatttgacagttgctaagagagtagatcttaaatgttctcaccacatacacaaaaaataagtatgtgaggtgatggatatgttaattatcttgaattaaccattccataatgtatacatatatcaaaacaccatattgtatgcccaaaatgtgtacatttgtatctggcaattaaaaacattttaaaaaataaaaataaaaatgtaatgctaaagtcaataagtcacaataaagttatagcagtttttaatatctcgcctcaaataacataaacatgtttataaagtagaaatacacagaaacatactagtaatactctaaaagataggttaagtggataaaaatgaagtaagcatatacattataagaggaaatgacacaaaggtgaggagaggggacagagggtgactgtgggagtccctttagaatgagtggtcagggctcgactggtgggaacataaaccagtacaaccactatggaaaacagtgtggagattccttaaagaactaaaagcagaaccaccatttgatccaacagtcccactactgggtatctacccagaggaaaagaagtcattataccaaaaagatacttgcacacgcatgtttatagcagcacagttcacaattgcaaaatcgtggaaccaactcaaatgcccatcaagcaactagtggataaagaaactgtggtatatttataagatggaatactactcagccataaaaaggaatgaattaacaatgttttcagcaacctggatgagattggacactattattctgagtgaagtaactcaggaatggaaaaccaaacattgtatgttctcactgatatgtgtgagctaagctatgaggacacaaaggcataagactgatacaatggactttgaggactttggggggaagaatgggaagggggtgaggtttatctaaaagactacaaatagggtgcagtgtatactgctcaggtgatgggtgcaccaaaatctcacaaatcaccactaaagaacttacttatgtaaccaaataccacctatactccaataatttatagaaaaaaaaaaaaggaaagagtattcggggaaggactttccaaagagatgacatttgagagagatctgaatgacgatgtgtgcatcatgtgaagattggaagaacaacatttgaacttagagagcagcagtacaatagctcttaggagagaaaagacctggagttctcacagatccgcaggaaggtcactagcatttaagcaaagttagaaagggaaagaatggcagatggtgaggtgggagaagcagacaagggccagaccataataggccttatatataggctgtgctgagaaggtctgattttattctaagtgccaaaggaatcctctggaggatttcaaggagaagagtgacatgatctcacagaatgtaccttcacacaagatagacttttattctgtttttctcttagttttatcccccctaaaattgctgttgtttgtccatgctatgctttttctttaactgctagttttatccttaacataaattatggaaagtattcaatgcaataaatctagtttgtgaaaaggcccatgaaaaatttatttttaaatgcaaaaagtaagccaccagaataaaaattagctacgtttttatctcagagtgatgatagctccaaaactaattagtgaaagaaggggacactgtatatcactgcacacttaaaaatacagagaaaggaaagaaagtttgggaagaataaaactgcttcatacgtgtctattatgttgcaggtatagtattagacaatttgcctatatcgggtcatttaatcctcccaaaaatattctgtgagattacattatccctaacttatagtaggacagactaaaacctaaacccacccagcgactttcacaatgttcatctgctaaagaagtgggaaatttgggatttaaacccagtcctgcttccgtattcaccaaggtgagtatgggaggaaaggactgtggttatcagcttgaggagattttgggctgagacgatggggttttctagatatgcaatcatgtcatctgcaaacaggaaaggattgtgggaaaggattgtggtttagaaatgagaaaggagaactttacttttaaacaatcagtagaatatgatttagcagcctactggaaattatgccatggttaatgaaaagataaaaacattccttattgtttgcatcagttatctcttacagcctaaccatggtaaggtttagtggcgtaaaatgacaatttccttagcctactattctgtgggtcagcaatttggactgggtttagctgggtggctcttctggtcctgattagattctctaatcatgatgcatctgtgatcagcagcagggtagcactacttctgagagttaattggctattgtctgggcagtggagcaataaggcaatggggttactgagccaagtgtatttcatcatctagcagaccaccctgggtttgtctagatgaagatttgccaaaattttgagagagggaggaagcatgcaaggcttcttaagatctagactcagaactggaacattatcactgtagtcatttgtattggccagagcaagtcgcaagtccagcccaaattcaaaggagtagggaaatagctgtcacttctatgacaggagagatgggagaagccacaaagtcacatcataaaaggggaatgaagacgggtaggttttgaaaatcatggctattttcgcaatctaccatgttaggcaaaaaaacttttataatcacacagtgaattaatcacataggaaaacaattctcaatactgctgtttgagatatatacatatgcccatgcatgtgcagatatgtaggtatatacatatatacacatgcacatatataaattatatgtccaaattatgtgtttttatttcaaattttaaaatatactgaagtgaaattatatgtcttcttctgaaagaggtaatgccttcactatatgctttttctttggttcctttgagaatatgcctggcacacaataaactctcaacagagattggatgaccagttatttgcaggcatcatgtaatctttttctccctttcgccccagaggaaaaataagcaatcttttatttttatatcactcatttgccaatgaaaggaatagacttcattgcttttctaaatagcagatactgtatccctccagaatctgaagtaagtagaatattcagttatgctcttgtgtttataccaagaaaacagttagttttctactttcctccagtagaaccaagcttcatttcccccactgattttcttatagaaaagaaagtaagtctgaaaacttgtcaatattaaactttcaaagaaataataaaattaattttttctcaagcagctgaaaaatggttgtaatcccctgaccatcagtcttatgatgatccctttttttcttaagcttgttttgttttgagacgaggtctggctctatcgcccaggctggaatgcagtgacatgatctcggctcactgcaacctctgcctcctgggctcaagccatcctcccacctcaggctcttgagtagatgggactacaggcacatgccaccatgcctggctaatttttgtgttttttgtagagacagcgatttggtcatgttgcccaggctagtcttgaattcttgaactcaagcaatccgcccgcctcggcctcccaaagtgctgggattacaggtgtgagccaccacacctggcttttcttaaattcctaatacagcaattaccttgggatgaagaaataaaacaaaacaaagcaaacaaacaaaaaatttaatacccccttcctatctatgcaaggtagatagatgtgaaccatattagatgattgcctaagcctatgatattttagcagtgcattatggaaattctaattgttatttcttgcctgggatttgaaaagtaaaagatgaaatagtccctgagactgacagttactatgtggtataaacttccatcatgagaagtataatatttattcttcttcccattcactcccaccccaagccatgcagaaacaacatgagaggacgacgtaaatagacttgcaaagatgtctcatcctgttgcctggagttggagggatatatctcatatattttccataccatattgtattttttaagaacaaaaatttggcaaatattctttattttgatctgccaatggcagccccattttatcacatgaatcagatgagagaaggagcccacattagtcagtgtaattaatgccaacaagatagaccaacgctgattagtgacttaaaggaatatatggttatttctttatctgaagcaggttgggtagcccttttgtatggttttccttgaagctcaaggctgcaggctacttccatctttcaagtctgccattttagattcctttattttaatcataaggaaaaaagagagagcatggagagggcgcactcttacctggcatggactgaaagtgagacctcactattgtcaaatcccattggcaagagtgagtcataggacccatctaccatggatgcttgaagctgggggaatgcagaggagcacatgcaaattaggtgggaactaacagcctctctcacacagagaggtatgcagacaagcttgattaacacggactctatcaaaatcaaaacatgatagtgttcctgcctccccaaaattcatctcttattttaaggtcctattaaagtattaattgtgggtatttcatttctttcaggaaataaacatgggatattcattatgtgaaaaaaaagaaactagaatatatcttaaagtatagtcatgtctcatgggcttttcattagaattttgtgacctactgcaggtattattatactcagtaaaataagcaaactcaggaattataaatgactgcatcaaaatatcacttgaaatcatgtgccgatatctttttttcttccatggtatttctaatatacatttccatgtttataatatgccattcatagcagacagtctgtagcaacccaaaggaattgttaatttcctggaaccaaacattggctgcttaaagatattctttgtttacatttttttcatatttgctattgcatgcctgactaagtggctccaataatttaagggttaaagacccattggagcaaatgacaatgcagctgattgattagagaagtcctagatgaaatagatctagctttgatcaaacacacaagatctgtctctcaattgatgacctgcctgtatctagtgtggtggcaatgcttgagagcagggacactgcaagataggtcttaaaggttagacaaggctagtttactgaatccattaaccctatttctaagagctgctaattgctggaactattggccctgtcttacctcccttttccttagcttcctctgaagctcacatgatattattatgtatgcacactgaggaagagatggacagaggggttagagaacgcatgcaaaacagaatgaacagttgtaaaagcaaaaagaaactagaatattaatcatttttagtgtgagcaggaaaagacttagcagaggtaaatattcagggaagagatacttaatccttctcactgctcattctctcccacatcccaggtccttatttgatggaatcaggtcaggagtgatgagatcttttttagaagggaggtcctttttaatttagtcttttacatcagctcttgtgggaggtctcctttaggtcttagatcctgctcactctctctatttctggatagtggggaagaggatattgtgcccttttcttggaaattattagactctggaaggggcaaaattgtagatagagcagagaaagcagagctgactgctgccaatttgtcagagcccatggagacaggaaaggaggcggcagaaatagaggggtgtgctgttgttcaataatacaaaattatgattgtagagttttcttcatgctgattcctttcacagaacatgctgaacttgaataagccttacagcagattcttcctctggtgagaaggaggggttgaaggaaaaaatcatagtcatataaattatattatttatatccatactgatatagttattaaacaccaagccaagtatattaaaattaattcttacagcaaccacatggggaaggtattaataagaccatttatcagctaagaaagcagaagataaataattggcccaaatgtcgtatatcttataaaaaagatctgagattcaaatccattgagctggatgaatctcagaaacatgcaaaacaaagaaagccagacacagaagagaatataccacaagataccatttacatgaaattcaaggacagacaaaaagtaagctgtggtgatagaaaccagatcagcagttaattgggtgaggggtaggaggggattgatttcaaaggggtatgagggaactctttttggatgatggatatgctctatttcttaattgtggtagttcaattatgtttgtcagaacttattgaactgtatgtaaaaatggatgtcttttattgcatgtaagttttaacacaatgaaggctatgatcctgtcaatgttgtatcttcttccctcaaggagaatataagcacggaattgcttgccattgaagaaagagctgtttatgtttcttttgtgtcaataatataaatagtacttctgcatttttctagttaactactgaacatttcattgtatttaattaatagggacagaaaagttatgtctaaatatacaaagtatgcaaagtgaagaatccaggcattccttcgcttcttttttttttcaaattaaaaagaaagcatggtttagagaattaaaatattcaaatgattgctttaatttttgcttttatctgtagacattatatatgtaaagataaggctttgttgaccactgcctaggcgaccccactggcaaatgtgtattataaaattcataccaattcatatcaaagggatagaattagtagatccatccttgggcagacattctgtcctgtaaacacatttcaaaaagtgattttggataaaaatttctttatcatttgttgaaaaattaattttgatcatcttactcctaagaatttcaagtttaaaatattaaaatgtaactaaattcatttggatgaaatagaagggaaagatttattcaaatgtaactattagctaaaagtaaatgttacttgggcaaaagagctgaacagacacttgaccaaagatgacattcagatggccaataagggtaagaaaagttgcttatcatcattagttattagggaaattcaaattaaaccatagtgggataccaccacacacatattagaatggatgcagtagaaaacaaaaattaaaaaatgaaaacaaacaaaaaacggcaaaaagctgaaaatgataagaactggcaaacttgcaaagcaattggtggcaggagtgtgaaatagtatggccatcctgaaaaaccctttggcactttcttataaaactaagcaagtgcatgttttatatcttcttagtatcgtaatagtgctttgcctgtgataggctttccatagatgtattttagaataacgagatgaatgcatgacatttcattctattttacatattttggaatagggacctttgataagtttatttttcctaaaaccccatgaagtcatggaattacacttatagaaattcagcgcagtccagcaatcaattgctgaacatttatcccagaggaatgaaaacttatattttcatagaaatctgtacgtacgtatttataacagcattatttttaatagcttcaaactggaaacaacctagatttccttcaatagatgaatcattaaacaaatgtggcaaatccatactatcgaatacaactgagcgataaagagaaatgcactattgataacacagtaacctggatgaatcttcagggaattatgctgagtgaaaaggccaatctccaaaggtcatatattatatgattccattaatataatattcttgaaatggtaaaattatagaaatggcgaaccatttcagaatagcggttgctaggggtcaggacagaggagcagggaggcagtggaggtggctataaaagggcaacatgagtaatcaacatgagggtgatgggaatgctctgtaacatttgactgtatcaatgtccatatccaggttgtgatactgtactatagatttgtaagatgttaccattaggggacactaggtgaggggtacacaggatctctttatatcatttcttaaaactgcatgtgaatctacatttaattcaaaataaaacatttaattttgataaagtacattaaatcatgttgctctcctgcaaaccatctagtagcttcccataatatactaagaatccaaaactcctcaatgttgcctaataggacttgcaggagctggctcctgacgtcccttcccagctcatttcctactattctccctctggctgactttgctcctaaccacacttggcttcttttggtttctcaaatactccaaaggtgttcccaccttaggatcttggcgctggatgcctccagcctctgaaatatgtttctcccagatcatagtctagtttactccctcccttaatatagttgctctaacgtcacctccttaatctcactcccttaatgttatttgctaaaatatcacttcctgaaaaaggacttccctgaccagtttgtctaaaacagcacacatatttctgtattttctgatgagcaaaaataagtcggaaaagtattcatatctttatgagaacatttgtgtgtaaaatttaatgcacaaaaaaaatcattatatattgtttaatcctaccaggcaggtaagtggataaggcttttatgggggaatactgcattatgagtaagataagagataagtaatacctgatagccattagtgtttttgcagaaaatgtgagtgtgtgacctaagaaaaatgttttgcgtgcaaatttggtagcaacttctttcagttgcaatatagtttctatttatttaagtagtcctactgagaaatgagctgctatgtgcctgtccttatcagaaaacactacatcttgggctctaccaggaaacagaagactatttattagtaccaaagaaaggtactaatgatttcagattgaagtagtacaataagtggtccattaaatgctcttgaatttacgtgctttcattttattgctgttatttcattaactccttgatggacacttgttttggaaaaaatcatcttctcaatgcaaatcctgggactgcttctccttgaggtcattcaaactccgtgttactcattttctatcttcgtggtagcatcatagtgccttgcatgttaaaggtatcccatacatgtattttagaacaaagaaatgaataaacaaaggacatttaatcttattttacatatttaggaatagggatctttgataagcttattttctttgaaactcaatgaagtcatggaatactacacttctacaaatcctttaatgtaggagtcagtgggaaacgtgcatatctactgaggatcatgaaggccaatacactgcactaaaatattgagggacacaaagaacccttttattgcctgcactgcaaattcatctgtttctgcaatagatttctgtgaatagatgatgggctgtactatattttaattccttgcttctggcaggttccaacacacaggggtaagaggatgaaacaatagtagacagctataattatttggttagggattgcatagggtaatattcaatgtccctcaggaaattggcacaacacaatataattggctttattttattgtttgtaatgttcatgtttccccaagtcagctgtgctttatttgattgcactgagaccaaaaatatgtaaagtatttgttgacagagaaggtgaacaagctattactctgtatgagtggatagcttgaagtgttcacatctctagttttgccaagtgtttatattacagatatgttgaaaaccactgggggggacaaggacagtctttctcaaatttgagcataaatgagaatcacttggagtatttgttaaaattcaagattcttaggccttatttccatagattctgattccagaggatcaaagcatgcaaaagatattgaatctctaacaagctcccaaacaatggtggttcacacaccacagtctttgtaacaccacactaggctgaccagttagtagagataggggctgctggtcacacatgtggatgaagttaggtggaaatcagctggaagcctgagctgcggtcagggcaggaaggcctgcatcttccccaggaagaaactgcgacttctctgaagacagatgatgaatgtgaagctaattatatgggagttgactcagaggataatggagatgatttatggaaagttgtgctacaaaactgggtggaaatacgaaaacagcagtgaggtgatgacgtgcgtgggacgtcagaccagagccaaaaatttcttttattgcatctgaacatttgagcgttttgtcctggggagacaaccaattgccattaatgttggaaaacaaaattatctgatgcttttagacagactatgtgaagtgtaaatgaatcatggtgatagttgtggcagactctccaagttgctttcccaatgtcttttcacccctttaccaacagaaccaccatatcatatcaattggaaacaaatgagaattggttttacgcactgatgacactaacaatgggggtaggccttactgagcttggcaatttgcccagttataaaatttgattcctcagcctcctttaaagctgcatagatctgcatgacagagttctagcaagtgagagataaccagagctctactaagcaggcttctgggaatctattgttttcctgacttaaggaaatgaaagggcagacttagctgcattgcaccctttgctatttcctctccctcctttcctggaatgtagttgtaaggcctgggtgtgtaggagccatcctgaaagcattaggacaaaagccaaatgaaaagatggagggagcctgggacttccatactagccccgggctgcctaccccagactcctgttgcctaggaagagtatattaatttgcttaagcagctgcttttgtgtgcctgttatatggagccatacaaaattcctaacagatgaaatggatatgatttgttaagaatttactacatgctagccacttttctaaaagttgtatatatattatatatcattgaattctgacagtggccccgtgagatatatcgttctattttaccaaaagctctaagaagaatcaatagcattttaaaatggacttttaataatgccagggtaaatttctgtgtgtaagtttaaattttatttactttaacctgacttaactcctctcctaagatagtctcttgacacttattttacacataatgtattttatggtgattatattctatgcctcttatatggacttgaaattattaatattcatcctccattgggctcaaaaacaggtgaagtttactaccaaaaacaaagaaacaaacaaaacccagttttgattcttgtaacttgggtgtaaactatggagagaatctgggttgagtagacttgacctcattgtagatgctgtaagtatgatatataacatagcttacccatgcatgtcctgaaattaatattatattctagtggtctggacagtttcattatttttgtattgcaattgcccatgttaaaaatctgtctgtgctgtcatgttccttcctttcctcttcagagaaaagtgattagaacattaagtggagcaaactgacctgaccctcagagataaataaaggaataaattagcttgcaaagaaatggttcacactatctagaatttatttgcagcttaaatatgagggtgggaggttagggtcttgggagacaaattgagaatctagctttaaattagatttaatatcagactgaaattctagtcaattatcctcaaaataactgaaaatttctgtggcactcagtgttccacaaaatcattattaaagcccaaccaatggttttcatgagtcccacagcctagtcccctatatggagatcacagagttttcaaatcctgtcttctgagtccacattaggtatatttgaggcataatcagggtcaaatcagagaatcaccaaaatttaaagacctcatagtatctagtttaaggtaataatttagaaatgaaaataatatagctgagaggtagaagtcacccctccacttaatgttctaatcatttttttttctagtacctaagccaaaaatagagttaggggctcctacgtcttaatttctagtcactcatggtctcccatgaaagattcctgccataatcagtttggctgctacaacaaaataccatagactgggtggcttacgcaacagacatttattgctcacagttctaggggcttggaagtccaagatcaaggtgccagctgattcagttcctggaaaggactctcttcctggcttacagttggagatggccatcttcttgctgcatacagaggaagagggagagagctatctcatgtctcttcttataagggcactaatcccatcatgagggctccacccccacaacctaattacctcctgaaggcctccaaatactattacattgagagtcagggctcaaaatatgaattttggggggacaaaatttagccatagcaatttccctagtatttttttcatattctaagtctcactagatgggtataattacaagcaatgagtaactttcaaatgtgtcctgtgtttttgctaaaaccaaatccctatcccaaatgtggtcacatatggtatcatttcccatcaagaaaaatgtagaaaatacccctgttgagatgcaacctcatgttcaaagagcctgctgcccaggtcacaccagaccacacccagagactaatacaacgtggaaaagagtgagcccagagggatgggctaagcttacatccaacccacttcccaacaacctccgtcagcctcaaattcaaggtaacactaacagtgatggtgtaaatcccagttccaaggtcagccagtggctccttagaggcagtagacagaaggcagtagtttaggtgtgcactagtgcagctgagatcacatgccggctccactagtaactcgtttttaaatttgttttgagaaagtcacttattgtctctgtgctttggattttttcatctgtaaaacagatctaacaatattaactccatagagttaaaaggatcaaatgaatgactcatgtaagtgtgatcccagcttgatactagcactgagtctgttagaatcctaaatgcaggcaagaccaaggctcaagacaaccaagaactcatcatccagttcccatcaaagatgaactcttcacatatcttttccttaaccaatgctttttccatggatggatttggtgacttctgaatagtttaatcttgtttcgctctcattcccgtttgttttgaagatctggagagtaggcaatactcagccattttcaccatctgcatgaatattttcttattgatgcacgtgtctataaatcattctgtgtgcctttctccatattctgagaattgcctgtatttgagggtggaggtcattgagtctttggggaatctgatagtagcagttcttattctctctcccaccaacactactaccacatacatatctgaacaattgacatacgatcttagaggcccagcacttcctgatgccttcatggaccctctggaaaagtctgtagtgataaagtcttctattctatgcctacatacgcttcttaaaataaagacggtctccaaaggatagtttttttttttaatttaagctttggctcatatataatttaagaaaaaaatttgtgaaagaacataagtgatttgtgctcaacatctaaagaaaagacacatttctcttcaactatcttttcctttttggtgattttggacttcctgggctatgctgaatgtgataatattctaagctagccaaatctctcttaaggacctgccaattttcaaagcaaagttatgtaattatgtatttccaacagaagaaaaagttaaggtgcatatgaaaacatgctgaaaagtgtggaaatgttatcaaagacaaattatacatttatcacttcaaaatccagacagtatagaactgcagtgcttatttgtttagactgtccgcccgaagtgtaactgttaaagtacattaagcagaggccttatgtctgctttggatgacagctgggacatttttatttcatagactgcataacagaacctggccaacttcaaggtcaaagtcagaaatcatgatctcatttccactattgactcagacttgcccttatttatgacttacagagctcactccatgtgccatatctagtcagtatgcaatgagatctgtgaaatcaaactcatgtcaaacccctggccatcatatgtttttcaggtaggcagttggagtaggggataactggattcttgtttctatttgggcaagtcacaacttctgtgggccccagtttatttttctgtaaagtggccagattgaattacttacctctcaggtcccaggtgatgctcttcctgatcttcctaatgatttatcatcatggctgatgattgattgcctgttgtttcttttcccaaagataataataattgtcaaaagcctgagatgtatcaataccaggcactgatcaaagcacgctatgtttttaaaaaaattctcacaacaaccttatgtcataggtgctctcattctccccccactttgaaatatgaaaaaaacctgcagatcaggaaagttcaataatgtgctcaaggtcatacagttggcaagaggcacagtgaggcttcaaaacgaaggctgtctcgttccagagccagcacaaataatgactctactgttgaagcaaagcaataattgtttctagttaggattcttacatcaacttgcgtattttccagtgtattttcttggatttgagacatttaaccaaaatttacacactttggactggaaccataaaaaaaaattgtgcccctaaaaatcacctgatataattaattcccctgtcaagcatatctgcttttaactaagtccttcccatgtctccatatcagctttctgttacagatacattgattgctggctgcatagggtttcaaaacaaaatataatttgaactggaaagtttcggttgttatttatgtgaccaaactttgaggttgcacttttcattcagcttttaggtgtgctgatagccaagatctttgcaagttcattttttataagaaataggctactagcaaaatacaagtttatttagaaatactgagaatatactgcttccaccaggagaaaggctaagatactaaactgaattaaaatacacgtaaacaatgacatgatacataagaaaagttctagaaaaaaaactttaattttaaataagaattacttatataccaatcaggtactcttcattcatcttttcagcttggcatattataaactaggggccatcatcccagaattttatagtaaatatacttttaagatgtctcactatagagctttcaagaggggttactaacgaaaacaaaacatactaaaagtagactgtttcaatgttttctggataatgggataaagtaaaaacagcatttggatgaggggtcaggagtatgatgtctctctttggaaggacccaagaactgcagaaacggcacactaagcaaggggcacaggtgatcccctggggttagacaaacacgggaaccactgccctgctccacagcactctctcctttagactctaagctcttcagcggggtcatggacctctaatgcagtggaatacacaacagtttagtcaacttcatacctgcactgttaacttgccaaactatttccttgaggctcacttatctcacctgtaaaatgaggagatgggactggatggttctcgaaggtcatatctatgtccagcattcccatcttcagtctaaaattatgtgaggaattaaactctgaaaggtgtctttgtcgtgtatcattctaattcatgcctcttattgaaggacttctggttggttggttgttttttccagctgtattgagatataattgacaaataaaagttgtatatattcaaggtatacatgataatgtgatatacataagccttatgaaatgattattcagcaataaaaaggaagaaaattctgccatttgtgacaacctagataacctttgtttttaccattagctctcttttaagtcagtgggtactctgagaaaacataacctacttagtttcgaataatgctctgtgggtcttctatcctgcatcagccacatttatatgctaggagaagaataaactatatataatggttgtcatttgttaaagtctaccccatttcagttattcagttgttcttgtctttacttttctctctaaggatattccaaaaatatatgttagtatttaattctggtaaacagatcagattcttggagttgggttttgttggggtgaggggaattggcagggcagagaggattactaaaataaaatacacactttcaaaagtgtttattgtgttctaggcattaggcaaggtgctctgcatgaagaaacctatttagtgagtagactagccttggaaaaacccacaacccttaaaacatgttctatgggttccctctgtcctgcccctgcatcattcagcaccacagattctttgagtaatttcagatattacagtaatttcactttaaggtattaaaaagtccaacctgatccaaaacaaaattttcatcagagacccaattcaaagtttcttccccatcaagcctggtccaatttggaaactgtagggggaaagtggggagcggtttctttcttcttctcaacgaactagttatacacacacacacacacacacacacacacacacacacacacatacaattttcaatcctcatttatgacaatctcttaaagtaggcttgactgttcccattttatagaaactacaactaaaaagacatcatacattttatagggtttgacccaaggattttaaagcagattgtttccactgccctcttttacctctcaaaatgtcagttacccacatggttgacgtgtgtggtgtgaatgtggtggttggatttgcttctcttaaattacgtttcccaatgaaaaaggatcaaatagtttagttatgttgaaatactttttgtgtatctgcatgtgtttgatgaggcacaaggctgtttcaccctgaacatgcctctcataactcagaggtatccaggattgatgcagaggatggctgtgactcctgcggtaaaatgtagatactttgtccagcaccagcacatgcacataagaaacatagagaaatatatgtcatatatagaaatcattttgtagatgacataaatcaatcaataattgttaaagtacatttagtggattaggaagcagcacaatgatagtacaggcaagttgcagaatagataagagtaagtttgggaggatacaaggtgttggcatttttcagaataaaatccgactcataaatatttgaaggactctagaaagggaatatagaaatggtatattgagatcagaattgaaagtgaggtaatttcatgtgtgtgatgtttattatttagtgagagcaatgagtatttgaatgttctatgtgaatcatccctgtgagtattacacaaagatttagacttcgaggcatcatttctctcactcttcaggaactagatttagagcttgagtcattgctttatatttttgaagtatatattaatatgttttttagtaaatccagtgattcctgggtttttaattgaaagctaagtattatggtgggatataaaccaaccaatttctaatggatgccacttggaaagtttttctttctcctacagaagagaaagcagtgggaaatggcatataatgccaagaaatcatgtttcctgcttaatccatgtgaaaagtatatggatgactgtcaaaaagatctgttcaactacaaatggagtacagatgaccatgtggtcaatacaatacaataatgcaatatttaatactgtaatacagtttccaatagtatgaagttgaaataggtgttgagatgctttaaattgaataatacagtgtattttaagtgcatagaggtctttcttacaaagaaagtgcacggaaaactttagaaggtaaagacacaaagtataagatgtatcttgtgttggtctttagaaatttgaattctctttcaagctaggacaagtcttgagatgaaacatacataaaaaaaaaaaaggtctttataaacctgaagtctaactcaatcctgagtcacatgatagacaaccaaaagcaccatgactttatgcacctccatttgtttccctgaagctcagaggatccctctgaatgcattcctcagacctcgtggtgaatccagcaccttgaggatcatattgaagtttttaaactgagcctaaaaactccattactacagcttaggcttttcttttcctaagtacttttctcatgctccccgcaggcaagatttgctgcaagcacaaacctgtctcaggctcaatatctacctttctgaaaaacattttttatgaaaatggctttgtgtccatctcgtatcctgttattttcagctcattgagacatggcattgaatatatctcttacatggcgttgcatatatctctaaaaagagaaacattttttctccacacctaattttcttcacctctatcaattcttccttggctatacctttacttaactcctatgtctgcaaggcttttgaagttcctttgcaaagatccattttaaactttctgtatattgtaatttaagttttctgtttctttctcccatctgctagtcaaattttcttctcagcagaaaacctcaccattgcttcatttccacacatggaaggcattcaagcatagcaactgggagtcacagttgtactgaaatgagaaggaaatgtgcttcccaacacagcgtcagcatctccaaccagaggccatttgtcttttttttttttttttttttttggcttttcagcaaatgactgctaaaggaaagtctctcaaaacccaaatcagtagcactccaacccttgttgcacaaagcattacattggatcatggaagggttaagatttctattaaaaatgtttctcatggtgaatctgagatgaatgtatcttctaagcttgctatgattcttccccagccttctcatttcctactcattgactcctctgttggcgtcagctttcccctctggtctcctgggtgggttcctttccattctgctcaagtctagctctttcagcaggccccagctggcccaccaaattccttgtgcagccttaccctgtggcactgtggaagggcagggctttcctggcacagcttggctctttgctgccccaggaagcttcctcccatcagccttttgcccttagactcatttcgaagaaaaagtccctgtatttccccaaatcccagaggacataagtcacgctttctgaggggttctctgaagcctcccttattcaaactctgtcaaggaccaaggaaattctgtaacattcagacaaccttctctctaaactctaaagaacctatagctgggtcgagcggcgtggctcacacctgtaatcccagaactttgggaggccgagggagtggatcacttgaggtcaggagttcgagaccagcctggccaacttggtgaaaccctgtctctactaaaaatgcaaaaattagccaggtgtggtggcaggcgcttgtaatcccagctatttgggaggctgaggcaggagaatcgcttgaacctgggaggcagaggttgcagtgagcccagatcatgccattgtgctccaatgtgggcaacagagcaagactctgttgccaaaaaaaataataaaaaagaacctattgccaccccaaattctcaacacatgctagactggactggcaagggttgagaattcagactggaggtgcggggtggtaggggaggtgggttggtcttggcagagttcagttttgatcacccccttagcatgtcctgcattgatgacctggcagcttcattagcatgtgaggatatttgacacctgttttcctcagctttgggacctcagctgaaatttcaaaacaggaagtttcattttgtttgttttgttttacattgttttgttttgttttcctttgtcatgcagactttttttaaaaaaagttttaggtactcaaaattatcaatgtattttctggcttctagattttatgtttgcttagaatggcctttcccactctattttagtttactggggttattgttaaaaagtaccatgaactgggtgacttaaacaacagaaatttattgcctcactcttctagaggccagaatctgaaattatggggttatcaggggcgtgctccctcttaagcctctagggaaggatctcttccaggcctgcctcctcgcttctgttattctgtggcttgaggcagcataactccagtcttcacgtggtgttctcccaatgtgcatgtctgtgtctaaatttcctttttttataaagacactagtcatattggattaaggacccatcctacttagatataacatcattctaacttaacaaattatattcataacgacctcacttcaaaatagggttatattctgaggcactggcaactaggatttgagcatataaatttcggggagtgggcacaagacaatctatacacactctactaaacacactgtcctggctttcttataagtcttttggatagctagctaactagatagataatttttgttgttttagtttgtttattttcctcatctgaagttcacctgaaatttacttggtctaaggaataagacagggggaagaatgcacatggatattttactgaatagttagtgctaattatagtgttttatccattatattattctctccagagcctagcaaaatgattgatacccaataaataaatataaaaatattgacaccaatgctcaataaatttctttaagattgaatcacatcacttaccaggtaactgaattgttaagtttataactagaagatagcttgtttatttgaactgatagcggctatctagaaatttgatcacaggtagtgaagatatcctagagaattgacaaagcctatagctgcagtgatctgaaaggatattgggttaaaaaaatactaacattttctgtttattgaaggaaatgaatacagttcctgtgacatatcttttgtaccagcacagaggacagggtaatgacctagaatcaaagaatgatttataaaacagagctcttcttttactggcaggtagtagctagattattttgtgtgtgtgtgtgtgtgtgtgtgcatgcgtgtgtgtgtgtgttcaaggtacatatgttggggaagtgggcaaggaaaataatcctaggaacagccatggaagctcatgaaaatatttagaagcaacattttagagcaataatagtaaatgattgtttggggtctattccaaattttaagttttagggaacaatctccttctttatgatgctaaattcctaagtatttttcatataagacaaaaaagatataaaaaatattgaaaactaagttttggtggctaggaatgaaacttatgtaggtccatgttcggtatttgataacacatagatatgtacttggatattatgctacaaatagctgaaatttttacatttaatttatatttatgttcagagtgattacagatagtaatttgtattttgatgggaacacatggagtctgcctgaccattggttagtgtcaagtgaagctatttcatgggacaagatggcaagataagtcactgacatcaggaaagtcattagaaaaaaatatatcaagagtttatctctcagcaaaacactatatattgtttatattttaacatagtcttccctgcatgtttcagagaaaagtattaatatgctagcttttagaaacaaacagtttttgaattactaataaatattttttccaactctgcctaagacatttattttaaactgaataaaaatttaaattcacccattctctattttctctacattttaacaataacccaactgcaagtcactccaattcccatataattgtaacttctttttgaaaagcttagaattatatgaatcatgctaagctcttttattattgactaaaagggcatattctaatcttttactatctttgctggatgtagggtataaatagaaaaaccctatttcaccagggaaaggctattacgtgtccaaaaagactttttgtttttccagcttagggaacattcacattttagatgctggctaatatatgtttcctgagctgatggactgtaagctggttgtatttggcccctgtcatcttcttccaccccaatgatgcaagccagaacagagacacagtgtcaagtcctatgaacaagaacacgatgtggtagtgtaaagcaaagagacagtgtggagtggaggaaaggaggaaacagtgaggaaaattttgaaggagaagcagcagggtgggggtatcaggaaggagagagattgagggttctgtgaatgtcatggtccaggacttgggacttggctcatttttttttggtagttctcagtagattccttgatctctatgagactcattgcacaatttgaactacatcttctctagagcccctttcatctctaggatgctaggcttctcttaagcttaattgtgaatactctgaaaggagaatctttgctttcactgaagacataatatttggagcgcttcaatctcaatttttttgaggtagacaattctgttatagtacaagcctgtgtctttatctagaacatggtaattctgtagatcaagggccttcaccttatggtttttccacatggaatgatacatttcagttctttatagtctcatagcatgctgtttatctgaccaaaggcagttttgttgttgttgttgtttaacatattttctgtagctttctccctgaaaatgatgtcttcatatatctttgctgtatttgaatgcttttaacctcaaattaagctagttaatacggttatttgattcaaaaatctgaatcagaatcagagaatccaaatgtgaattattcagcaaaatcatgcaggcttttctttgcacggtaaaataagcagaggcaatattttcttcagaatcagtgagcagtacacatatcctttaggcaatgtactgtttgattttcagtgcggaaatgtgtgctatgctctttcttttagaggttcagtttgtcagcagatttttgtgtcattctaatttttgcttgtttctttgggaatctaaaatttctccatctgtatattttaaatgattgggggccaaaatttataaactgaaataaacagggaaattaaccttgttaatgaatggtagtaagggaaatgtggcactaatttacaacaaataaaagaatcaaagaaagggaaggagttcatttttgagtgaggattcagaagtttcccttttaaaaaaaatgagataacccataaacaataccaacactttagctacttgttaattaggccattgaactttcctttgagatcctagaatctgaaaaaataattagctttgcaaggccattagtgaaggagaaaaacttatattgcctagaaaccagatcaagaatgatacagaaagctacacttcttgcatgtggcattattgaagtgaattgtaagaataaaatgacctggacacttgtatgttatatgaaacaaaaacaaaaaattgctcagcaacttattaggaaaaacatttagttatcctctgtattcattccctactagtataacaaatcaccacaaacttatggcataaaatacacaaatatattatcttatagttctgaagttagaagtccaaaatcagtcccactggaccaaagtcagggtgttggcagggcttctttccggctggaggatctagaagtggacaggtttccttgtgtttacccagcttgtagagattttctgcattcctaagctcatggccacttccttcctccatcagcacatctctttctcttctgaccttccggtatccttcttataaggatttgtgattactgtgggcccattcagataatccaagatactctcctcatctcaagacccttaatcacatcttctaaagacctcttgccctgtaagttaacacattcacagattcaggggatttggatttggacttcactaaagggctattattcagcccaccacatcccccttgcttcactcagctgtttaaacagcaagtacataaatcttaatggaataagggctaatttttaaatttatttaataaaattttttttaatttttgtgggaaaatgggtccatcaatagagaactgattatgttcatgaagaaaatatatgctgtttatgcaaatattgtttatatcaaggcttgtttctaatccttaaaacagattaaaagtatcagaaaagacatgaccaaagaaggaaatagtgaggcactgcttcccatgtttattttatttcattaaaaaatttaatcgacaaataaaagctgcatctattcaaggtgcaaaacatgataaatcaaggacttccacaatcattacagatgaatattgggatattgccaatgtgaagatctgccttatccttgaaaagaaggaaatgaaactggtactaaactagaatgtcattttggaaaattggacaggcaattacgccagaggaaaatttgtattgtgatgaagtactttttgttcccatgagagaaattaacatttaaatggctactattaagcaatctcacaaaaattaagatgaagtgtcatagaacacctgagtgaatactttttacttttgctgttctgttacctgcaggaataagtttatagttgtaagaacaaatctttagtatgaactgccttgagccacagtgaagagagaggaatcatttgtatttgggaatagtggctggagttgaggatacatacaagaaaaagctagagatggaacctgaagccatagcatgggacctataaatactagactagaaaagaattcttagttgaataggaaatggtagggtggtgactggggattttaagcaagattgggatattttaggaagattcatctgaccattcttttagaggcaggttgattaggaaaataagttaatgaaaaagtgagcaaattgtagctgagataatgctggaagaagggaaggaacagatttgaggctgtgcaaaggaaacacctttgtgatttatcagctgatttgctgtgggtcgaaggggtgaatcaaagaggaaaacaaggtttccaaagttcaagcttttgtaactgatgttggcattatcaagaagtgatatgtcatgaggagaaacatttgtatggttgaggtgaggcacgtgaagtttcagtttggaagtattgagtgtggggtgactacagacatgacaatggtgatgtcaagtgagctagacagaaagctcaggaagacaggtcaaggctagaaagaaaatatgagtcaactaacttagaggttatatgcttatgtgactgaacatgagagtggcagtaaggtcgactcttattcattttatcgtcaaatagcttttttgtacgtaggtcattttgccactgccactatgttaaaatagaatgaaaaagacattcttgaggcattattacttaaagacagtttttggctgggcgtggtggctcacacctgtaatctcagcactttgggaggctgaggcaggtggatcatggggtcaggagatcgagaccaccctggctaacatggtgaaaccctgtctctattaaaaatacaaaaaattagccgggcgtggtggcgggcgcctatagtcccagctactggggaggctgaggcgggagaatggcgtgaacccgggaggtggagcttgcagtgagccgggatcgtgccactgcactccagcctgggcaacagagtgagactccgtctcaaaaagaaaaaagaaaaaaaaaaaaaaagacagtttttaagatgatttcagaaatactgtatggtatataactattatgagggaagtgtaagagaaggaatttaaatgactgagagcatctgaaattattccaggatcacccttccatgaatccatatattttctcaagatttggggatttactcaacatgttcctgacagtttgcaagtttgcaaaattataacacaaaagactgtattatcaactagtactttccttagctctatagtgttctgtacatcattaaacatgcaacaaacgatgtttccttgcctgaagtgtatattttttctctttgcttttactgaattatcttttttgtaccttcagcctactttgagaaatgaggatttactggaggaatttctctctgttctcagggctaggaatatgtgattctcatgaacatggtttattattttatgacccaaatattgaatattatatagctttacaccatgtatatctctttgcattagctacagaaaagcctagagacaaatttatgcccacttttataagttttaaagcttgaaaatatgtgatttagataataatttaaatttgaattcctggcttcattcttcttatatacttttcctcctggtctgcaattcttttttgttatttttctgtttaaaaataaagttatctttttcatatactttgtaaaccacttagaattgtacatggaaccagttatgtacacgtctgcattttggttatatctgcatacaggcacatgaacactgggaatacaggaatgatgtattggtttcctattgcggctataaccgggtaccacaagcttaatggcttaaaaaaacacaaatgtatagttgttcccccttatccatggttgcactttctatagtttcagttacctgtggtccaccatggttaaaaaagtgtaaatggaaaattccagaaataaacaattcatacatttaaaattgcatcccattctgagtagtgtgatggaatctcacactgttccactccatcctgtctaggacatgagtcatccctttgtccatactatccacactgcatacactaccctcctgttagtaatatagtggctactgtggttatcagatcaactgtcccaatatcgcagtgcttgcatttgagtaactcttacttaacttaataatctaatggtaccaaagcacaagagtattgatgctgacatatttttataattgttctattttattattattgttcatctcttactacgctcaacttataaattaaaatttatcatcaatatgtacaggaaaaatatagtacagccagccctccatatttgtgcattccacatccatgactccaaccaaccatgaactgaaaatatccagaaaaacatgcatctgcactgaacatgtacagactttttaccgttatcattattctctaaacaataccgtataacaactatttacatagcatttacattgtattaggtattataagtaatctagagataatttaaagtatccaggaggatctgcgtaagttatatgcgaatactatgccattttataccagggacttgagcctgtacagatttcagtgtctgtacatcattaaacatgcaactctgtttcttcaggttttggaatcaacttaattttggaacaggacctgggattgacagaagcagtctttatcacttcttttgaggcagcctagagatccacaggcctcagttggaatgccaacttaggttatggggtgccacagttagtaggctatcaggccaagtaagtgagcagctctaggaagtgtatagtgtctttttttctggctgtggcttagctgaacattcttacctgacccccatatccacactggttcataggaaaaaggtaaaggatcttcttaatggaggccattttcaggcctgtttgaatttagcagctcatataggaggggagtattaattaatgaaagggcaatgtctgcaggaatagcactgccaaataaaaccgttatctggctttctgggggatcagaagtcatcatagcaagatatcattgttcaaattggtgaccaggagttgcaatcctacttttgcccttggctggctgcatgcattagggaagattttaccgccatgtgggctcctgggtcaaaaaagacagtgatgctatccacttgttttagaggcccagttctgcccactgggaaacatttgttacagattatcacaatgtgttactggtaatatattactgaatatattgcaatatgttactgataatatgttactgaagatattggtgtggcagtttttacttaaaaagagaaatccttaagcttatgtttaataagaaaatgtgatagaatctttattgaccctaactttcatgagacacatacagatacatgctaatccctcatagataccaaaggatgactgtctatatagggttttgtactatccatggtttcaggcatccactggggagtcttggaacatatttccctcagataagggacaactactgtattatcttatgttcttggggttagatgtctaaaatgaatctattaggctgcattcgttctggaggttccaggaagaatctcctgtcttgtgctttccagtgtccagaaactgcctgcatcctttggttcatggcctcttcctccatcttcaaacccagaatcttctctctttaactttctgtcgcccacttaaaaagacttatgtgattacattgagcccactcagaaaatccagaataactctccatctcaagatccttaactaaattatatctgcaaatttccttctcccaaataagaccacatattcataggttccaggaaataggatgtatacatccttggggtatttttcagcctgcaacagataataacttcttctctgagagaactggctcaagctgacattagttaagctaatacagttgatcattcattcatttagttggcatacttaccagactgttattgagtatctactatgagctaggcattcttctaggagctcagaaaatgggaataccatagtgaatacattcactaagttccgtgttctctaagggcttagattctatgtataaataaaatcccaggcacatggaaaaaacgtagatatagaaagtgttcacctttcagagatggacgcatagttcaatatggcagtagcatagaatacaaagaaatgaagttattgtgagctatgctagaaaggttatacttaatctgcaggaaataattttaaaagaaaagcaggtgacatgattagatatgtaatttatgaagatgcctgtgggtgaaatgtgaattagagggaaacaagactggaattagaaagaccaattaggagatgctgctttaatccaggtgataagtgatgacagtctgaattaggttaatagcactggatgctattggaggcaggaagtaccataattcaaggcagcacaaagaagttgaaaaatatcatcatgacatttgtagagtgacctatggagacaaagttgataggaaagagtgaaagacaaaagggatcaaagacaaatacccaaacaacacatagattggctcagcatttagatacactagtatcctttctagtcactactgtattatttcgtattcttcagtttatgaagctttagacttaggccattgaaaatttatgagctaagtccctgaatagacttgctaaagttttatttggtttattatctcactttattccagatttccttctctaggaatagattagcaatagttacttctaaatgtctcccattttaggtataattaataaaaatattaacaactggttttgctatgactgattatggcttgtgagtcctgttgctgtctgtactgccctttgttctatagctgtctctaattctgattctctttctatgtgtctctctctcacacacaaacacacacacatacacacacacacatacacacacacacacacacgcatgcagttaattcttagagccagctctcttaatcaaatggaagtaaaagggaggacagactcttatcaataactttaattttgaaataaatttataggtaacagggtatcctcttggcccatccagttgtccagcccattgaccactaacacagtcccttggaggagggtagaagcctttgcctatttaacaacatctctccagcaacgttaccaactttgatacaagcccagttaccctccaaatagagttgaaaaaaagaaaaactttccattttaaaacctcaaagtcatttcactcggtgacctagagctcaaggactttttcctttgctaagaactccaaccacccagctccccagtgaataatgaagacaatgtaatcatctttgtttcttttagtggttaattgggagcaggatcattttatccatcttcgtgagttgaagcccttctagaaatgattgtggtttgttttgcccacccacaagataccaaaataacctgctatcttcgcaaaatgtgcatctattccccaaatcatattttatgccaagttttaaaagagagggaaccatgccagaattcattttaaaccaagttttatttgctatttctagtgctagtgcatggtagacagctggaggatagttccatttaagttgatttcttccttgacactgtttcttttcagatatgaattagatagaatagggctaaaaatgaaggtaactaattgtggactaaaaacaacaacaacagaagtaattgcaagtaaagaaaacccagtaaacgtttcagtaataatttgcttggtgggggagtggacatttttttgcttgtgcttaggaactattaattatatgaatgttagcaaatcacacctaataaattttggcctatatgaatgtggcatcaattgagatacaaggcaaaaaataagaagacccaatccacctagagaggaggtagcttaatattggcataaattgcatttaatataatgagcctaatctaaacattagtgcagttcatcctacatgtaagatgcactcaagatatactaaagaaataatatgactcagcatttagatacactagtatcctttctagtcactactgtattattttgtattcttcagtttatgaaaccttggacttagaccatcaaaaatttgtgagctgagtccctgaatgtacttgctaaaattttatttggtttattcaacatttccttctctatcaacctccattaaccatcttagacactagatgaatatgatatttccaacatatgaactattttaattaattctggtaaatgctttagagaggccaaaatgtttgtttctatataataccaaaaatcattttacttggtgccaagaggtatggatgtttaataacctgtttattgttctaatggtttctccagagcacccataaagaaggaatctcgtaaagatgttgttgactgttgacttttccccactcacttcttttccatcttctacataggagatgctcctcatagctcaagcctggctggctgaaggtttttgacccaagagcatgttgtttatggcagccatgtgtaccatggcataaccttacctctccctgtcttactgtttaatataagtagtagcatttccaggacccagaataggtcaaagacaactctaaattgcatacttaaatttttgacaatgagttgacctccatcagatctgtagacaatcttctcttctgattctattcagggcatagtctatcccactttttgaaagccaactgttttatgccactaaattatgaagcctttacataaagtaacaatctgctcaaaaggtttagctcctcaactctcctaagaacatgtcaattctactgtcttctcaggccataggttctacagaaagaccaggaaagatttgtgttctttatcactttgcaatccattttaattactttgtgtgacttattgatatttctttggcctttgaatctgtgaataggagttgattacagattaaactccataaagatattgcgtatcttagattattaatactgacaccttaatactacttagaaaatcagtagaaatggtctcttgatggatccaatcgtgatttctgtgaagtcaaacatgtatttgatttgtttttgccttttttgtaatttttaccttaataatttgttaacacttggtagtgagttggatatacatcctccataatagggactagaaatagctgacatttgttgaccttttactctgtgccaggtattaggctaagcatctccaagtttattctcatttaatccccacagaagctctatgaagttgatgccatttttatttccatttttccaaatagaaagctgaagcctagagagatagaagtaacttttcacaggtagcatggctactatgagacgagaccagaattcgagtcagaaaatctgactccagaacctgaactcttaattattactatatactacctcttatgcgaagataatattgttttcttaatttagatttggtatggacaacttatcctgctccctggtgccaacacaatatttcacaacagacaataaaactaaaggtaattttcacaatgaattcctaacttttaactggcttaagtatgagatcctacagcaatttaaatatttcagttatgtagatgtctattttgtaaccagataatttagagggcatcccatgaagtaattctgctcaagataattttatttttatttttattttatttactgtagatgttttgttgaagaaaaaaaagtgtatggcccaggttaatttctggttgtgaccgttccaaaatttggattgtgggggtggttaaaatcagtgttgccatgcctgatggtgaagacaatgaggcttgactatccatttgtctagtgggagagcagatccaaaattatttcttaaagagaatcatggcctttcctccttccattcattcccttgacacaagttaagtggggtggaaatgtcctctgttcaggccgttattcctgacagcctcctcaacttctcctcaaagccctgagaggatgcaactcttctccttgttcagatgactattaaagtacactgcttagtgttaagtggtataatagacaaactgtactccagatcaaattcttgtctaatattctgtcactcaatatttagcaaaagcccaatgtgtgaagcaatacttaggggagatatctcgaagtttatatggctcactaattcctctaaactactttacaatttatacctagagttatgcatactggcatccatccaaactgcctcctcctataagaattactttttaaaatgtatacccttctctagaggcagaaataaggttattgagaagcaacaggaaaagctatatagacctgaatgacccagttcttggcattagaaataggtacttctagttaagaattctatagccatttgagatggtcttaatgttttctaattttaaaatattatttttaaaactgaaacaatggtaactgaattcattcctgtttcagttatttattagtgtgtaacaaactataccaaaactaagttttaggcttaaaatattttattacttctcatggtttcctatgtaaaaaaactggacaggacatggtgtggagaattcatctctctccacatgatgtctgctggagtgaaatgtgcaaaatggcttctgtactcacatgtctgatatctcaactggggtggcttagacagctagtgttggctgcaataacctaactggggttgtatgtttggggccacagatttctgtcagctggattctttaattttcctccatgcagtctctaggtctttctgtctctctgtatcttttcacatagtctctccaacagggcaatccagcttcttacgcagcagcttaggcctctggaaagtaaaaaacttgaaactgtcaggtctactttctgcttaggctgagaaatggcacaaggttctttgctgcctttgtagttaaagaaaaaaaaagcagactatagaaaggcatgaaagatgaaagcaggatgtatagttaggtggagatcattaatatttcttattactatagttctattagtttataatatggtgatataactaataagatttgtaataactaataaatccagttaccacatttaaaaagtatagcaattgatcataagataagaggctatcattgatgatagcttacagaagattttcatgtttcgtgataagttgctcttaagccacttttgtatgtgcttattactaagaactgtatatttaagtcaccaaaaacacatacattatgatagttcacacaatttccagtaaaaaaaaaaaatggataaattgctttatttctttcaagccactagttcatttttagaatgaggtccacagtgcacctacatcagaatttcccatagggctactaaaagtacagattcccacacccactcttgtcttactgaatctagtctttaggctgtgggggaatgtataatgaagtttcttctgcatttgttcataagtgggctgagttttctttctccaaatggagaagagattaacaaccggagagtgttggagacgtatagatggggtgtcttctggataaatattggtttaattaacaggaaatgaaaagccaaggaaagaagcaagaaagggaagaagagatgtttctttcttagcattgacacagacgtaaggagaaaccagccaaaacacttttacaatctttaaatccactaattaaaagatctgtgtggaaggagaaaatgtgggtaattaccaggcataatagactctctgagagacactgactgggactgagacggaacagtcttggtacaaaatgtcttttcagggaatatacataataatgtcatattactgaaagcttctggtactgtgcctgtacctagaacccagacatgcaatgaatacaagtgggtgtttgatctcaaaatgtatatttttttgcataatgcacttttggactagagtttatctattttctgctcacctgtgatgtcactgaaaaaacacaccagataaatcacatttataccatgattcgattagtgtgtggaactggtcttcttgttctttaatcataagtgaatcttccattcttcccttcacaaaatgtgattgtgttctgaagattcatggacccaagcatattttagaccaggggatcacagtctagacttcagctaaagcaataaagtgacgctttttcttcaaggtcagaacacccaaggatgagtaagcctgctgtacaatggttcttttctgatacatctggcatgaaaatagctccaaatggttggacacttaaaatctgaaagtatgtatagtcacagcaatgaaagaataaggttgtatatgcaatttaaatagatcttaaaatatagccacgtccatttttatctcagtgttttataaactcaaagtttagctaatggaatattcactgtttgttcaaacgtttcgataatgcatttgtttaaaaaacacaatgaattagtatactattagccagaaatgcaaatacatatttgctaggaagaaaataatgttcagaaaaaaaaagaatagactgacctcatatttataattgaataggaaggataggtaatgatatcttttgccagtagctgggattttattttgatgttaagcataaagtttagcctactaccaccaagataacattaaatttaagtgggaaaaacattatgacagttagaacgttacatattctcttgagttttggcccatatgcatcatttttactgtaaacattgaggtgataatagcacttcattcaaatagaagtaagcatcaatatccaccacccccacccccagatagttccctatccatgccctgtgtttgaggattcttcttgggccaacttttctggcattgcttttccatttctattcctttttcaattactgtctccaaaataaagtatttagacaatggttgtaagtccttggcacctataattttataatcctttagagattcaaaatataatttcttggctgggcacggtggctcacacctgtaatcccagcactttgggaggccgaggtgggtggatcacctgaggttgggagtttgagaccagcctgaccaacatggagaaaccccttctctactaaaaatacaaaattagccaggagtgttggtgcatgcctgtaatcccagctactcaggaggctgaggcaggagaatcgcttgaacccaggaggcagaggttgcagtgagcctagatcgtgctattgcactccagcctgggcaacaagagtgaaactccgtctcaaaatatgtatataaatataaaaatatatataaattatatttgtataattatataaattatataaatataattaagataagtttataattatataaatttaattatataaatatagttaagataaagttataattatataaatttaattatataaatataattaagataaagttataattatataaatttaattatataaataaaattaagaaattatatatatatgtgtatatatatatatatatatatatataaaatttcttaaaaccttgcaattcacctggactgggaatttgaattataatataacctgggaataaacatttttggtttcaaactatgagaggtaggtcataatatatcttgtttaatacaaaccatcaggtttccttctttttacccaaatgtaacaaaacactgcaatattttgtttactgttctttgattaaaatagatattaattcagccaagaggtagagctgagaaattgaaaagtgactccaagtgacttctattcagcaaaagctaccatagatggtccaacataaatcgccccacacattcctctattaaactctaagcccttgagtacagtaccttttcatatacatatgtctctgtaaacccactgcctaacccagtgaccagaacatgcagggctcaataaatgtttgcctgatggcatgccaattctagtctatgcagggagagcccctctgaatgaaaagccagagtcacaggcatctgggggctttcctggatatgcttgacaacccagtccatccaactatcccatacgttcccatctgttcaatttttttttaatttatattttttattatactttaagttctagggtacatgtgcacaacatgcaggtttgatacgtaggtatacatgtgccatggtggtttgcagcacccattaactcattattgacattaggtatttctcctaatgctatcgctcccccagcccctccacccccacaacaggccctggtgtgtgatgttccctgccctgtgtccaagtgatctcattgttcaattcccacctatgaatgagaacatgcagtctttggtttcctgtccttgtgatagtttgctgagaatgatggtttccagtttcatccatgtccctgcaaaggacatgaactcatcctttttacggctgcatagtattccatggtgtatatgtgccacattttcttaatctagtctatcattgatggacatttgggttggtttcaagtctttgctattgtgaatagtgccgcaataaacatacatgtgcatgtgtctttatagtagcatgatttataatcctttgggtatatacccagtaatgggattgctgggtcaaatggtaattctagttctagatccttgaggaatcaccacactgtcttccacgatggttgaactaatttacactcccagcaacagtgcaaaagtgttcctatttctccacatcctctccagcatctgttgtttcctgactttttagtgattgccattctaactggcgtgagatgctatctcattgtggttttgatttgcatttttctgatgaccagtgatgatgagcattttttcatgtgtctgttggctgcatagatgtcttcttttgagaagtgtctgttcatatcctttgcccactttttgatggggctgtttgtttttttcttgtaaatttgagttctttgtagattctggatattagccctttgtcagatgggtagattgcaaaaattttctcccattctgtaggttgcctgttcactctgatggtagtttcttttgccgtgcagaggctctttagtttaattagatcccatttgtctgttttggcttttgtcgccgttgctttcggtgttttagtcatgaagtctttgcccatgtttatgtcctgaatggtattgcctaggttttcttctggggtttttatggttttaggtctaacatttaagtctttaatccatcttgaactaatttttatatgaggtgtagggaagggatccagcttcagctttctacatatggctagccagttttcccagcaccatttattaaatagggaatccatttcttgtttttgtcagatttgtcaaagatcagatggttgtagatgtgtggtgttatttctgaggcctctgttctgttccattgggctatatctctgttttggtaccataccatgctgttttggtcactgtagctttgtagtataatttgaagtcaggtagcgtgatgcctccagctttgttctttttgcttaggattgttttggcaatgcaggctctttgttggttccatatgaactttaaagtaggtttttccaattctgtgaagaaagtcattggtagcttgatggggatggcattgagtctataaattactttgggcaatatggccattttcacaatactgattctttctatccatgagcacagaatattcttccatttgtttgtgtcctcttttatttcgttgagcagtggtttgtaattctccttgaagaggtccttcacatcccttgtaagttggattcctaggtattttattctctttgtagcaattgtgaatgggaattcattcatgatttggctctctgtttgtctgttattggtgtataggaatgcttgtgttttttgcacattgattttgtatcctgagactttgctgaagttgcttatcagcttaaggagatttgggctgagacgatggggttttctaaatatataatcatgtcatctgcaaaaagggacaattttacttcctcatttcctaattgaataccctttatttggttctcttgcctgattgccctggccagaatttccaacactatgttgaataggagtggtgagagagggcatccttgtcttgtgctggttttcaaagagaatgcttccagtttttgtccattcagtatgatattggctgtggatttgtcataaataactcatattattttgagatacgttccatcaatacttagtttattaagaatttttagcaggaagagctgttgaattttgttgaaggcctcttctgcatctattgagatactcatgtggtttttatctttggttctgtttatgtgatgaattacgtttattgattagcatatgttgaaccagccttgcattccagggatgaagccaacttgatcgtggtggataagctttttgatgtgctgctggattcggtttgccagtattttattgaggatttttccatcgatatttatcagggatattggtctaaaattctctttttttgttgtatctctgccagaccttggtatcaggatgatgttggtctcataaaatgagttagggaggattccctctttttctattgattggaagtttcagaaggaatagtaccagctcttctttgtacctctggtagaattcagctgtgaatccgtctggtcctggactctttttgtttggtaggctattaattattgcttcaatttcagagcctgttattggtctattcagagattaaacttcttcctggtttaatcttgggagtgtgtatgtgttcaggaatttatccatttcttctagattttctagtttatttgtgtagagatgtttatagtattctctgatggtagtttgtatttctatgggattgctggtgatatcccctttatcattttttattgcatctatttgattcttctctctttccttctttattagtctttctagcagtctaccaattttgttgatcttttcaaaaaaccagctcctggattcattgattttttgaagggtttttttgtgtctctatctctttcagttctgctctgatcttatttatttcttgccttctgctagcttttgaatgtgtttgctcttacttctctagttcttttaattgtgatgttagggtgtcgattttacatctttcctgctgtctcttgtgggcatttagtgctataaatttccctctacacactgctttaaacgtgtcccagaggttctggtacgttgtgtctttgttctcattggtttcaaagaacatctttatttctaccttcatttcgttatttacccagtagtcattcaggagcaggttgttccgtttccatgtagttgtgcagttttgagtgagtttcttaatcctgagttttagtttgattgcactgttgtgtgagagacagtttgttgtgatttccagtcttttacaattgctgaggagtgctttacttccaattatgtggtcaattttagaataagtgtgatgtggtgctgagaagaatgtatattctgttgatttggggtggagagttttgtagatgtctattaggtctgctcgttgcagagctgagttcaggtcctggatatccttgttaagcttctgtctcgttgatctgcctaatattggcagtagggtgttaaagtctcccattattattgtgtgggagtctaagtttctttgtacatctctaaggacttgctttatgaatctgggtgctcctgtattgggtgcatatatatttaggatagttagctcttcttgttgaattgatccctttaccattatgtaacggtcttctttgtctcttctgatgtttgttggtttaaagtctgttttatccgagactaggattgcaacccctgcttttttttgttttctatttgcttggtagatcttcctctatccctttattttgagcctatgtgcgtctttgcacatgagatgggtcttccgaataagcacactgatgggtcttgactctatacaatttgccagtctatgtcttttaattggggcatttagcccatttacatttaaggttaatattgttatatgtgaatttgatcgtgtcattatgatgttagctggttattttgtccgttaattgatgcagtttcttcatagcatcgatggtctttacaatttgggatgtttttgcagtggctggtaccagttgtttccttccatgtttagtgcttccttccttcaggagctcttgtaagtcaggcctgttggtgacaaaatctctgagcatttgcttgtctgtaaaggattttatttctccttcacttgtgaaggtaattttggctggatatgaaattctgggttgaaaattcttttctttaagaatgttgaatatcggcccccactctcttctggcttgtagggtttctgccgagagatcagctgttagtatgatgggcttccctttgagggtaacctgacctttctctctggctgcacttaacactttttccttcatttcaaccttggtgaatctgaaaattttgtgtcttggggttgctcttctcgaggagtatctttgtggtgttcactgtatttcctgaatttgaatgttggctttgcttgctaggttggggaagttctcctggataatgccctgaagtgtgttttccaacttggttccattttccccatcactttcaggtccacaatcaaacgtagatttggtcttttcacatagtcccatatttcttggaggctttgttgatttctttttactcttttttctctaaacttctcttttcactttatttcattaatttgatcttcaatcactgataccctttcttccacttgatcaagttggctattgaagcttgtgcatgcatcacgaagttctcatgccatggttttcagctccatcaggtcatttaaggtcttctctacactgtttattctagttagccattcgcctaatcttttttcaatgtgtttaacttccttgtgatgggttcgagcatcctcctttagctcggagaagtttgttattaccaaccttctgaagcctacttctctcagctcgtcaaagtcattctccatccagctttattccgttgctcacaaggagctgcgatcctttggaggagaagaggcgctccgatttttagtattttcagcttttctgctctggtttttccccatctttgtggttttatctatctttggtctttgatgttggtgacctacacatggggttttggtgtagatgacctttttgttgatgtcgatgctattcctttctgtttgttagttttccttataacagtcaggttcctcagctgcaggtctgttggagtttgctggagttccactccagaccctgtttgcctgggtagcatcagcagaggctgcagaacagcaaatattgcagaacagcaaatattgcagaacagcaaatattgctgcctgatccttcctctggaagcttcgtcccagaggagcagccacctatatgaggtttctgtcaacccctactgggaggtgtcctccagttaggctacatgggggtcagggacccacttgaggaagcagtctgtctattcttaacgctcaaacgccatgctgggagagccactgctctcttcagagctgtcagacagggaagtttatgtctgcagaagttgtctgctgccttttgttcacctatgccctgcccatacaggtgttgtctggaggcagtaggccttgttgagctaaggtgggctccacccagttagagcttccctgctgctttgtttacctactcaagcctcagctatggcagacacccctcccccaaccaggctgctgccttgccgttcagtctcagattgctgtgctagcagtgagcaaggccccatgggcatgggacccaccaagccagtcacgggagagaatcaccttgtctgccggtttctaagatcttgggaaaagcgcagtatttaggcaggagtgtcccatttttccaagtagtttgtcactgcttcccttggctaggaaagggaaatcccctgaccccgtgtgcttcctgggtgaggcgatgccatgccctgctttggctcaccctctgtgggctgcacccactctccagccagtcccaatgagatgaaccaggcacctcagttggaaatgcagaaatcacccatcttctctgtagatcatgctgggagctgcagaccagagctgttcctattcagttatcttggaacgcccccaatctgttcagtttttgaattaaattgaaaggtagaccccatctatacaatttttaaatgagtcagcatggtgcatgacacgtggtagtaagtgctcaggaaatgttttatgaatattatcttacaagttaattaaatactttaaaagacaaaagcagtgctttacatgtgtttcatatgatttagttttatgaaacttccaggtaatattaaaatccaaagcatcctgattctctacatgttcacgttctgtgatgagggggatggcgagaagcaaagaatgcattttgtgtgtgtgcatgatattaattccatgaactaagtttgaattctattcaaatactgaataggtaacatccagtttaagacttttatttctgtttagaaacacaattaacttatggatctaatggataagcttgagaatgtcctcccaactcagagccctaaggtgtttatctgcaaagcaaaaataacattcattgtgtgttcccttgcaaagtttgtctaagatcaagtgaggtgataatgtgattgtagtttatgaaccactttgcaaaacatcatcattatttccctgtgaagttttttaatatgattatttgatgcataggtgtgtatataaaatatgtaacatgtatttaaaaatagatattcctgtctgttccagttggctaggaaatcgactcgaggtcttgaaccatttcacaatcatgctactgaggaaaaaaattgagagcacttggtttggtgagcctggcaagaaaaaatgctatggtaacattgtcattaattcctcctttatggatagacctccaaatagttgaaaggaggtagcttttgaggtactccagcttaaaaatcttttatttatttatttatttatttatttatttatttatttatttgagatggactctcaccctgtcacccaggctggagtgcagtggtgtgatctgggctcactgcaagctccgcctcccaagttcacaacattctcccgcctcagcccccagagtagctgggactgcaggcacccgccaccatgcccagctaattttttgattttgtattttcagtagagatggggtttcaccatgttagccaggatggtctcgatctcctgacctcatgatccacccgccttggcctcccaaggtgctggaattacaggcgtgagctactgcgcccagcctagttcattttttaatcacattctaaattctgttattcttcaggtgttatcaattttacctttgaaatgcctccagaatctttctcattctgaagatgagtttcctttccaattatagtttagtttacttatctctcccaggatattgcaattgcctctctttatttttaagcttctagcttcctggtagcaaatccattcccattgaacatgtatttgtttcctactactgtaacaaattaccaaaaatttagtggcttgaaaccacaaaaatgtattatcttacagttctggaagtcagaagtccaaaatgggtcttcagggctgtgttccttctgcaaactgtaggggagaatccacttccttgccttctccggcattcagaggccacctgcattcctgggctcatggccccttcctctaccttcatagccaacaagatagcacctcatcaaatctctttctcaccttttcttttgttttcacctcttctctgactctcctgcctcctcctttcccttataaaaacctttgtgattacattgagcccacccagaaattataggataatcccctcattgtgagatcattaatttaatcatacctatgaaattcctttggccatgtaaagtaatattcacaggtttggagattggaaagtagaccccttggagagccatcattcagaactcaagtgatgtcttttagtaagatgcaaatctggtcctgccattttcctgcatggagcactcatgacttcccaggcctcggcaacagcttcaaatttttctgatctcaacctacaattaaaaatatatattttacatcattatctaatttacacacacactcacacacatgaaaatcttcacaaaatttggcacttactcttatgtgtaattcactttcataatttctgttatagcctattaatttgtaaaatgctgtccgtgacccatttcacagagtttctggcctgttagtgggtttcaaaccacagtttaaacatcatataggctgtgtgtgcttcatccatgcaaactacttttagatcccaaacaggctgttttctttcatgcctcatgcactttaggctattcttgccctacaaagcttacatgccatttctgctgacaggctcaacacaaaacattactttctttagaaagactccattgatttcctccaggcacctgcacacctacgtcttgccagcctcccgtattgtctctgttatagcacttgccaggtagtctctcattctcctttctctctctctctttctttttctttctctctctcctgcacacacacatccttctctttctcctcctcttccatctccttcttctgccttcctccttcctttcctgttttcctccctttctccttttctttttatttcattctaaaagaaagataataagagatacaatagcctttgtagaaaaatttgaaaatacagaagaataaacagaaagctaaacctacctctaaacaaaccctccagagagaactaataatatttacacattttcagttaatctttttgatatctaaatctacacactttactgaacagaaataggttcatgctgtaaaattttggaacctgttgggatggacttgacgttaacctggatagtgagtataagttataaccagcaatttttgacggaaaaatacaaggcaacctatatattggtttaatgaatattcaggatatatagtaattaaagatgacttccatgaaaagaaatgtaaataacgtttaataaaataagtaaggaattcttccaaaattatatgtggcaaccaaaattatatttggcagccaaatttggactctcctgatgaataagatcttgtttattctttttttttgtttgttttgtttttgagacggaatttcgttcttgttgcccaggctggagtgcaatggtgtgatctcggctcaccgcaaactctgcctcctggattcaagcgattttcctgcttcagcctcgcaagtagctgggattacaggcatgtgccaccacagccacctaattttgtattttttgtagagatggggtttctccgtgttagtgaggctggtcttgaactcccgacctcagctgatccgcctgccttggcctcccaaagcgctggaattacaggcatgagccaccgcgtctggccatgtttattcttttgtaatcatatttctgatgaaaaacaagtttttatttggaattattattgtgccttaataccctattaagacagtttaccagggacgaaaccagaatttggagaaattgttttacttttttcaagctactagtccattctcaaagtgaggtccaccgtgcaactacatgagaatcactttgagggctactaaaagctcagattcccatgcttaccctgtcctactgaatatgtctttaatcatggagcccaggaatgtcccccttttaacaaattttgatgcgtaataaaatttgagcatcactacactaaacttataaaactgtaaaaatcaatgttctaaacagctatttgggagcactaatagtttgtgttaatgtaaattctccctagaaatcagttcctttaaaaaggcttaacctcaggagtctttagaaccaaacgagaccttaaaatatgtaatttaatcacatctttgtgcaaatgaggaaactaaaaagatgaaatgacctctcacaagtcactgagcaggtttgtagaagaattgaaccttttacccagaaagaatctctgattccaagtcctaagccctcttccctattccagactggagcaaactttactatatctgctggcttacctattttaagccactatttcatcacagtaaatgccactttaatctttgcttatttactttctaatgacaaatcctgaaatcaatttctttataaaaacgcattttggtgtgtgaagagaaacattcctggctttaatgtaattatgaaaactacagagccatgaaatctcctttgctaactgcatactgcttggagtttgcatgtaatttgtggttcataatgctcaagtttgcctgctggtgtactcagataagaggaagcagctagacttccaaattaaaggactctgatagaataaactgcatcaatatctctatttcctgaaaaggaaaaaattctgcttgtttagtgaggtgaaaagtaatctaaatagctgaatataatcgcaaacagaattcttgaaagtactgagaattttttagtaaagatacacaaaagaaatgctatacaaatgatctgtgctgaatgtatctggggttgagattctattccatttcagaacaacagtcattaaaaggtcataaaaaacatgataagcaggtaaaatgacttttcctttatctgaattattttggttgccatattttcagaagtttaaaggggtgctagctttttctttctttcttttttaaaaaatttctgtatcttttattcattctctgtttgaacatttagttccagtttgagttaggggtggtgatcttatagctaaacaccagaaaggctgattcttgttcaccattagttagcacaataagaaactcaagttatcaaatcagagagcactttcagcattaactattaataattgtatgagtttccttttactttaaaatttatgaatggtagattcaaagtgagtgataatgcaatgttatattcagagacaatttcactgaagcaaacaggataataatttattatttttaaatatcactatgataatttttttcctggatctttgataatttttttaaccatctggttatttatgacatcacattatatgtaacactaaaggaaggtagaaagatacttcttcagtgaatctctgctttcaacatacttttagaataaacaactagtagaataactatacatctggtattttttaagttcgtatttataagtaggcaaagcaacctttaccttcaggaagaaaacagcttctcacaagcgaattccattgcaccaattggaaagaagtgcccagtccaaatgtgaactagattcttctgtcttatggtcaggagttttgcaatactgttattaagtgacattattgaaaatctacaaataattggctttcttttatgaattcttaaaaaattttgatgacaaattttgcattatggtatttggatttgctatttattaggaaaggagttaagaggtacttgaattcagaatccaagataaacatgtgtttcagtaaatattaataaggttaaagagaaattttcttttgagggagaatataagtctcttgcaactgtgtttatggaatagaagtagatgatgcccacatttttttattgaaaggactccttggttacaatgacttgttcccaagcacttttgtcttccccctacccacttgcactctctctccctctcttcatccctccctctgtctttctttagaaaggagccctttgcttcctaaccttatttaacttgtttctggaaatgaagcaaattaaattttactcattaatgtgcttatgcctggagtatccatcttcttatgatgggagataaggctgcacttgatcctgtgttgcccagtccaccaccccttactttcatattgctcctagtacccttgcagttcatttaatcttaggagatactggatattacatttttggtacatccagttgatgtttttctgatggtttgaaagttacttgagatgaatttttaaaaatgcaaataaaaataatcaagtacaaacaaccactgggtgatctaggagttagtgtaaaggagatggcaagtacagaaacttttgttgttgttgcttaggaatagtttatggtggccatgttgaatgataagctttactatcccactaattgagaactgagatccatcagttacagctacaagttgtaggacagtagcatcggaagtcagagtttgagcacctctggataagcatttttttcggtggccaccttgggcattcgtctcaaattcatatctttatttagaaataagtggctagtctccctcatggacacactgaaatttataggataggaaaagcagaaaagcagtaacaacagacttattggaagaaaaggtagagttgtaatataatgagaatatatccatttatacattgttggttttagaatatctctccttagaagttttcatctaggattaaaataaagtatctctaacattcgagcttcttatctttccacagacttgcagtaacttatctacttatttgtattgattaataatgttagccttccaatacctcatttttgcaaccttgataccatctgcaacttgtctcttgtgttcttgtggttgtgtaatctaacctcttacagaatgcacaactctcttctacaacatccttaatgttgttcattcttaacattcttatgttcaaacatctcctgtgataaagtactcaccaatttctaatgcagcccatttttattagtttctatcttgagtcaaaatctatacatatccaatcatttttaccgttgagacaaagggttttcatcccgttgccaaagccagtttggagaaaagcccagacaacattttagtcatcctttgcctgcttttctttccatgacagtttccagtttttatttacttgtctcaatttgttgttcgattgccttggacattccatattgaagtgggtcctctggcagaagttttaaagctcattgttttttgcttgtcaactttaagcaaattggaaggccatagcagtaatcttatttccatttctggaaaaaagatgatatttgagcaaagaatgacaacctgtatcttcactccttgtaaaatacaattttattcaaataagagagattaacagtagtttgtaatcacaccttttttaaaaaggacatccaaaaattagatatcatacataacatttggataattctatagagatataataaacccaaatcatgaacatgaaatatgttgatgtataaaacattgcacatgaaaaagaaacttagaaataaagaaagagcagctaggagttataacagctgacaggtgttgcatgcttcctgtgtctgaggtcctattctaaccaagttacctgtgttagctcatttgattttcatagcaaccttaggtttccagagaaactcattttacagttgagaaaactggggtacagaaaggttgattgatttgcccaacatcacacagccagtaaggagtggagccagaatgtgaacacaggtcatccagccctagaattcctgctcttaacaattatcccacgttgatcagactgccagcatcagaatgaccaagggtgcttggagaaggtacacattcccagactcagctgccaaatctactaagggagaacttctgagaggagcactatgttaaattgccaaatgtaatttataaataaattcattagaaggaataggtctcctaaaacttccctgaaaatgaatgatagggaaactcttcactctatttttccccccagccagctctgtgctttactaggattcattgcttggttccaaaagagaagaaaccctgccccgcctgggcatgttctacagcagcttgcaaccatctttgggtactaagaatcatcccttatctttctttccttttttttttttttctttttgagacagggtctctctgtgttgcccaggctggaatgcagtggtacaatcacagctcactgtagcctcaaactcctgggtttaagcgatcctcccaccttagcctcccaagttgctgagaccataggtgcacacccccacacctggctaatttgtttacattttgtagagaaaggtcttgcgatgttgcccaggctggtctcaaactcctgggctcaagtgatcctctagcctcgggctcccaaagtgctaggattacaggcataagccaccatgcctggcccattccttcatccttctatgaacgatgatggatctgggcaaatctagcattacacccttgcccatctgcctgctctcacatttgtgaaataattcaccaggctgagcatgtagctgggctgcttggagcagagggaagaacacacagggatcagaccctgaccttattagcacggcatgatcatcatgcctggcataatccagacagagtggcacccagctggagaagtttctgtctttcctgtaggagaaggatcagtagaggccagtgcatctgctccctgactctgctaccaagcaattcaagcagtagagtctgtttacagggtaagaaaaatacatttgtctggcacacaatccctgaaagaactttttgcattgaaataggaatttgaattatagtcagactactaattccctttcaggtttctcatgccaacagtcatgttgtcagtgaaatttaaatgtgggaaaaatgcttttatggactgccagattgtttggcaaatgatttaggtctacttggtttatttgtgaagcagtgatttttgttaactgcaaaataatatgaaaataaagaattaaattttgctgtatacatgggttttatttctccaacaataacattcttagtcctacctcgtctttcttcttaaatttaaaatgtcaatgtacagatgtatgctatatagcatatacttgcttgtctgctttctttttcacacataaatcaatataggtcctttctcatttgtggctttttactcttattttctgttgatctggaaataatatggttggttcatgtgtaataacttctggaaatttgttttctctgccttagcagagaaattaacccctaaagagaattcatattgaatacattctgtagatgttattctatatttaaattgtgtcaagttgtaataagagtttggccttaattttacatgttgttgtcttttggcatttcagtcaaattttatcattttcaaaagcagcacccaaagtgacagtgttaaagtggccctgggtgcccatgggactcaccctctgtacaccacccaggcccttctaccttccagaggggtagcacctcctccacagaggcgagtccacaattcacagtccagtcctcaaactgagatgtctgcctttctagcttcttaatccttgcagctaatgatcaggccgcagttctccccaataaattccagttctgttttgaatgaagatgtataaaatgaaaaaagccatttcccatgctgtatgctctatcagaaagacttctatcctcagaattggtaggaagtcactcttcagacttctgaggtttatcaagcctggcccgtaattgttgttgaattgttttccataggtgcatctctcaatcctttcgtcttctttgtagctggcctctgacccacgcctctgatttcatgtcctccaattatggatccgagcgccagtctcattggtgtctgatcagaactgaacggaaaagaattactttaacagcaattgaagccatttctggatgatttcaacatatccaaaaaacaagtcattgaaaagccagggtttctctctaattagctgtgtgatggtgaagcctcatttgctgttatcattgatcttaggaggccgtgggtaactttgtgccttgtaaagtttgatattgtataatctcatacagaaatgtgaggtcactaaattcacacatgaaagtacactaggctgtctgaggccttggtctgagtgtcatcatttcccaaatgccagacaaataggcttaatattttttaccaagttaaccacttgtgagacagtactggcccactcaaaattgcttttgatgtttagatactccatttgaatgtactatcatcccactatggttttagaattatttaagatgaaatattattttaaaagcaactaataagtaaattggacccacttataaagagaaatgtatatcattattaatagtagtactatttcaggtcaaatcaagaagcttttccaggccgggcgtggtggctcacacctataatcccagcacttcgggaggccaaggtgggaggatcatttgaggtcaggagttcgagaccagcctggccaacattgcgaaaccccatttctactaaaaatacaaaaattagcccagcatggtggcacacgcctgtaatctcagctactcaagaggctgaggcaggagaattgcttgagtctgggaggcggaggttgcagtgagccgagatcacgccactgcactctagcctgggcaaaagagcaagactctgtctcaaaataaataaataaataaataaataaataaataaataaataaatagaaattttaaaaaagagaagcttttccaacgttgacaccctttctctggtatcttctccctggctttcccctgctcttccgagaggcagccattttatcctcctgtttcatatctgttgcacagccagctatgtgctcgctctctctatggcgtacatgatgagatgctgcagcagcttctagttctctagcatctgatttctacattttcatttccctttttctttctatctattttagggagttcatcaccagacataatacttactgattcttgtcactcaaagtaatgtgagatgcgggaatctgctttaatcttggaacactcatataattcactaggccctttgtttccatgaggatcaaagcaatcataaaaataagaatgtgcagaagaccttaaagaaatcagcaagcataatcagatgatagtcatgaaaagaatttaattgcgtatttcatctttgcattctgttctccttttatgtaaggaggcatggagagcgaaaaggagagcatgtgaattctggctgatcctgaaggacaaatatctttattttctcttctcccctgggagtgggatgagcaagaaacaatgttccactgtgcaatccagttttgtcttaacagacactttctactgggatctgacaggctcgcttcgattttttactcattaacatgatcaataatgatgatgctgcctctagcatattacactttacagagaacttttctcatttatggcttgcagttcaactcactattaggtattgatttcattttggaaatcaggaaacatgcacagagaggttagatgatatttctgaagataccctgcttgtgagtcttagagccagggtaggaacccaggtgttctaactccaaagccctttctttgtgccacacattgctattactgaataaaaaagcagagggagtctcatttattgagcacctagtatgcacaagaagcattacatacgttaattctcacagtaatcttgagaagatagatgatatcatcattattttagctagaaagcaagaactcaaaggggtttaattacttgcccagggtcatataactgataccatgtcaaatattacattttctttcctccattacagattgtggatcctcctctggaatacacaagaatttgttcttggtaccttccctccaaccccaccatcccctcggatactatagttttaaagatagggagggtgtgatcatcatactgtgcatgtgcagtgcctggtgaatttttcaatgccaaacagaagcctctgcaatacctgaatattgtttcagttcttacaatgtaaaaatggtagaaaatgcacaaaagatgaacatcagtgtcagcctttttgccatgattgtgattttcgtgtggtaacaaacacccctcagcccatcaaaatctacccatcactggaaacctgcaccaaccgtccccgttcctggagcttacttcagcttacattgatttgttttttctctgatttctctagtacttacgtcatactataaacacttcacacacaaccaggctctcagattgctttgtgtgcttcattttgccagtttatgggaaatagaaattttctgatttctaggttgtatctcgtagatgtttactttgtatttttctcagtaccccacacaatgctaggtatatagatatttaatgtttggttggttttcattaagaagttaggttaagaatattgattaaataacataatttttgctttgtatcaattttgagtccaaacatcaatttcacctaggcactaaattgtttgggataagttaataactagttttattcttggtttaaaactgtctacaaaaaaaagaatagccatttgatagatttttttttctcgagacagagtctggctctatcacccaggctggagttcagtggagcgatcttggctcacttcaacctctgcctcccgggttcaagcgattctcctacctcagcctcccaagtagctgggattacaggcatgtgccatgatgcccggctaatttttgtatttttagtagagacagggtttcaccatgttagctaggctgatctcgaacttctaacctccagtgatccacccatctcagcctcccaaagtgctgggattataggcataagccaccatgcctgacctagaatatttttgtttttatttttatttttgaagatatatgtggattctcttgaacatgaaaacacaaggtcaaatgggtgagaggagtgtagtcaatgaagaagacaaagataagaaaacataggtacaggctgggaaacatggccaaattctgacatgaagggatcaaaaacaaaagaataaacacacatactaagtataaatgtaaatataaaattggatagggatcttggagccaaataaaaagtagcctaagaaatttggactttattctatggccagtaggaagacatagactgtttttgaacaggagtgagtggtggtacagatggtgatggaggtagtggggtcatctctaaacttcaatacctcaggggccagtcaacaacataaagacagccagataagagtacaaaagtggcagctgctactagttgtagtcctccatggccacacagcaatgcaggaaccatttttaccatcttttgaaatttttcaaaacaaattagaaatctgggcttttgtgtaaaaaatttacattttaaaatgttagcttaaggaattttaaacacgacgttaatcaaacaggccacttctgtgaggcagataccagcctgtgatcttgacctacatgagtgacacaatcacttttcaaaatagttaactagagaaagctggtcagaatcagggcaagaactgcacatggcagagaaatattcttattttagaggcagactcactggttttattttaaaatgaacatgtttgcagtgtgtaaatcagctgagctttagaacttttgcaaacattcaactctttagaattgacaatggtaatataacaagaatctttaaaatacatcagaaattaagaacttgctttataaaccctcacctgactttaaacataaattaaacaggtgctagaggacttttgagacaataattaaccaagtattcattgataaaacacaggcataaaccaggacattcttgggcaaactaggacgtatggttaccctatctacttacatatagttggaattctaaaataaacacatttttaaaatgaggttaaagtagcttgaagggttaataactgaaattttcttctagaattgttataagataataatcctcaaaattgggaagcacagttattcccccagcagcacatgtaaaaagaatgtaaatgtagccacatcacagtgaaactacagaataccaaagatgaaaagaagctcctaaaagtagcttcagagtaatgatagttcatatgttggggacaaatggaaaagagcctaagaaacttggactttatttcctagccaataggaagacatagcatggttttgaacaagaggtgaatggtagtatggatggtgatggaagtcatgaggtctttatcacaataaagatagtgattaaaatggaacaataattagatttacagcagacttttcaatggtatcaactaaagcctgaagacaatggaatgatgtggtaaagtgaagatagactataactagaattatatacccagctaaacattattcataagtaagggttaaacaaaaatatatttggacatacaaaagaagtatttattaccggcagaccttccccaatgggatttctaaaaaaatgcacttcaaaaacatgaaaggaggatttgagatacaagaaaaacttgtgagcagagaaactggaaaacatgtggataaatacaaataaataatgtctgtgttaaaaagtgtctgacttagggagtaaaaaatcaaggtagtttaaaatataaaacattgtacaacattatgatttatgataggaatggatgactgaaaaattgaattttggagaatgaagttaaagatattgcttgttttttttaaatataaatttctacattttcataatcactttattataggcataacttccaaattaataaagagatgaatgagattagacaaaatagaaaattttcaaccaaagagaaagcaggatatgaaaaaaagaaacataacataatcagaccaaatgtcatagaacaagatagtaaatatacaaataaatatagtggttattatagaaaatattagtgggccaatttcttgataaaaggattctgatccactgtatcaaaaatactatgagaaagaaaaatatattttaattcagagctgaaaaggacttagaaaatgtagtttctcatttataaatgagaaaatcaaagcctagagagtcgagtgagataaccaaagtcacttttctaacaagtaccagagattcaaccagaatctaagtttcctggcttctaatactatatgatctattaaattatacttttgtcttcttttccacaaaaacgtatttaattccacaggctgagtttcctgtgcatcttttttttttcttcttgaagatactactagccttttctccaggactaaaagtattttttttttcctagagggtagacaaagttgtgactgctgatgagaataaaaatattgcaataaagaaaaatcttaggtgattttttttcttttgctttgactgacctaagcttaaggaaagataatttcttgtctaattgtatctttaaaagtacggaagggaattaatgaaggaagaagaagaagaatcttgaataggtggaacattttcagcttgttaaaatttgtgagttttgatgttgtgattaaagattttaagtgccggtgacacagtagattttggagaatttcattgactttagttttttgcacaagttaaattcgagatatctgtgtgtcccatgatgaaaatatggttctggaatacagaagtgtagtcaaggtttcctagtaagcggactattatatttatagattacatttcaaattgtgaagaaagtgtagtatctggtagcatcatacaagacgatgagagagaatgaagatcagaagcctgtacagcaccatgaagaggtgagcagaaagggaagcttgccaatcaggaagaggagctcgccacatgaagaagaaaacttagagagactaaagaatcaggagagcgtcatgccctggaagagtgaatttaaagaaataaggggttagttacatatgtatacatgtgccatgctggtgcactgcacccactaactcacatatgtaactaacctgcacaatgtgcacatgtaccctataacttaaagtacaataaaaaaaaaagaaaaggaaaaaaaataataaataaataaatacataaaagtctttcagcaggaaaaaaaaaaaagaaataaggggttatcatctataccatgtgttttagaatagacaagtaagatgagaaccaaaagttaaactgctggatatggtagtgatgaggtcattgattattttagcatgaacaatttcagtagagtcttagcactggacacagctacaattggttgaaaaatgaatggggtttgaaataacgaagctgaaaaagatctaaagcacatacatgaacaaaggttcaaaagcgagatgataacatcaaacagaaagccaaagtaaaaaaaactataacctaacttcttcactattcaacctaatattcagaaagaggactagactttggatatttgagaaaagctgatctttggtatgacctgtgtcacctcccagcactgtgacttagaactggcacctaacctctttatttctcagtttcatcatctaaaaaatggtctactgcttcagaataaataaatggcatgatacatatgaatgtgcatatatgtaacaccctgtttaagtctacattcttgatgttgtttttataatattttattggtagttagctcggtaaaaagcctaaacttgtggtatactttgatgttttatctaaaccctgtttttgatcgtgctctgcccagtcacctgtacccatccccaaaccatgactcgaatagatctcatagtatttccagtcattgttctcttattaaaaaaaaaaaaaaaaacaactcaggcagaacacaggggacttttagggcagtgaaactactccatatgatactataattgtgaattcatgtcattacaaatttctgcaaaaccacaggatgtaaagcaccatgagggaaccctaatgtaaactatggactttgggtgataatgatgtgttactgtaggttcatcagttgtgacaaatgcaccactcgggtgggggatgttgatagtggaggaggctatgcatgtgtggggctagggtgtttatgagatatctccgtattttgttcagttttgcgtgaacctaaaactgctttttaaaaagttgattattaagacagaaacaaatctcagtactgttgagcccagtttaaaaaggcaaaattgtcatatccagtttaacaataatattcttcccttaccataaatctgactatattctcagcgactggtagtacaatcaaaagagcagtttgatcctccctttctgtcccttctttttgtagctcttgctgtttcaaaatcagggatgaagaagagctgggagatgaagggagggcagatgactgtacgtaacctgatgtgcaattacaattctttcttggcttcttcagtgaagcctgtcctgccacccacaggacaagcttctgtgtgacagacatctgaatgctggtcatctgaatgctggttcccttatggaggaccttcagggagcctgttagggctctctcgctgcatagtgccatgacatggaagatttgctcagattccttctcttttaaaatttcttcagctcccttctgcccctgttaatatacatcatagctttccacacctcatccaggagacagctctcttggagatggcttaatggcaaaacgtctcaagtgcagctacctgctgtagtgtttacagatccatgggaaactcacataatctagccatgctagcctgtgggaaatcaggcttctccactgcctccccttcctcaaccctgctgtctctctccaggtatcaagtactcttgcacaaaagccgatcaaaatttcattgtttaagcagatactattcaatgagcccaatcggcacatggctttgtgtgcatgaaagtgcccatccctttacaaagagtctggtttgagtcttagttgcctattttagggcaatagtaaaagtcccattcaaaagcctgttatcctttaaaacgcaatgcatttgatctaatgcaagcatttcttattgtgttctgtgaagaaaaacaattctcaaccttgactaaaagctgtaagctgcctgcatttatgtatttatcctgcaggttttgaaaaaattgagtgtaatcaaaatcccactgggaaaaagtatgtcaaaaagattaattagaaggaaagcaaaaatgatgtcttctcctgcctttgtgttaaacattcttagaaaacaagcactgaaataaaataagtaaagatgcctctatatactttcggctgtaaattttattaaggtcttgaagagagttcctctgagtgtttaaatagcatttactgaaaaccatctccaactttcatgagcagaaacatgcaattgttagatctgtcagggtattactgaaaatggagtcaaaggccccttataaaaaagctatctatggcttttcctctcttccaggaaagatgaattgccatggtaacactgccatgaaataataggtcaggttttatccttctgcctcaggcttattctattaggttttacttagaagtggatgccattgtaaaatgaaggtttttggtatttcaaaactaaacatcatgacaagaaaaatctgatcaataaaatctgctggtatgaaaaggttggataaaggacaacaggtagggagttaaactgattggagaactatttagaggctggtttattagtactcttctaaaatgtgggcttgtttcacagatgcttgtataactgaatatgcataaatgaagccaggctgactgcacaagatcagttgggaaaagtggtttgtaaattttattttaatggaggattaactgctctagggaaaaagtttccatttcattccgaatgaaacaagaaagcataaaatatttaagcttcctatttttcttactatttttaaaagacaaattcaatactgttttgtgcctatttatggaaatttctaaaaatgcaacttgggagaagtattaatgacattacacaaacaacatggtgtgtaataattgaaattctgttgtttctgttgtttgggggagttgtgtctcagtatatgcgtcatgactttacatttttctggaacagtatctcaatcattttgggatgaaattccaacagaaactaatatatattttttgtcatatcaagcaacattgctctgtccttctaataggacatacattagaataagagagaaatagatatctagtttttaaagtaacaagatatatcaaaccaacttttttgaagagtttcatttaatttaaatgtaagttaaatgtagaacatggtagtggattttagcataacatctttcctgaattcacacagtgagactatgtctgacttctccatagaccaccttgaattttctgtagttttttcttctgtaaagtactaacagtgtgtgtgggtagctctgagatttatattgccttcagtctgatcatgaagattgcaaagtggggtcagtgactgtgctagtttcctagggctgctataacaaagaggcacaaactgggtggcttaacacagcagaaatttattgtctcacagttccagaggctggaagttctaaattaaggtgttagcagtgccatgctgtcactgaaggctctaggggagaatccaattcttggcagtccttgtcttatagattcatcaggccagtctctgcctctgcctttacatggctttctcctctgagtgttatatctctaaagtgttatgtatataaagattagggcccattttaatccaaagtgacctacctactgggtacagggtatactgcttgggtgatgggtacaccaaaatctcagaaataaccactaaacaacttaattcatgtaaccaaacaccacctgttccccaaaaacttattgaaataatttaaaaaaggaagacctcatttaatttggttacatctgcaatgaccctttttctaaataaagtcaccttcataggttctggggtgaggaattcagtgtatatttctgggggacacaatacaacccacagcagaaactgaattgagggacttcgacactaaataaattatctctattacaattttaaattgctatgctgtctagttctttagggaaataaatggtgatattacttgagttatgtttcattactaatggttactctcattttccctttcccttcaactttaaatttttgtagatatatagagaatatggtattcctaattaagtgctctcaatgtgtagaattttaaaatgtacaaatatggttagaataggtaaaataaattgaatatatacctatcacagttcctaacttgtaataggtgttccactaaatgtttattgaatgaatcaatcagtgttaacattaaaatatactgagcataatttaatctgtctttaatgattcaaaacattttctttgggcaaaaggtaactaggtatgaattaagagatccccacttgcctgagtgctcaatgactaagtatttattctatttcacttctttatgtccatttggaaactcattaggttttttgtcttggattacactgttcccagcccccatttcttttgactttcccctttgggttatcacatattcttttctatagcttaattaaactacttctgttgaacaattaacatcaatgtgttctgatttggtttctccacctataaaattgtctactttatcatgtatcaggattgtctgtcctttgatctatttttctctgtctaggtatccaataaatgtattttgatcgtggttatattatttgagttgtatttctttactaacggttactcccattttccctttaattgaatacaaggagaagtaaccactaaaacaaaaaacaaattacattacaactcctaccttacaaatgactgctatttcctcagttttaaaactgaatgttatttctgcatgaccttagaaggttttaagaattcagtacatacagttttaaaaaagaaagatttcattagaaaaacattctaaggcagaaacagagtgccaaaattcaaaccaaaaaagttttaagctactacttatcaagctgtgaatgttttctattttatagttttttcttgacagatattcaagtatttgttaatcaaacttgccattaatgccaaaattcccctaaaaacatgattaggaaatcaaaatatttaagctaactgaaataatttttttttcaaaaaaaaaaaaaaaagaggaaaatgaaagctgtatcactcatggaagaaagtttttattttttaatcacatttttatccctcattttctctctgatatttccagttgtttttttcagtcacgagaagcctacatttatggaaaatcagcaagtataaccagctattagcatcagctagggagaggaacaacacaaagccaggattttgagccagcttcctgggcaaattgggaaaagataccattttagttagttacctgagactgttcaagtttaattacattagtggcacttgacattataaaatgtttttttctttcagatataaccttcttccatcattagtaaacgtcaattataatgaagtgtttttcccacttccttttcttcctgatataacggaagaaaatgctaatgagtttataatcctgaaattgttttcaaagccaaaacaaagtcagcttggtgtctgtttattagcttaattttattctttatatttggagaacaaattttctcattttgtttcttactatattttccctacttagtgcaatttcttattctccctgagagcttttaaatgataaatattaccaattagattgtatttctgggttcaaatcagaatgatgttgaagatcctgccccttgctgtgacttacgtactatctgaaagcttctattttttttttcttaaaagctggtttttccctctctcttttttgattttgatacataatggctattcaatccatgggttctaacagtttcctgtaacatttcaatcagaatataatggtgacttgatttcttctctctcaaagattaaatatgtccacatatgaaattgatgcattttataacaaagaacaagtttctttactgtcaaaatgaaattaacatcttatgaaaatgggacaccatcactggaagaggtcaagaaggaagagagagataaagtcagttttccaatacaacattattcagtgtctgtgctgaaaacatgcttgacagaaaaggtctgggtcaccttttagcagtgtcttggtatactgtttgttttcccctactgagaaattagggggaagctgtctattgtagtgcagagaaggcagcaggcatggggtcccaacctgtaagaatgctgtgtaatcaatgccaaaaaaaaaaaagtgtgaccaagagaaaaagaaagccatttaaagttactttacaataggcaaaataaaaatggtaaattacatttatagataatatgttctggaaaatacgaacccaagccaaatgtgggaaaattttaaaatagactgactagttataaggggttatgctccccagaaagcttacacatatcacaaaagctttgcttatgcttttcattttaaacagtcttttgaagtttggtcctggcattttatccatattgtctacctttcttctttgtttcacagctggatatactgctaactgaattaaatccaatgaatatacaagaatatccaaataagttcaagagttgcttctttctgcctaatttgtatatttgtcccaatgagatacactttacgacatctatgtttatccctagcatctacatttttattttaaaatatttataaaatagtaagcaaagtataataaaatattcaaatagtggccaagtaatttctatcatatagtcatgcaattatgcaacattgcattgttatggctgggattcaactcttaaattcattaaccatttatttaccttttcaataatttttactattagaatatttaacttttttagtgatttcttagcaccgttttacatattaaatatattaacctttggtctctctggtctaatgcaaatatacttcccagtttatcatttgatgttctatcattttaattctactttttttatattcaagggattgacagattttcatgtggtgaaatctttactttcttttttgttttctgccattgatagtatgttctgaaagatcttcctcacctgttctacattatttctgctattttgagtgctataatctgttttcatcttacttttgaaactttcttttctgtaaaattaccaaataaataccttgtaatcaggccagccttacccctgctccaagagtagaatataattgttggcttcacaaaaaatcacactcttagctaattttcagttccattttatagcctacattcttccagaataattcactgattcccagcctccttggatcactcttctctaaactttcaggagccgaataggatataacacacaaattgggaaagagttgtaggcaatctttagtttcacactgctgttcatggtggggtgtaagcatctaagcaggtacacacctatgggtgaagaacagcaaattcaacatgagcccttcccaatagtgaccttatgagacgttaatttcattttgatggtaaagggagctgtttctgtgtgcaacatgttagttttgcctccaaggcctgttaaatcttaggggtagctgggatgcactctgcatccaaaggaggcatctctgggataagagagtccagattgatgtcagaaagaagataatatttctgtccaaactgctaagcatctaaagagtactaggaaagagaagttagatgccaatctccagggaaagtggcgaagagagaaactgaagagcatttgaattataagtgatgccccaggtcctgaggagggagtttgagttgaggaacaattactctaattacactataaggtatatgtgatgtatacaggtccattttggtaatgtatctgcctctgattcccaaattgaactgttatatgccatctctcttttgcaaatgtcaaacttctgtacttgtaagctgctgtctttatcttgtattagccttgctgtcccacatctaagtaataaaagctagtacttgccatttattgaccaatttttgtgtgctgctctctgtgggaagcactttacatgaattacttcatggaaccctaacaagcatgctaaatgttagagggatttggtttacagaggttcagtaacttggccacattcctcggctatctaatgggagagaaggacctcaaatctggatctgtctgactcaaacatacatacaaagcaggtttttttattcccattttacaattaaataaactgagactgaattgcaagcttcttaaaagcagggacctttttataaacttccttttttccccccacagtggcttgtacttggtagatagacaaatgcatagtggtggagctaatatactcctctgatcttaaactgcaataaaaagctcagattttaaataaatatgatctatctttttattttgttttctatagtcagatgctgcttaatgaaagtaaacatatgtagaaggtactttgagcgggttctttaccaaaaaaagaatttttcagaatattgcagaactgcaatataaaaatcattaggacataaaagtggtttaaaagaggtagcaacttatcctagatcacaaagaaaagaacagaaacaaagaaacaaatgaaaaaaaaaaccctctgcactttaactccatcctcccacattctgactttgtgttattacaatttacatatatttatattgcctttctcttaacaggttgctgtaactactgttgttttcatagatttgtcttttgggcttcatactagagttatgaggggattgccaccacaattgtacagtattgtcggtttgtctatgcgcttaattttaccagtgggttttatacctttaagtgtcttctttttgcatattaatggagtttgttttcaaattgaagaactccctttagcatttgtagatgggtctggtggtggtgaattttctcagcttttgtttgcctgagaaagacttcatctccttcatagataaaggatatttttgctggctacagtattcttggatggcaggtttcttcagcactttgaaaatgcagtcccactctctcctggcctttatggttttcattgagaagcctgttgtcagacaaattggagctcctttatatgttatttgcttctttgtacttgctgcttttaggattctccagttgtccttgacctttgagagtttgactattataagtcttggggtagtcttatttgggtcaaatctgtttggtattccctgaccttgctacctctgattatttatctctttctcaagctttggaaagttttctcttattatttctttaaataagctttctatcccttgctcctgctcaactcttttgaatgccaataatttttagatttggtcatttgaagtacaaatatagagtttggtagaagaaataagatgtagtgtttgataactcagtagggtgactataatttacaataatcgattgtatattttaaagtagctaggaatgaataatttgaatgtttctgcataaagacaaatatttaaagtgttgtatatcttaattatactgatttgatctttacaaattatataaatctattaaattattacatgtaccctgaaaatatctacatctattatgtatcagtaaaaaaatcatttttaaaaatcattaggggaaacaagaccaaaaaagatagacagctatacacaacaagtacattttagactctattgtgactctttttggaattattaatcacttcccaaaaatgtattgccttatttctgagagattatcattttttttttattctttaggacacagcaggccaggaaagatacaggactatcaccacagcctattatcgtggagccatgggctttattttaatgtatgacattacaaatgaagaatccttcaatgcagtacaagattggtaagtcagagcaaatactcttattactgataatgatggttctccggtcaactctgtctttcttcccaaagcagtgaccataccgcaatgtaatatatgtgtttacattacactacaatcccgcttgtgcttcatttaaaaaaaaatgctgtttatgcacagaagcattattcagggattgataagaagtcattctgatgatttttctgcattttgttcattccagtgctttgcattttgtcatcatcgcttccatggaaactagtgcattgcttttgattttttaaaatataaataacgaatggtttggaagtttactgatctaaaatagggatctagaaactatggctcttgcgccaaatctggcccactgcttgtttagtaaatcaacttttattagaatacactcccctcactgttgtctttgactgccttaacaccaccacagcagagttaagtagttgcaacagaaaccatattgccggtaaagcctaaaatattttcgatctgtccatttatgaaaaaagtttatggaccccttatccaaaagatttgttaaataggttattcaaactgaaaaattttgaaggactgagataaaggataagataaaaccaaaactttttctgactcatagctgcatgaaactatctgaaaatacttctgaccctgatgagtgtttacggtggggggttattcctacggctacagtatccttcattctatcccaccagcaccttgagagcagacactgaaaagccagtgagatctggtcatgagctcaagcacagggctaaagaggacggtttttctgtggaaggagcgagaatctaggtagggctttgtgtgacattaggaaggaaatggagctcccaaaatggagttcccactggtggtggctaggactgactgaagaaataccgcactttaactgtaaatataatcacatattatcttatgtaaggaaaactttgacaatacataggcaaaacagacagcattctttttttgtttgttttctatgataatattatccaaaatgatttttacatatatatcagttcagtgagggtcagatactcttaaaaatatttccatttgcttttgcttttttctttccaattttaattgttcatctaggaagacttcttatttacacacacacacacacagttacaatgcaagaaataataccattggcaatagcaattcaaaagagaaatacagggttataaactaaaaaagacaagtttaagatgtatatgaaaacataagtatcttccactgaggaattcagaagaaagcttaagtaactattctttttagtaaactgaatgttgtaaatacaccagtatttctcaaactaatttataaactcaaggcaatcttaattaaatacagcagattttgtacaaaatgaaatgaaatagaaaatccagagataggcataaatctatatgaggatatagttgatgataaaagtagcattcaagttagtgacaaaaaggttggttcaattaagagtgttatgatatctagttaattgccacagatagcctgaaacacatattgctatgtaatatggtaattttaaccttgactacttcctgtcttaaaatgttgagatccaggaatcccaggccagaagtgctattataagttttccaaaagaacaagatcttaaaaacatggaagacctctgcccaaaattcctgcctcatcaatgcctgctgaattaattaaaacttcctcagcctgactttcagacataccacgtaatggtgccactatatcttcatgccttcatctcttactattctagaagcaaactaaaccattcattgtttctgaagcccagcttaaactttccaacatttgtgcttcttttcttctatcctttttttctctgctttgcatgtctctttcctcaatctgctactccatctgccccaaggcatatagatttgtcaaaaaccaacaaaagcctgttctagaaacaaacccttacctacttttttcatccaaaattagatgatcacttgatttattagggttttttaattcattcaacaagcacttattgagcacctaactttgacagccaatccatcagacatagcgtttagtacctatgccagcatttactatctcagttaatagatccaccatcacccagttatctgatgtagaaatatgagcactgtcttttatttcttcctcttttacaaatagaatctcattgaccaccaagtccaatcattttgactttctaaatgcctctccaatctattgctcttttttcttcctattgccaatgtgttaatccaaaccattcatttaggagtcttttatcttttctccttatcttcaggttccaccctctacaggtgatccatcttattgccatcagagctacataagtgaaccttagtacatctcgggccttaaaaataaaacttccagtaatatcttattatgtacagtagcgattctgggagcacatgttaatcacctgtagagctttgacaacatatacaagcccagactccactctggatctactaaatcaaatctcccgtgagatacacgggcatatgaatttttcaaggctccacaggtgattctgaagcccatttctggttaagaccattgatttataatgaaatccaaactcactaacatagtggacagtgcaacctccaggtatctatttcactgacatcatctcctatgactctcttccatacgctctatgtttcaactaaacagaaattttctcagcttacctgaactccatccttttactacctctgtttctctgcctgaaatacttcctctgtcatctttaaaaagtctatttacttttcaaggctatctcttttacaaagctttaaaagattaaaagatatctctaccccttttcctacctgctcccacctttattcataacagacaacactatccacaccctcatctctgcacccacactaccctggcactttctgcagatcacgtaagacctagcggactctgctattatttcattatattttcattaatcatttttccccattacagaatacagtacaatacaatacaatatatgcactcttatttttttctcatttctttatcgtggtaaaatatatataacataagatttactgtcttaaccattttttctgtatgtagttcagtagtattaaatacattcaaccatcaccaccatccagctccagaattcttatcatcttgcaaaacttatatttaaatggtaactccccatcactctctccctgcacccctcagcaaacaccaacctgctttctgtctctacgattttaactactttaagtagctcatataagtggaatcatgcagtatttgtcttttagtgactggcttattttacgtaacatactgtcctcaagtttcatccatattgtagcatgtcagaatgtccttccattttatattttattatatgtaataaaatatacattatatataacttatatgttacatataataaaatatacatacacacatacacacaatacgtgttacataatgtacattgtgtgtatgtgtatatataaacacaaaaaatattgtattttatatttatatttatatatatacacatatacatatactatatgtatatttatattatatatacacatatacatatactatatgtatatttatattatatatacacatatacatatactatatgtatatttatattatatatacacatatacatatactatatgtatatttatattatatatatacacatatacatatcctatattaatctaatatatattttgaatagatgatctaaagtactaaacagaattacatcctgatttcccagcaaaaaatacagaaattacttcaaactgacatagccaggaattaacggttgtattcttcctctcaacaatagatttaagattgtgtgtgtattgccgctatggcaccaattatatttatcttttcgtttttcttaagtgtatacttgtcttaagttcctactacattagaaactatttgtagggaaagactatcttatttatctgtatttcctttttgacataataactagcacaaaatggatattttaaaaattattattaatttcaaaagtaaaaaaaatcagaaatcttaagaaatgtttaaggaataggaatagaattgtataataaaagaaaaaagccctttggggaaaaccattccactgtagctactaaagcctactctacatgtacagtataattgaatggtggttgtgggtgaggaagcttgctgatattcagtgatggccttctacaacaggaaataaggtattctgaaagaaataagcacaaagaaacacattctttaaattactggtctccaagtgctgatcttaagtgtataaaaaatacagaaaaacatatctagcaaaaagaaaaattaattaaagctgagctgcagctaaagtttcagctactcttcccaacaaaatgcactttgattattcagaaagaaaaaaaagcttgctgactgtgatttctccaaaatcctaaaactgtcttactatataggaagaattaaagttcccttttcaaaaaacattttattacacaaaaattctggtctgttaaggagaagccaagtgtattagtctgttctcaaactgataataaagacagccaagactgggtaatttataaacgaaagaagtttaattgactcacagttccacatggccagggaggcctcacagtcatggcagaaggtgaaggaggagcaaaaacacattttacatggcagcaggcaagaaagcatgttcaggggagctgccatttataaaaccatcagatctcgtgagacttactatcataagaacaacatgggaaaaaaacccaccccatgattcagttacctcccactaggttcctcccatgacacgtgggaattattacaattcaaggtgagattcgggtggagacacagccaaaccatatcagcaagcatggagattcagagagagtagcaagcagcgagctaacagattattttgaggaaatggaagctatctcttttttgaaaacacattagactgtgctttgaattttccagtggaattttatttaaggagttaaattatcctctttggccaaattccccagttctgtaaaattaatacaaaattaagctcactgtaagcctatttagaatttatgtagaatctataaattttcaaaaagaatgtgagaaactcaacataaaaaaatgcatacactgtggttagtaaaatatgagcagaaagtaactcccaagaatcaggatgatggtttgtagctgtcattcctttgaaacagagaagaaaaagctttatgtgctaatagtttattgggacatacagggcctggaagcaagagtgaggagaaaagggagcatcagggaagagagagaacaaacatggagggtgttgggatttgcaaactgatctctacttggtagcaagtataactgaccattgatctcacaggaacgtcttcagaggtgctttatgaataatgcatctcaggacagactatctggtagaaggaaggaagaactgacccactagcttttctcttctattggtccaatgttcacttctgggactttaactcttccacacttcccagttacacatatatgggtgactcatggctcagcagcagcaggaaaactttggtgtgggaggcaaggggtctgtggcattggcctgagataagctgctttgggctgtgcccatgtcatgataacacaggtgatagtccagaagagcccttgcagaagtggttagcagaaggaatgaacaagtgaccaagagcccttcagacaggtgagtccaggaagatctgaggggttgcataaaaggtgtcttatagagaattttatttatttatttatttatttttttctgttttgttttttttttttaaattatactttaagttttagggtacatgtgcacattgtacaggttagttacatatgtatacatgtgccatgaattttaaagcttaagaaaatccaaagggtcaaacggttattgtgcttgaaatacaatttggttatgagattgctgaaaaccaaggtaataaccaaggccaaaaaaatttttttatattttatttattaaacatgatatattatatagctctcattataggaaaggagaaaaaacatatcaatcttacagggcaataagaaacttcaaaacagtttttgttgaatttggatggaaatgctttttatttggggcacattgggtttatgttaacaatagcttttataactagtactaaaaaggccatgactttagactcatttttttctttcttaaagaagacagaatatttgcgcaccttcagtgaaggcctctgtgagtggctgggcaaatataatccaagcacgtagagttcttgtggtctcaaatgatccaagaactgaatggtaaccactcaagggaatgaatggattacatgcttcctagactatcttctctaaatgtcgttttctgctttatgcctttgataggagctggataggcagtttgatatgtaaagttatgctctctgaggaagacctcaggtgcttatattccatccaatattttggaaaccagatgctgaccttatattaatatatttgctaaattctttctagtttctgaacttctttcagtcccttgaacttctcatacctctgggtctctcttcccctgggctctgcctttcataacaaaccatattccttcaaccttcacccagatcaagctaatttattgtcatcattcagattttagctagattctcatttcttctgagaaacttttcttaatcccagagtaggttagttgcttatgtagtgagctctagaaacaatactacccagtatatgttacaagttataaaactgcttatttggttatcttttttcctgctggattctaacttcctcgaagatagtctgtttatcttccccacttttacatcccagtgcctactgtagtgcctggcacttaatggctgctcaatattcatggaatgagtgagtaaaactacatagaaaacgcagaccatattcatggaatgagtgagtaaaattacatagaaaacgcagacctagtgaagttgtcttaattaattggagtgttttataaaaatcacagggatgttagatggctataaacaatcacactggaagctgcaatgatgtttacgatgtgcttcagacttgtccatgtggtaaaaatgtgtgtcatcatggtccttaactaggctaatttgccagatatctattggcttaaatctacagtttgttaaggagcatagagttgtagaggcaaaggcagcaatctagtggctccatggttttgggaaagtaaaggctacttcttttttaaaaacacagtattctgtgtctggatcccccagcagggtttgatttaagaaataaattaacgaatgatttgttaaagagataggtcctaaataggcttaagtaagtatagaaataccagatcaccgctgaaaacttcacttccttcgaagtgtttctcaaatgggttgtgaccagagagtttactgggtttcaattagaacatgacctcaagtacctggccaggctctttctagcactgtggctcagggtctgcacctattgcagtgcatttgaacttgatttaaaatcttctccatccccgattttaacatctttctgttctaagtatggcatggccacaggctgctgtatttcctgtagaagaatatcattggcttttctccccctctcttatttatttacattctgctttttatgatacaatgaggaactataaatatagaggttttttaagagcaggaactctggtaagcagattgatattttttaagaaatcagaggctgaggataaaagtctaacactctcttcctatcagttttaaataattcatttctgtgacattcagggtaccactgcagatatgctgaaactagaatgaaatttcaccttcaaatgttcccttctgcagtttttttttctttttctttcccctccaaaactacatagtggtcttaaattaaggttacttcatgttaaacatgaaagttagcctgccaataacaactaagatgtgaggagcaattgctaagcctctgttcagagctttctaatctagctcaaggctcctatcaactaaaaggtcagttctgtgtcacagctcagagggggcagtggtgggatgagagcacagaattctgcccccagactctcaccaccaccctacactggaccgcggggagtctcttctttctccctggatgttaatgatacatttcttattgctggtcggacccaaccatagaacattatttttgtgcagataacccaacttaaactcaaatttatatttagaaaatagagggctcctaatcctcagccccttcaaaaacaaaaactcaaaacaccctgtttcctccgttgtctttgcatctcaataaatgacatctctatctttctagcttatcaggctaaaatcttcggagttaatcttaacttctcattttctcagactgcacacccagttcttcaaaaaatactgttatatcttgggtctgatttcaaaacacaatctattctcattatccatggcagttatgccctataaagttgccacagacactgaattagcaaatactgaattattgtcccagaagggaattacaaggctgttgtcctgcaagcctccatcacattttgccaactaattgatacataactatgttttgtctgagtttctacagaaatataccttatttaatatatacagttgattcattaacattgaactcaggaccaactattctctgactcatgcctgaaaggtgcttgtctaacccacgtttattctatgcgaggcccatcacagttttcttatgctcaggaacagcagacagcacttcagcactctacttgagggctatttaaagcagcaaagtcacctgcaacgagcacaaaaatacgaaaagcatagcactaaatacactgtgaaagggcacttgtttacagtgtgagcagggccttgttcagccttagctggaacatgtgtgtcagacaattcagatttctcgctgctctgagcatgtctgcaactatccatgaaagcatcatgggtgttgattttgaggttacaaatcaattttagcaagcaggtgaatctgcaaatttggaatatgtgagtaacgaggacaaactgtagaattataattcccaccatttttcaccacgtctactgcatattagtttgctagggttgttgtagcaaaataccagaaactgggtagactcaacagcagaaatatactatgtcacagttctgaaggctagaagtccccaaagtgtccacaagattgattctttctgagggttctgagggaaaatctgttctgggactctcttctagcttctggtagcctcaagcagtccttggcttgttgaatgcattcttcttttgtctttgagggaggataagtaagattaggaggccctactgacttgcccccttgggaagcccggtgggcccctttctcagcaggctccacacctcttgcacccttgtgtgtcagcacctaactcttttgcaaggtaagcagtcctagaggatcccagcagactgccagattgttatacattcctaatacccagtacagcaaagagaacaaaagccccttattcctgatagagctttcccaatctccagccaatcagcactgaaagcccaggaaactattagctacaaattcctgccttgtgagagccaggggcttctctggggtcctgcatgtacacctaggctcttcaacaatttttgaagtttcatatttctataggaatttaccatttttagctaagttttcaaatgtgttagcacatagccctttgtaatctgcgccctgtccctcctgctttcctgcagctcctgcagcattgcaccattcctagccacaaccttaacagcatgcagggccccatggtctaggccccatcttgctgccttcctatctggtctccaggtttagctcatagtaacctttccctaattttaatagtaaaaagcacacccctaggtggagattttatatgctaatgatacatgcaatgtgtgttcaagcatgtagatattgagcgcattctccaactgcaggtccacctttgcatacttgacctcaccagtattttatgaatatgtccatacagctcccataaaacgaattcctcctaaggcactgctgtctctccctctgagcagcccgctctgcctcagagtatacttcggctttgcaataaacctcttcacctactcttactttggacttgctctcaaattcttttgtgtggcgaagtcaagaacatgaaccagtgcagcccattgaaaacatcttcacattatcttttctatattaaaggctctctctgtgtccaaatttcttctttttataaggacatagtcatattggattggggcctaccctaataacctcgtcttaacttcatctgcaaagactatttccaaataaggtcacgttcaccggtcctggggttataacgtcaacatcttttgggaggacacaactcaacccataatacactgctgccacctggttatgccaccatcatctcatctacattgttggaacagcttaactggtcttcctgcgtttactactggtccagtccccagaatcttcccaggacagcagctggagtgagcttttaaaactgtaagtcagatcttgtcacccctctgctccaaaacttcacagcatcccacatctcctggattaatgccaaagccattacaatagcctaccagaccccgtacaatttgcccactgcttctctaccctcgtcttctgctgcttatcttctccacatgccaccaagtttagccacaccggcttctttgctattcctagaacattcaagacatgcctgtacctaagaacatttgcatctgctatcccactacctggaagttttttccctcagatacccttatggtagcccacatacctccttcatgtcttcgctgtaatgtcaccttctcaggaaggcctttttttcttcccccaccctatttcatattgcaaccttctgcagtcctttctattccctttctctgttttatgtctttttcatagcatttatcaccctatgaaatatatatatatatatatatatatatatatatatatatatatataatttacttgtttactgtgtttattggctgtctacctaacaagaatgcaggcttcttgggataagaatctctgtcccttctatgcagtattatattctctgtgcctagaatagtccctggcatgtactaggtattccataaatatttcttgaatgaatgactgtatgaatgacagaatgagaattatataagactggatcttattcacattgtatctccatagtctagcataggcccaggcacatatcaattatatgttttctacaacaacaacaaaaaaatgatgactgagagctggaatagtatcagatcattatgatgaaaacaaaccaatgctctcaattcaaatcacatatggaggcactgcctgttttaccagagctttgcttatatgagactcttcttcccagtaaggtggagagaatatctgggtaggactgataaagagaaaagaaaaaaaaaatgtcttatcttacatagtgagcaatgtgacttaaagttatctgattagttactgtagcacattctttccctaaaacagcattttattttttggatgggggtatatttgcagtaagttagtgccaatgaagtacagcacaaatgtcagacatctgaaaagaacgaaagatgccatgtaacctgatgggaaatgtctgctcatttctcacggcctccgttcaaagtttctcttactgttttagtttccagtcagggttctcttgtttttttcccactcataccttcatttgctgcacttggttctggcttgtctcaataaattccccaggctgaacactgagagagaaaatagctctttaaagaatgaagatatgtgaaaaaaaaatgtaaagccttgaattaaagatgtcttagttaagcattttgctaagtttctgttcagaccaaacagacaaagctgggcttatattctggtttcagaaaagtgtgtgtgtgtgcatgtgcatgtgtgtgtgcatgcgtgtaactcaggaaatagcaaatagttcgaaacacatgttagcagttaatgtgctgattatgtgtacagaaggagctaagagaatagagagagacacttgtcctctatgactttgtgttttggtcaactcaactgtactttggcctcactggactttggaagtggtaatatttccataaatattgacactacagggaaggctagaagctaaattatgtagatgcagccttacccaagtcaggctatatagggaatttgaagattaaataaaagacttagactcttgaataaaaggtattatgtaaatatgattgctatttgtactgtttcacttgcactctgaaaatatactccctcgcaactcttaatatgcagttatgtgttacaatatttattgcaaatactagcattttctagcatttttcttggtctccctctattgcaatatgcatatcctcttttctttgaaattagttacttgcctttgagggtagatttgtcttaaaggacaataattacacctgtcacataactcctcagaagaagttttgataagagcctattttccagtcctagatattcagctgggttttggtgggcattataatgattgctttaaagcaaatattgttgattattctgtttagaaaacagagttctgggctttaaaaaataacagttgcatttgtgacttacttgaaccttacagttattttcaggaccatcgtgaatacactgtccatcaagtctgcttcctaacctcagccaatgtgttcagtacctcatgatacatgttattgaccctcattttctatttgcccagtcagcaagaaatatgcactcaatcactgcattgtgaatgagtagaaaggccaaatcttctgagtctaaattgatacgaccccagtctactctctatgtattttcaagtctttgatattgtttgctaagtgtgggattcctttctatagctggagaattctggagtccttatctagaatttatctttgcagtgcagttaattaagataattatcctagttatcagttacgaaccaacctcgcctatgtaccccttcttaaaaacaaaaaaataaagagacattaaaggaaactattaaaaaaaaattagaaaaaacagcacaacattagacatgggaggtcaccagagaagataggtcatggtatatgatgtctgattctgttcatgttagacagagcccatattaagtattctcacatactgttccctttctagaccatcaattttcaaagcaaggataaaaattatagtgtaagtacaagaacttacaagcagcccaagcatatgtcacagtttctgtggcctcaatcttatggtctctacttacagaataacagttggttcacatttaaagcctattgtatcctacaacctaatttttatttataaacaccaaatgattcttttttgtacttttcctttctacagcatattgaaagcaatcattagtggatggtaggagaggaaagagatgtaacaaggcctgaatgtatttttagttggtttccaaactttgttttaagcaaatacccttagtaattaagacttttttgggctttaaggccctttgccctctggtttttgttgcctcctggtttagggagcatctcacacttgttagtatctggttgttgggccagccatgcctcctcaagatcaggagccaggccaggcaggggccatgtgtgggcatgggagagcacaaagcagttcaggagcccagagtcagctattacaggatttttgctaagttttgggctgttggcagcatcctggacctcacgcctgggcctgaatgaggccctttcttaagagtctttgcaagttcgtgttttatttatggagtgacttatcccttccattcagagcagccccacccagccatcccagcctctgggctcttacgtcttcaaagcagacccacctggttggtctccatcctgtgttgggagctcagccaccatgttcatgggtaattttcctcataaagtttatatccagttatttatataactgttatgtcaacttgtttgtattgactattttgattataaaataaaatatcttggccaggcgtggtggctcacgcctgtaatcccagcactttgggaggctgaggtgggtggatcacgaggtcaagagataaagatcagcctggccagcatgatgaaaccccgtctctactaaaaatacaaaaattagctggatgtggtggcacgcacccatagtcccagctactcaggaggctgaggcaggaaaatcgcttgaacccaggaggtggatattgcagtgagctgagatcatgccactgcactccagcctgggcaacagagtgagactccatctcagaaaaatatatatcttaacagaaaaaaaaaatcatcaaatatgtgtctactcaaagttaactaaactcaaggttaaggacacagctctccacaagattggctcaattctgacaccagctgcaaatttgggagtcctcagggccaccctcacttctgaccagctgtctacaaatttggggttttctgtgaccccttttaggtttgataatccactagaatgactcacagaactcaagaaagcactacagttatgattacagttttgctataaaaaacatatacaaattagaaccagccggaaagatagataggcagggcaagatctgggagtgttccagagcagaagcttctgatgtcctcagagacattaccctaatggcacatggctgcatgacaatatgcatagtattgacaacgagggaagtttccccaagctctagtgtccagagaggttttattggaggttcattacataggcatgactgatcgaatccttgcccaaatggttgaactcaatttccaatgcatcttctctccttggaagtggaactgatgccacctggctcaaagtcccaaccatctcatcatgtctttggtcttcctaacatggccggcttccatcctgagtcatcacattagcataaaccatcaaatatgctctatggggcccaccttgaagaacaaagacactccaatcacttgggaaactccatgggttgaaagattacctctcaagaaccagaaacaaaggtcagccaaattctttatcacacaatgtttattacacaataataaacaaattattatttatctatgaatagtaatcacataccactatgtccgtctacagtgcacattagaaaacactcacagaaaactagatgttaaaaaaaggataagttggccaggtgtggtggctcacacctgtaatcctagcattttgagaggccgaggcaggtggatcacctgaggtcaggagttcgagaccagccaggccaacatggagaaaccccgtctctactaaaaatacaaaaattagcatggtgtggtagcaggtgcctgtaatcccagctactcaggaggctgagtcagaagaattgcttgaactgggaggcagaggttgcagtgagctgagaaagcaccactgcactccatcctggacaacacagcgagactccgtctaaaaaaaaaaaaaaaggataagttaaagatagagtttttaatattgttttccagcacccttgtataaaaccagtggaaaattctccagataccccgtaaagctgacaaaaaatggtgcacaccaactgaagccatgcctacctgtctcccctggccctctcaatacttttattggcatctcactttccccttgacattccttccttcttttgcccttattggctccccaaattttgcttttcaaatcagtggcttcattgccactgaagttaaacgtagtgctaaggccagtatgacagggtcgtttttatatagccctcatcaaaacacccatgtcaaaatgttctttttttattagtaagaaatagagcaacaaatattttgacctcctattctgtccataaccttatctctgatcaaattcctctggtcagctttaggccctctctgaatttcacagtatttgatcctaatcatgacgtttttgatagatttgctgcctggtattcaaggagttaagtataataaaaactagctgtgctctccaccccaaacccagcacttcctaattgcatatcaaatatctaagcaacttgaaaacatagatgctttgttatcatttaaattatttccttatcattctgttttttataaactgtgaattttaaatatgtatatcaatatggtaatttatgtaaatctttgccttcatattttctactgtggaaatgagtgctttctgaattgacagagcagagttttacatcctatgaccctataaaatgcatcaaaaagtaccaaatatgatttcatttatgtagcagataagacagcttcttgtaggaaaaatttccttaagctgggaggaaaatttctttttttaattttttttaattccctcaatttaaagccaacaaagatagggatacgggagggaatgaaaaaggcagaaagaaaggagtgcatgttacagcagagttcttaattaaagctccattttgagaaggaaaagtggcaccaggctggggactctgagtctgatgaggagagctgagaatgctttgcctcaaagttagagaaatctgtcagacccaaatactgtgcaaccttggaaatttgacagtacttaacttttctcagccttaattgaccatcttaaaaatgagaaaagaattcctaacttacaaggtggccatgaggaaaagaggagaaaaatctaatgtacctggcatcatggggtaggcactgttttttgtttttgtttttgttttaagatactagttctcaatccagaccatatattagagtctcctggagatcttttaaaggcatatttatcttctatgccaattcagtcacaatctctgccattgtgaccccagcatcaggatttttttttattattatcatactttaagttctgggatacatgtgcagaatgtgcaggtttgttacataggtatacatgtgctatggtggtttgctgcacccatcaacccatcatctaggttttaagccctcatgcttatggtatttgtcctaatgctctccctcccccttggcccccagctcccgacaggccccagtgtgtgatgttcccctccctgtgtccgtgtgttctcatcattcaactcccacttgtgagtgagaacatgcagtatttgattgtctgttcctgtgttcatttgctgagaatgatagtttctagcttcatccatgtccctgcaaaggacacagcatcaggatttttaaaaaatctctccaagtggattgcaatgtgaggtcacattgaaaaatgagaacttttcccaaagtaattttttggtcacatattattggaattgaactttcatgtcgagtgttaataaaacattcttggaaaatacacaaatagatcttatatagcttcctaacctttcatatagctgtattttcagaactattttcttatgcccttacctctatggccaatacattaaaatttggactggatcttaatgttaattgtttaccagtgtgttttcagaaattttgtgactcagatagacacatggcatagagtctgtgtatggatcaggaattcaaactgaagtgtttgggccaaaaggattcatataacaagtcctggtcatgtacaaggacaagatctgcagtggaaccagctgctttctgaggcaggggtttgttgtagacattgtctcaagatgagaaagacagacgtcaactcatgggttgaatcaagtagtgtcccctggaagaaataacaaatgcaatgatgagaagttgtttctatcaaagatttctcatcagtgctgcctctgcaaaggttcctgggaccccttgactatcttattaatggaagtagacaaggaaggactgatagggagaaggcttctgcatgcctggggtaaatatatctgcaaacatgcagtcatcgtcacacgattcatcggcagtgtatgacatctccagctaattcagtctaggacaccttctcatgagcatgaacagcaactggagaggtcttttgaaaagaaaccgcagtgcatatgtgccccactgctggcttcatttttctctctgatgacataactgcgtagaaaagaggcaaggccatagtttctgaactttgaaagcttctgaattggcacaggggaatggtcatgtttgtggtttttcaaatattatgttttttaaaaaacatggatatgaagtccacagtatgttgaagatagcatacaaggttctgttatgtttctctggagaacaacaacaacaacaacaaaagattctattcaaccaacaagggatttgtttatttgtttgcttgcaattgaagggtttttccacggcaatcactgtgaaagacgtcaaaatgaattatatcctattctctccgatttcagtttttttcaggggaaataagacacgtagtgccctggtcaccaggccattattggggaatcaacctttgtccctaggattgcctttttggcctatctctcagtccttgcctttcctctctgccttccttgttgccaggactttcatgtcaccctctgatttttaaagcccccattccccgagaccaactgttcagaaagtagatgggggccgggcgcggtggctcacgcctgtaatccaagcactttgggaggccaagacgggtggatcacaaggtcaggagatcgagaccatcctggctaacacggtgaaaccccatctctactaaaaatacaaaaaaattagccgggcatagtggcgggtgcctgtggtcccagctacttgggaggctgaggcaggagaatggtgtgaacccgggaggcagagcttgcattgagccgattgcaccactgcactccagcctgggctgagcgagactctgcttcaaaaaaaaaaaaaaaaaaaaaaaaaaagaaagtagatggggtataataagcccaagtacctttcttcattctgacccaccagaccacaagctgttattcaaatgcatggtgctccctgatacttccattcttccatcagaacaaagggctcctttccttactgccggtctctatagtcctccttgtcccctaaagctcacctcagacacatctccttgataatgagagtaaagtcctggcggaggccagccacgaggcaggtatttattaaatgttagttatctttccttctttctgatctcctggccaggatcaattgcctcttcagggctccctcagcactgtcccttatatatcttacaagcacttattatattctaccttgtattaccaatgtttactttttcctttattgtactttgctgtaaagttcttgatagttgaatatgaaataaatttatcctcatatttcccaaggatatttcaaagaaccttatacttaggcacttaattaatattcagttgacaaatgaatgaatgaatgaggaaaatgcccaagcccaatcttatcctacataaatacccctcctacagggttttcttcttatctaaacagtcccttttagctgactgctttgatactttccagagactaatcaaattaagacaattcacagaatgtgtaagttgataatttatttgataaagtagatgggaacatttgctctttcaaaggagttttatatcctcaaagtaatctccaatttctgtaggattgatgatgaatataaacagaagggtctttttgttcctttgctgaagcaaaggaaactacctctcactccaggcaaaatcaagagcctccctgtaactagtctgtgagggagccaacattgtcctgtgcattatcaggcagtctacactttttatcacctttccaaagagctctaccagtacttggggcttcaggacaacaaagaacatcactcaggggagagagaatgggtgatatgctgaataatttgactgagaatgaggcagcagctaacggagagggtcttgcacatatatgcacacacacgtagccatccttataatattctagagaactacatgtgggagcttgagcttaacattaaggactttgatttatgacttctcattaacagccactacacatcgatgtgattcggctccatcttgcataataattaactcatccataaagtgcatgtttgacagctagactggaaagcagtatttatttcatgctactgctgcagctgcagagagaattcacatgatttttctaaaatcaatctcatgtgtatctttctgaaataggaaacagtttcacaaagttgttttgcaaatcaaatgtggtgacatattctgaaaatgtttaaagctgaaacaccttgcaaatgtaaagatatttattattttaataactactgttgatattttattgattcatatttctagataagaaaattgtttgattggttccttgagcttgatagctaagttgtccatcaggagacacatcccaaagctagctagaaggctgtggaaactaggactgaagcaacagacttttaacattcttaattattttgccagaaacttttaagttctctcattcctctcaggaattaaaacataccctgaatacagacagcttttactgatccagaaccaacaacaaaatcttctggttttttttctaacattatttctgaccaaatctctttttaatacagtttttaaacaacaataaacatagattatgataatatttgaaggatctttaatagatcttttagtaaggttgctagatatagcaaataaaactataaactgtccagttaaatgttaatttcagatgaatgatgaataaatttttggtataagtttcccatgctatatgtgggacatatactaaaaattatttatatttcatctaaaattcagatgtaatactgagtgtcctctattttatttggttatcctactttttaggatgtacgcaaccggagaatagtagaacatttgtgaaagcactcacattctaacatttctccgttaaacttccctttcacttctttctaccatctgcctctttccttttctgcaggtcacagatggtaaccaaaaacatgctattatttagtcaaaatatttattatttctggcaaaagcaagtgagcttccaaaggctgtggtgagaaactcttacaaagaaaattgcacaatatggattcattgctatctataccagggcgccaaaccacctatattattattattctttctgtctctctctctggagatatgattttatatatatatgttatatatatgtaatatattgtaaatattcagtcaatatttattttccataacagcaaggattacaattaagaccttaaaataaggggaaaaatacctggggtttaaatgattctaaacgagattttatattgcctttgcccaatccccttccttattaaataaacactttgattcttttaggcatttaaatagtacatttagagtcgtctttggggaaaagaaaaaagagtctatgctgttgctgcaggtggccatgaagagatctgctgtatgaatggcagaatgtaataataataacaaaatgtgtgtctgggaggtggagaacctttctgctatcttttttattcccatcctcaatacttgttgttcatatagtggaaatgaaagaattcttaaaaggcacataagccattccacattacccagaaagaatttcaaggggggggaaatgatctatcaatctagagaaaatacaggcaaaacacaagaacaagagagataacttaccctttaaagcttaaaactgtgcgtattttctcattgtgtttatccttgatattttaattatgtacctgcctttgtgtctttctttccactaggctgaaaattctcatgaggtcataagaaccttggctcatttttgtttgttgctattgtctagcatattccctgattcattgtgcatgcagtaattatctcaaaaagtctgagaaccattgctgtaaaatagaatataattgaattgggagataaaactactcaactctttaatctggggaagaatcatacctctaatttcattggcttgcttgtagctccaaccttatatttcttgaagtcccatgggtgtgtgtgtgtgtgtgcatgcatgtatgtacatgcgtatctcccttccagaaatgaaatatatacatatgaaataatatgtcctagatattcctttaggaagaatttagaacaaagtataggaaatcattatgaggtagagatgtctaactgtccatcaagtttatgctccttcttctataacatagttactgggaagtggttgcagtcagtggctacatttctcagcttctcttgcacataggtaggccatgggattagttctcaccaacaatgccagccaaagtaagtatgccattatttccagaccatggcagttaagaagtgaatttgctttctccatccctgttttcctctttaatgagcttggtgcagaatgaggccatatagtaaagacagtagagccagaaaattgaaaaaaaccttgagttctagaatcacccctgaaaagagagcctcccccaatgccatcaaacataaacattaatttgggacactatgtacacaaggagtaaacttctatcatgcccttactcctaatatattttatgagtagaattgtactttgcacctattcccttttcttctattgtctaatctccagaagcagtagtttagactatgtattcttatagtctgcccttcaccatctttctttcatagtgtttagaaaagtcctaatattaagaaattgtgatttttaaaaaaatttcaatgtggttggttctgtgtgaattttattttcacttaacatttatctaatatccattatgtggagcacacattctgctaggccttgggaatgaaaattgattagctgatgaattcacaaaagaaaaagacatataaaggataaattacaagagaatgcaataaaaatgttaacaatatgaatatgtctgtaggagcaaggagagaatattgttgtctttacttgaagcagaagataaagccttcacagggaaggtgacattgagttaggtcttacaggataaatatggggtttgtcaaaggatatgaataactgtttacaatttttaaatatttgtacaaagaagatagaatattacttttaatataaatgtaatggtttgtcatattaaaatttgtcatattcatcaaaataactttccattgtttcagccttttgctgaataaagttttcagttattaactttgttattaatttttttgtttcaataaccatgctttagccttgcagctattttagtaaaacaaacaacaacaacaaaacatgatctaaatcacatcctaatttttattaagtttgagaatgtttttgaaaaatcattctttagtctatccagaatttatggttgtatgtgattacaaataaaccagtatttatttagagcatgagatgtcattcattattaatttatgtgttagccatttcttttttatctattattctatttcatactgtattataatttattaaatgtatagtatatttgttttcatcattctagtcttctatttttaacctgtatcaaacaattttgaaactagtgttttataatatattttgctatattacagggcaatctccttagtcttagtcttccctctgactcttctcaactaatacagtgttcactttggcaagggaccaattctcaacagccagaagtttaaaaacaaataaaataaacaagaaggatttgagaggttttaaaaataagacaatagtaagatatatggttggtacttcttatttgctattgtgagtgcttcaagggcagctatctcatttttcttcttaattctctttaagattttggaaaataaatgcatgatatatgtgttgaattgaatcattgcctggccttggcccatttctttgagtggcagtaactctgcttaagaatcagctgaggaagagttgcattcagccactgtttaaaatagatatagaaactctaagaaatagtcattagaaaacattgaaactcttagattgataaggttttgaaatagaagaaaagaaattaggtctctgactctcttgaaaactattgagtataagatttcactctagattctttctatatatgtagaaatgattcccctagtcaatagagttgtattaatcagattgcaaatgtttcactttttaccttatgttgtttattgtaattcatttcttcattttaaaagaaggatgtgccatcatgtattttctttccttccttccttccttgcttccttccttcctccctccctcatttccttccttccttccttttattcattttgagatggagccttgctctgttagccaggctggaatgcagtggcgtgatcttgggtctctgcaacctccacctcccgggttcaagagattctcatgccgcagcctccagagtagctgggactacaggtgcccgtcaccacacccagctaatttttgtattttagtggagacggagtttcaccacgttggccaggctggtctcgaactccaggcctcaagtgatccactcggctcagcctcccaaagtgctgggattacaggcatgagccaccgtgcccggacccgtcatatattattcttgaccatttactctgtttttacatctgctactacaaccatgcataaccaagaaaaaataaagatttgaatcatagttatcgcagttgagacagaaatccaaaggtagaattgagaagtattgtttttgttcactgccatgtctccagtaccagagcagtgcttgatgacacatagtaggcacttagtaaacatttgtcaagtgatcgaagttgagtcaagcatgagtcacagccagcagagcagctcactgaggagcaatcatgggtctaagtcagggaggctgagaggaagtcagaaagcagattatagatagattagggtcaaaggcttggacggaagccatgaacatgatatgtgaaggagagggagatagactccttggctttataaagactggcaggataacatctgcacattggatacaaagaatatttgtgatttctattgtcatatggctaaagtccattttttgaaagtacattgacatcataaaataactgtttagtggtaacgacttctagtcatgttagtcatattacttgaatgaagagtatattttgactgagctgactttttatttgataaaatatttcactgtttttcagaatgctgaattaaatctgctgtttcagtagttttaaataaagttgtgaattaatgacttaaatgtaggtcagagaattgttgattttccttcatttgaagcctctcaaacactgcctttaaagctatacataaaaaagcaagggcagagttcagcccaatacagaatgcaagtggatacagaaatcaacttttcagactcagtaggatttttttctgacttggggagataaatgaatatagaattccagacttgcctaaactgttaacaaaattattacagagatgcaaaaaaaaattattctttaacttatactatggcacataagctaaattcaagataactacatactgaaatcacttcttgaaactatttagtaattttcaatttcctgaactctgtaactatttggcaacaaatctgttgactaagcagtatcccctaccagaagaaatattggccctaattcacaaaatactacttctataatttaatgatagaactgcaattcagtgcttggaaaagaccaagctatcagcccctaattatatataagggatttaggaatacagccaaccatgaaaactcccagcaagactgtgtcccaaaggaacatccttgaaaacaaattctaggattgctttgggcagaatagattaagaactacagtacggaaagcttattgagtcaatgacagaaaaaaaaaaaaatctgcaaagagaaagacatattccgtgttaaacatttgaataagttcatcttgaactctttagggttcaaggttttgtggtgtattatcagtgatttgagtcaatggaaattcttaatagttggcctttttgcttgattaaaaatgacaatctgattgctgatggactttctccagctattaagtgaagtaccaaataaatagatattgcaactttgggggaattatagagatctgaatttcctttactttgctcaattttattacttttcatctactacctaaaatgcagattttttcatcagtttaaaatagagtatgctatttgaataatgtaatcatatgctagcttgcctaaaggattaaattatggaaattcactcccaatctcaaaatagttattgatgatctaactacttgtaatgaattaggcttatgactgctttatgacagttggaatgagagccattctttcaggatcccaggcagggtcaattttagcagagaccttaaagaatgaaaaggaattattaaaaaaaaaaatctacattgctatcagaaaaatggttaataggatgttttgagcctgtttaaacttcctccaagattcataaatattcattgaatcaattagttatttgaagcttaatgttttgctgctgaatgaaaataattatctgctaaggtgggtgtcctgtctggagcctgcatttatttttaaatgtgtcgaggaaattaatggggattatcagcttgatctttctctatgtagaggcattatttagctgaattaactttctctgaccccccaaaaccaagagatctcaatgagatatatgctgtttccttattcccaaatcatagatcttaagaagcagttatttcttaaaagtaaattttaagaaatgccaagtaaatccccctcatttataaatacataagtaacccctcagttatccagaatctggacttctaaaacttccagtttccctgaacttgatcgagaagtaatcctgcaccataatctacctccctcaattatagtagtctttcgagtcaaaaagaaactccggagcatcgggaaaggtcagcgttaaggaggaggagaggccaactggaaagaaatgcttgcagttagttgcacagctgtcttcacaggaagaggagggaaaggagagcccccacctaccagccctgtccatgaaagatacaaaggcaagtagcatgggagaagttacaagagacaagaacagaaccaagggaatggcagacaagcagcagttctataggctggtggtgtctgggatgaaatggctgtctcagggcagacgggacagttgtatacaaggagacctggaggcaagaaccatttaggctgcagtgggacccttgccttctaatgtctccaaacagtagccctttaaatattgcaacttgtaaaggtttaattttctgtgttgaggggaagggaagaataattgcttgccaacattagtgggccaagacgtgtcagatgctgctttcagcttggggtcggggggttggaagtcggagacagcaataggtggaagtgggagattcttctatttgagaggggagagaagtgtacatacattttagaaagctttccatcacaaaagggttaaattttggcacttacagggttagccctcatttctgttatgtgaagtgaactgtataattcactgtctctctccctggttgagacttgtgctttacaacacaattattatactgcctatgtcattaacaaaggtcttgtggaaactgtcactaaataatgtatgtaaccaaaacaatataatgattgtggtctggatatcattgtcggaagggcacgctccttactttggggctgagtcttgtttttgtttctagttcagcctttcctaacccaggtagcttgcatatattaggcattaggtaaatgcttgccaaaatgaaaagaggtcaaggtcagcgtcatactcagcgtgaatatggatacagcccagggccagtttagtaaggaggacaggaagagaggtaacttttgcctttgggaggcaacatccactccccaacacactgaaagtgcgaattacccagttacccagttaccgcagaccaagtatagacaggacaaaaactcatacaactataccagccacaaagaaccacagcaccaaagaggaaccacaaacaaatgtttatatcatgcgcaatctcttcatactttatgctttcttgaaataaagaaaactgaggcacaaaaaagagtaacaaattgtatttgcacacagcatcctatctaccatttattaactgcaaacgcccttgtgaccacctccacggcttcagcatcgtccagagagctacatctaaatctccttattctcctttttttttttcttctgcacaaatcaataaagccttttctgtcagccccaggtaaattccaattccaagcaacttgggcaaggaaacaaacaagtgaaaaaaaaaatcacattggctttaagatgctaaatttaagacatgcagttggagctgacagctgacaggttatcaaccagaaatcattctctgatcacttattcaacaactccaaaagaattgcagccacatgaggcttgtaacgaagagggctgtatttccaaggaggataacagaagggcacatgtggaatgtggataatttccagaagatactgagagacagtgctggtttctgacttcttattctagggcaatgccttttgatgtcctgattcaatgccgttgtaagcctgaactaatctgatgtaataaaagcttaattgtctacttgcaattatcatttccctttaatctggtgatctgtttttatttgacatagattgctgttctttagagtgggatacactttgtgtaatgtgtattgtgaaatggtgttcatattttgggtaccattataaactgtaagtcacgcctgataatctcatgtctgaatactgaagtgagtgtacctccataggctactgcaagagagtactaggggctagacaagactacacatcaggactcggggcaggcaggaccaggcaagggtggctgatggcatctgcaagactgcagcactggaggaggggaatggctgctgccagggcttgtactgcggaaagaaacctgtttctccttaatgatggtgttgtccaggcaggggcaggtcagagtctctctcattctaaaaatgcccactgggcagcattttggatcccaaagaactggtaagtgtggggactgctgagtactaggcaatagtttgcaaacttttacattatcactgactttattctactctcacctttgaatttaaaccaatttttaagtatgcaaaagaagacagtttaaaaaaatttccatgcaaattaacatcacattcttaaacagatgaaatattaaaactcatacaagtatttttaatgaaataatttttatttgctgtgattatacatattgacatttgcacactttttaaaactttttatttggaaaaaatttaaattttatagataagttgcaaatataaaaagagtgtaaagaatacccatacacccttttcccagaaagacttattgttagcatttcacacaattggctttttggtttctttctttccccacccacctcaccccatggttctctctctccatacatgttacatacacataattatatacttaatttttttcttaataaattgaaggtgtcacatacatgatggccctttacgccaaacatcagtgcatatttcctaagaatgtagatattctcttacttagccccagtagttatatatatatatatataacatatatatgttatatatatatataacatatatatataactactatataacatatatatatatatatatatatatgtatgttaattttactttaagttctggggtacatgtgcagaacgtgcaggtttgttgcatagctatacgtgtgccatgatggtttgctccacctattaacccatcaactaagttccctcccctggccccccaccccccaacaggcactggtgtgttgttcccctccctgtgtccatgtgttctcattgttcaactcccacttatgagtgagaacatcatattttgggtaccattataaactgtaagtcacgcctgataatctcatgtctgaatacccaaatatgtgatgtttggttttctgttcctgtgttagtttgctgaggatgatggcttccagcttctccatgttcctgcaaaggacatgatctcattcctttttatggctgcacagtattccatggtgtatatttgcaacattttctttatccagtttatcattgatgggcatttgggttggctccatgtctttgctattgtaaatagtcctgcaataaacatatgtgtgcatgtgtctttatagtagagtgatttgtaatcctttgggtatatacccagtaatgggattgctgggtcagatggtatttctgattctagatccttgaggaatcaccacactgtcttcagcaatggttgaactaatttacactcccaccaacagtgtaaaagtgttcctgtttctccaccacctcaccagcatctattgtttcttgactttttaataatcgccattctgactggcatgaaatggtatctcattgtggttttgatttgcatttctccaacttcaatatatttaacattgatagaatacttttttcttatctacctttcatacatcagtattgtcatttgatccagtaatgttctttatagcattttcctctgtggtacaggatccagtctgtcatcaggtatagcatttaagtgccatgtctctttacccactttcaatagggaatacttctacaacctttctttttattttctgacattgacttttttttctgacattgacattttggaagaatggattactgccacacccgcccccaacttttttttaatgaaacatttcccgtttggggttttttagatagcctttcgtgatcactttcaagttatgcattcttctttggaatgttgcataggagatgttgtgtccttctcaggctatcacatctgaaagcacatcacgtccatctgtccttcattggtgatgttaactttaatcagccatacaagtgttttctgatttccctactaggtaattattgtataatttttttcccctgcaactaataaatagtctgaaagagacagtttaaaacatgctagtatctagtttctcatcaagatttccctctagatttagcatccattgatgaatcttgcctgatctgatctttaataaaacagttgcaatattatgatgttccagtgtcagcactctcttcacatctgccatcagctctcagaattctacttcaagcaaaagctcccctacttatttgtttttgttgttgttgttgttttgttttgttttgttttgtttttgagacggagtctcgctctgtcgcccaggctggagtgcagtggtgcgatctcagctcactgcaagctccacctcccgggttcacgccattctcctgcctcagcctcccaagtagctgggactacaggtgcccaccaccacgcccggctaattttttgtattttttttagtagagatggggtttcaccgtgttagtcaggatggtcttgatctcctgaccttgtgatccgcctgcctcagcctcccgaagtgctgggattacagacgtgagccacggtgcccggcctttatttgtttattattgatatagacctataaattttttccaatagtttataattggaaataaaattttaattaaatggtttatttactcatttatttagtgaatatttattgaatacttacaatatgccacatactctattctggtgatacaactgtgggcaaaacagatgtaacctgtttttcctcatatatatagacatattgtttatgtgttatgtacagagatttgaggactagagtctaaaagaatattttttaatacgcatgttaaacccttaattcatttcttcaatagatctgtcaaacactggtgtgttgagaaccgttctggaaactgagagcacaaacagggtccctatccttagggaatttgcaatcaaatggggaagataataaagaaataaatacactatcagaagaattgcaggttttgaaaggtgttttaaaaggaaaaaagtaaacataaacaccagagctaagataaaggatgacgaccaaagtaacatagaggccagtgattactaaagtaaaatgaaatctggaaggatcacttcatcgtgatctctcatgaatgtttgagtggtgcttcactgggtaaatgttccttggacttttttttttttggatacttttccatggtccttgaccagttggtttccagcagcctcataactaggcacatgtctgctgttgccacctgcatggatccagcctttagatttgacatttccaaaccagtgaccacctatcagtaacttctgcaccaggatacaaatgataacatagccaaatcaaaccgctttatactaaatattacctccctccaacattcaacaaatatttcataaaaatgcactgtgtcccaggacactggaatacctgtcattggaatgtacatttcagtgaaggatacaaacaagtaattaggcaagatactgtagtcagtgtaatcacagtggttagtacagggtcctgagggagattatagaaggagtttctaacccagatgtggtggggttggggcaagtggacagaaagcctttctggagttgcagctgatacttaaagagaaatgtaagttagccagagaccccaagctgttccctgcatccaggtgcatgcaataggtgcaacgtcacaaggaagttaggcacatatacctggatcccctagttcaccactgtctgcctccccagtgtctggcacataatttacactcagtgaatattttggaacaagtgagtaggtacatgccaaagagacattttgtcctcggaagagaagataaccatgataaaatttaatatcaaattctttataacatgtaatgtatgagattatttctgtcctatcaagtttgcattcatactgtagctttaattacatattagaaaggaggatggagtggttttcgaatctgctagtattaaaacatttttgctgatgcctttaactagatgagttgtaaagcacattatttatacctggaagaactggcttctcttacccatttaatttttccaattaactgaaagccaggttgacttggctttggttcactctgtggtcaaaatttagcatcatgggtattgattaattagtgatgagtcatttggcctataagagcataaactacctgatggcaaatttacaggacgaaaattaggccacagagtaagtgttgttcttcgttactaaaaatgaaactaaaaatgtcactgccgaagtggaactaacaggagcaacagagagaatcaagccaagtgttctttccttcctctcctgtctccctgacctagataagaaaccttacccaatcctaactcctagttccgtccacccttatttgagaccctcccactaagggaccattgccattcactagatcatgatgggtatgacccagtgaatggcaacataatgcataggataaatgtgcaatggattttttttttgtccatcagatttgggtgtttgtttgtatgaaaaatttagcctcttacttgttgtctaccatgaccatatagaaaagtcatgaaagttttggaatatgagctcccggatggaatgtgagaatatgagttctgaagttagatgcctgcattcatttcccaacaccactacttaatgatttggatgcatcagattcttcactgtaaaatgggaagtttaaaagtgcctacaccataggattgttgtgagaattaagcaagcccatctatgtaaaggacttagcatggcggctcactgtaagcctcatttaggcatcatgatgctcaaaaaagggatcaccaaaacacttaactgaatatcaccccaaaatcaagtgccaattcatgtaagcagttggtattaaacaactagtctgttctttcttcttgtctgatgtttaggacctagaatatcttatatgatcagctaatgtactctgataaaaatgaaaaatactgattattgagaaagtgtttttgagagcccatgatggtcagatctctgtgctaaatgctatggtgcacttgaaaacaacttcatttctgcctccaaggaacttacagtctagttaatggagacatgtcaggaacacgtgtgtctaaaaacatcagtcatcagtacaggaggtcaaatgattagcactgtaggcagtggagtctatttgctgatggcaagacttccagttaaatagataacgagcatcacttaaacattttaatttcccaaaggaagacaatatttgtgcattttaaatgcagtttatagaacatgagttatatatgatcacattccttctctctctctctctctccctctctctctctctcacacacacacacacacacacacacagcacaaaccatttagaagaccatataccacattgtttactgtggatatctctgacaaaagcattggaactgcaaatggaaggctacttttcacattttattcttcagtcttttgtattgattgaatttttttacaattaaatcagaaaaaacaatggaattatttattttagtaaaatatattgaagataattccctgagaaagctaaattcatcttctattaatgactttttacctgatagttatataatgtgttctttctttacaaataaaaattatacaattaataaaagtaagcatttgctatcccacaaatattttttaaatttaatttgggggtaacaaacattttaaatacattatgttactggttctgaaaaatctaggtcaacttctaggatcttgtttgatgtaagaatttgaactgtttccaaggtaaccaatcatatctctagaaagcttagctaagcttgtatctcttcattttgaatgctcagctctttttatgtcctcctggaaaccctgaactttgacatacacacacatacccacacacatgtacacactcactccagactttgcttgccttccatcagggacacaaggtacaacaaaaccaaataaatgctcattgatttttaagttgtttaatgcagctgtttcattatcttttctgtctttatatactgtaagtgatgacagtcaaatgttgtgtgactattcataaaagaaagcatattaattttgtatgaattcccaggtacctgctcttcaatttatgatcattcttttctctttattttatttttctctagcatagatatgaagcccaagaatatgtcaataatgtttagtaaaataatattaaattttttcacttaatttgctagtatggcattgactaatagaaacatcatctgagccacatatgttatttttggttccctagcagccacatttagaagcaaaaaaaaaaaaaataggtaaaattaaatgtattttatttaactcagtttatctaaaaagctatcatttcaacatataatcaatataaaaattaatgagctacttttttgtactaagtcttcaatatctggtgtgtactttatatgtgcagcacattgcaatttggacaaatcatggtgcaaacccttaggagccatgagtggctgaaggtgaccatattggacagtgaagatctagacaatggttgttacttcctgttagtatcatctcgtcagtgggatatttaaagacgtagtgtattattttgcaggattttcttttcttcctgaaatttaattaataacatattaaattgggcctggtgctgtggctcacacctgtaatcccagcattctgggaggccgaggcaagtggatcacctgaggtcaggagttcaaaactagcctggccaacatggagaaaccccatctctactaaaaatacaaaaattagctgggcgtcgtggctggtgcctgtaatcccagctacttgggaagctgaggcagaagaatcctttgaacctgggaggcagaggttacagtgagctgacagcgccattgccctccagcctgggcgacaagagtgaaactccgtctcaaaaatataaataaataacttattaaattgacttgcttaattgaaaatattttattttcacttttcataggtgtccatttatcctttttacagagttttcctactaataactagccatctgaggaaactacaatatgttttttactcaatatttcctaaaagataattttcggaaaaaggtaaaatcatgactctcatacaaatataaaatgaatatatgttacagaattttctttactcgtgatatgagagaactaggtagctgttataaccggttcaaaagaaaagtcaaaacagtataaatttacatggagtagagcaatgttgagatgaattccaaatgggaacaaaacttttttctacaagagggaaaaagtaaattaaattacaaccaggtaaggcagaacttacagagctaccagttacctacaacttacaatgaattacaaaatagctcaaaaacagtgagtagagctagaatcctataatccaaaagggtatactatatatgatgcatggttttccattggaacacaaaatattttgtacataatctgataatcaatttagagccatataagcatctagtttaagctttgtcccagaattttagagtaatcatgggcaggtcagagagattatgcttcatgtctgctgataaaccaaggagtggtattacatgttctctaagcttctttccagtaatatgactttttaaaaggaagatctccaaaaatgctttttatctgaacacttttccccatggatatacagagagtaagcagagaaggtcccattcagaaatcagtctccctacactgagtgagtagatctggttcttctgaggcagtctcctcacctgctgatgatgtcatcaaatgcacattataaaagtttgcatgttgtcaaaaggaaacaggatgaccaagttctcacacatcctagtgcttaccactctttccactcccagaaaagaagcagttcccccttccctggtttgcaagatagatatataataaaatttgccttccccacaacttagaaaagaaaagcatggtgatttagagtaagaaagttatttactttcactctagcaaagcagaaaaggtaatagagtgatatggatattataacacagagagaatggctgatggcatcataataggatgcactggactattgagaaattccttgcaggagagggtgatatatagaagggcaatggattagaagtcaggatctcagggtctgcacccacttctgggaagcctttcaacttgtcctaaatgaaggttatcatgttcttctcattgaataaggtttacttttaattattttctttaaaaaatagaagaaaaacattcaggtagcataaaacaagcctaatttggtatcatatatcaaattttgatatctttttgtggaactcaacacacgaatctgtgctgtaaggatgcagaagtacagtatcaaacttcagagagggggacaatttcagttactcttttatcctgaggtctacatgcgtcacctttgtgtaaatttaaaaagactaacctgagcatgtttcttaatctagcctccattccttgtgcccacggctatggcctttaaatcctaatgcatgacgatgtactcagctgggccaagacatttagaaagcagtatgaacagtgctttgttctagaggcaaggaacccacatgatcacttgtgcaattcccagtcctctgtttgggaggtaactactggaagccacctgaggactttctttcttcagaatgagtggttctgactcactgagagacacttcactgccagtccacaagccattttcaattaagcaaataatgtagtatccagaatactctctaacatttaatgttgaagattcacttagactaggaaaatcttcagttaaaaggcagaaacttctcactttaaatgagcataaaatttagtttgtcaattttgatagcactcactataaaatagcagttctattggactgctctcttggttaaaaaaaaatctgccgataataacttggcacatttgagctatttttgcttccacacctgaggcgagtagcttatatctgaagccatcaatttgtatactttcacgaagaactgaactattttcatgaactggttacatcaatgatctttattctcataataccacctcctgttatctattatgatctttcttataacagaaggaaacattaaggagaatactggccttaagacttttttttgcatgcatatgatagttattattttcaggcacttgcttttttaaaagactgatgtatttgtgaaatatatcttaatattctattgtctttcttcaaaactgtcaagaaaatcaactagaaagcaggaaacttcttacaaaaaattaaaaatagaaacagaatcagatcgaacaactgaggatcatgcattgcttgggaaaagtaaggttaataattaatatacccctaactttctagccagcacctcctgctcccaaggtgaggacaggcccagagtcccattgtgcctttggtagtctaaatcaattaaaaattgagctatgactggcccagttttttccattttcacctccctcagcttacattttcttttgacttgctttatgacagataagagaagaaacagtcatgtaatgagtccttaccacaagacttatctttcttttctctatttaattctgttgcctatttatgaaaataaaactcgctcattttagaaatgtaacaaacgcatcatgtgtaaagaggaaagtccaaatactcctaatctaaccaccatcaatatttgctgtgcaaccttccactcctctttttataagtaaatatataatcacatgtgaatggaatcatattaagcatattgttttgtaaccttatattgttatgaaagttatatcatggaaatgtttccatgtcaatatagtcatacatcatccttttaatggacataaaatattccactgtgtggatgcatcatccatcatttatctaatccgtcacattgatatatgatatcaagacataatatggtgatatggtttggatttgtgtccccgcccaaatttcatgtcaaattataatccccagagttacaggaggggcctggtgggaggtgattggatcatgggggcagatttcctcttgctgttctcatgagagcgagtgagttctcgtgagatctggttgtttaaaagtgtgtagcacctccccctgcccactcttcttcctcctgctccggccacgtaagatgtgcctccttccttttcaccttctgccataattatgcatttcctccgcatgatgctccccagccatgcttgctgtatggcttgtggaactgtgagtcaattaaacctctttacaaattacccagtttcaggtaattctttttttttttttttttgagatgtagtctcgctctgtcacccaggctggagtgcagtggcacgatctcacctcactgcaacctccacctcccagctttaagcaattctctgcctcagcctccagagtagctgggattacaggcgtgtgccaccacattcagctaattttttgtatttttagtagagatggggtttcaccatcttggccaagctgttcttgaactcctgacctcgtgatccacccacctcggccccccaaagtgctgggattacaggcatgagccaccgcacctagccgagtagttctttgtagcaatgtgagaacagattaatacatacggaaataaagtccagaaataaggctgtatgtccacgacagaagttcagagacaaagctgcctcgtagcacctgaaatttcttgaaatttgagaaagaataattaagccctttcaagtcagcaaatggccaaatgaggaggtgaaatcaccagaggtcctggtgtttctagaagatggggtgtattgccaccatgactatgttagtgaagctcaggtgtgaccagaggtcgctggtggggttcagagtctggtaggtagatagagctcagctaaaggtttaatcggagccttcgttagataaaggcatggtgcaggggcacaaaggcacaagaaatacctgttagggtttagagagtaacacaggctagcatgtagaatctgatataccaaagccaccccagccaggagacatctggcagaagctgattccaaacatacaggtgaggagtctaagtaccacgaagttagaggaaagaagtgagaaatagacttcaagagactgagaacagcatctctgaatctaaagcacaagtgtatacccacatagtcatatagccagcgggggggactcagacaggggctgtcaaacctctgccgtgaaaatcatcaccctgtggacagatcagtgccagtacatgtggtctggcacccagggaaagcaaaattctgctggtgctgttaatttcagataaaaactgagttatctgtggagtcttcacagtttctacaacaggccaacactttgtaaagagggtaagcagttttctagtgagttgaagtgatgcaggcagccaaacctcagaaatttggccaaagtaattcacttgataattctcagctctgaaaggtgggctgaaaacaggcactctagttttcttccattatgcatttctggcagccacccagccaccagattcttagctttattctacacactcatttcattcattcattctttgaataaatatttattgagcacctgctctgtgtcagatactctgctgtgtactgcagagggttaaataaatcacagtccttgctgaattcaaaaagaagagaaataatactgtaccataaatgcaagaaaaagaggctgcagaggtatttggggtaaaagataaacatttcctctttttttggcaaagattcacctcattttacaaatcagttgaagacttggtgaggagagataagcattcttctgatatttctactagcattcgttaggtactcagtggattggaagcactaagctagacaacggtcatattcatattcaccaaatatttactaatcacctactattatgtcacgcattgttctaggctcaggggataaaatagagaacacgagagacatggaggcttatagcctactagtaggaaaagagaataggcaagaaaaatatgggtgataagagctatgcagaaaattaaaatgataatgatgtgatagagtgtccaagaggcagctgtagattaagtggtcatgatggcctctctgacatctaaactgaactctaaagggtgagaaaaagccagcccctgacacagtggagtccagctcacatttgtataagacttccaaggctaggccatatgtagtgaacctccagaacagcaagaagaggaatggggctggagtagaagggtggaagaagacaggtcagagtggaaggcagagacctgtcttgaacatgctgactttgaaatgcctacaggatcatgcagcaccaagctagagaatgggcagggagcatcctcaatcacctaggtgctcaaaacaaaagaagtgactcttgatcccagcactgctttcccccatagcaatcacaatggcaccactgagaaaagttaaaatcctgctttgaagcttattttataaatttctttgccatatttcttatgtagttgagtggatcagttaatcactcatttaacaaatattgttgagtgcctaatacgtaccagccacaaacaggtagctgggaggcagacaacaaataagaagggtacaaacaacagataaaatatgcagtatcagatggtgatatgtgctttgaagaaaataaggctgaataaaggagtacagcccaaggactattttagatcagggatctgggaagtgacacttgagcagagacctgaatgatgagaaggagggtgccatatgaaagaggggatcatatgaagattatgggagatgggaggagcatctcaggtgaagggaacagcaagaactgccccagaagcttgctgagtccaagcagcagcaaaaaggccagagtggctggaacacagtaagtaagggtgtaaatgtcagaggtaaccagggctagatcatggggtccctttgagccacggctattctgtgtgtgatgggaagctcaaggagtgtcatattttaatacttgcatttcaataaattcactcccactgctatgtggagattagatggggaatctaagaaagaaaagctggaaaccaactaagaggctgcgacttgaacctacacaagatgtggtgatggtagctggcccaaagcagcagccttggaagaagggagaagtggtcagaatcaggctacatattgaaagtaaactgggcagggtttgatgacaggggagaccaagaagaaccgaggatggccgttagttttgggccctgagcttctcggtagatgatggcagcagtaactgagggaggagcagctttggatggcaggaagagtccaggggtgaaggtagagatagcagtgtgcagggtatatcctggacagctcacatttgaaatttccattggatgtccaagcagatatttgagttggcagttagatatttgagtatgtagttcaggaaagagagagagttaaagataggatgcaaggagtcattggcattaaagtattaaagtatgtgtacattggtgcttccttcttagcatagacttgggtaatggggcagtgtgcactgaacatgtgtttgttctttccttatgttatgtccttctctgggacagtagatgatactgggaacgttacatctgcttgaaaaaataaagagaatcctgacaaccatatctttaacaaaagaatagaagcactgacagagtttgacttgatctgaggaaagttctgaaattctgacagtcttctagtgtataattttattagatttggacttttcatgtctttctgattttatgaacctgctattcaactgcatcctcatatataactgctaccaggaggtgaaatagtttatgcatgtttctttaagagaaatgtaatcatctgcaagattcttcaagatataaatttacatttaatattctacaccagggaatattggcaatatacagtattttgatcagattctttctgataaaatatgaagctctgaagagtgttactgaaaaacagtaactaagtcacatgcgaaaacgttcctaaaccttaaaatcacattccatgggaataaatctagttgcatctggtttagaaaagtgtagtccagacaatggtgctgcaatccattccatcatgatcattgtaattatctttgctgggttgtttctatgtaatttaattattcacttcaatacagaatagtattattaaagaataaggagggtaattattaatatgttctgccccagggtgagagtaggatgcttaattaatgaaccaccctctttcttactttatgaatggctcagtgatgttgcagtacagcaggttgttaggtattctctcctgctaatgggttatccacatcattttctcaactagagtagaaaaggagttactatctataacccagaaatgatattggcagagaaactgaataatcactgaaacagcttgaaatagtgttcattctggacgactgacaaaatgcaacggggaaatatggtttttcaggcttgatgcaagcctgagtccagttcgggttttccttgagatggcctacctcttcccctcagatgcttcttatctttgagagtttctaaaagataaacttccaagaacctgttataagaaaatgtctctaatgtctagcatcttgttatagtttggtctaatttttcccctctatgtttcttatttttgagagtttctaaaatataaacttccctgaacttgttataagaaaatatgtttaataaatggcatcttgttatactttgccttctttaaaaaccttgggatctctttaaacctaaaacaggaagtgaaatttgaagggctaacatgaattttaccaaacaacacagtctgggccaataattaatattaattatcataattagtcataatcttttttactttacatgtgttattttataccttcttatttacataaaattcacaggaaacaggacaaaactcaataggaagagattggattctgaaacacacactcatatatactcacacacgtaaaaacatgtacattacagaatacttaataaatttacacttttgaattaaataagaatggtttaaaaatatttaaagaatacttcaagtgtttcagaaaagactaagaatgcttcactatatttgtaatttggcccatagagcaataaatgtttccctattatatctgaacatatagaggccaaacgcccaactttagcatcaccagctcctgctctaccaagatcaattagacaatgaacaaatgtctttagaagtaggaaaaccatgagtaagctacctaaaattttacttagcaattgcttgttggagaagggacaatgctagataccagatgaataattatgatgaagaatatgaataaataatttatataaatatgggtatacatatgtaagaagtcctgctttaaaagagattctgttttgtcaaggaataagtatttagctaaatactagtaatttaaatgagattaaaaaaacctctttaaactcttagttaacataaagaatccatcaaaatcatgggcttattgtactttaatgcatgaaaggaaaaatggaaaattcaagaagcttgttttctaggttgcttaaaaaactcacatatatttataaattttgtattatttagcaacaaattaataggcaagagaagcaattagacatttaaagtttcagaagttaaaagttaaaatttttaggacatagcaataattttcagagtctaggtattgtcaataacttttttgtaacagttgcaaggacaagttttaaagtagcagaaatcagaaaagaatggttatagttacacaagtctccagagttaagatctagactgttgtgaatgtctcaagttcaaaatttttctttacaaaataaaatctgaatatctgtttttgcagaagtgaaaacatctttttttttctttcttttttctttttctttttctttttttttttttgagattctttttcctggcagaggttaatggcaaagtccacctctcaaggctaagcactacaatctcatttgttagcaccaagagataagagaaggcttggtaaactcaaagtgtataaaatggaaatagaaaagagcaacgttgaaatactactgagtaaagcagaaatatgctaggtggttgcactggtaactcccaataaaagcacacctctaggtatccatacacttctatagtcctctcaagctgactctgggcttggctatatgaaatgcatgggctaatgcgacatggatgtgagcagaggcttgataagtgcagtcttgaatggcagaaccaggagaattgactgtacttggttaacaatagggaactagtgaaggtttttcagcaagggactgacaggaccaatgtagtgcttcaagactatgaacctgatgatggtattaaaataaagtcacatgggatggggtgtttggagatcctggtagggtgaacatttgtgagattattgttctttaagtgagtctctccattagaatagaagggcagaaaatcaatactggaaatagtctgtgtgttaagaaaggacttcagggaagaaagactaatgcaccacagtgatgcagcagctctctcagaccactatggacagaggtggacagccttagccaagtccctggagaatgttctccaaggttgaataaatcttttcattgtcatgagaacaaagaagacaagagagaaggctcatcgtgcttgtcttttgatttttatcttatttctgggcatcccatgaaagcacacttcaacttatttccttgaattctaaatttctaactattccagatgactgcatttcagcataataatctaaatctttgcattcttctaattttcagcattcatatgccaaaaatcttaaattgcttaaagattatatatcaggtaaggaaattataggtctattgtatagagaatcataagagtggagaagtaaaatctttttcagtaacaaagaaaaatcatgttgcattcacaggaccatgaagccaagggtgaaagtgtcaggttttaggtaggaaggaagaacaacccaaaagaagcaggcattttatgcttttcatgcatcgtctgaccaacctgacctagaagcctacatagattctcccaggagagcaatagacacacactatgtatctgggaaagtagtcataaagatttcagataaagtcctaagagggctaggccaacagtgggataagccaacctagctcagcttagtggcattttgtaaaccagtcacatgaagagataaaggcaagttataagcctagggccaggggactaaccactatagatgtggcttagaatggagtacatactgctcctacttagtattcattgttaaggcagcagagactcatacacagaaagaggtgcaaggaagaacccctattagtaaaagcatgtttctgagaacccaaataagggactgtcctaaatgaacttggaatagcattcaagtcactccccatcataggactgcaactacctgtttcagaaggaaaataagtaagaattcaccaaggagtgggccagaaatgtctaacggatagcaaagagtcagctttcaaggtgtgtttgtgtggaaagtaggtggctactccccttgaataatttgtgaggagtcagaagagctctaatgagtaaataccaacattttggttattcagagtttgtgcagcagttcacactgggtaccttgattgaggctggtactgattcaagagctctgggggaaaggaggcacagctgtcaatcagtggcattcctcaaaatcaagtgaacagcatcaagatgaagacgcagtgaaccattaggtttaggggctgatcagttgatcccatcactccctagtccccctacaacatcctcttctagcaattcccaggaccaatttattccaaccatctgctttttttctgcttctgctcccaagttgcaaatgctgctggagaaaatcggatacctctgccagctggcaccaggacaacctcagctgggctctccatgctgctcagcagtcttttcacgtgtcctaactaccttccattaacagtgcccagagcagctgttccaaactctacactcttcacatgcttcctggagctctcctccctttgcattctcagctactggccttgctctgacatcactgagaaaatagagggcatcaactctgtacccctactccctagtgtagcacctgagacatagtatgttgaaatggatcaatgaatgaataaattaattcactcatgaatgtaactggtaagcaccagtttctctttctctcttacctggtatcagatctatccttgcttcctgtacacatacctgggagggagggagaattctctgcctttccaaggccagtgcttccacctaagctcttgattctattaatatctgctcccctctcctctgggatcatttatataccctttcttctgtacctctctttccatcttctaccttttagcccacaaacatgcttaagtctctgtctctgtctcctacaactagtatgtcctgagcaacttttatgtgccaggcactgtttctagcactacagagatattagtggggaaaaacatatagaacatctgccctttaatggaggtgggtggatgcagataataaggtaatgagggatacaaataaatgaatttaaaatagatgtttataaatttcttagaaaaaatacaaacagggaatgggggcagagtctactagggagggagagggagtagggatgctactttaaataaagcagctagatataggtgacattcaagccatgatatgaaggaggtaaagaagccaagtgaagactctgcattcaaagcagaggaaacagccatgtgaacgtcctgtgtcagggcagagtgtccttagcacaaatcaagaagcaaaggagactgtgtggcaggagctgagcgagaggtggaactttagtaggatacaggtcaggggaccagatcttgagggccttgtgaagcatcgtgactaaggactttggcttttgctctggggaaaatgggaagctggtgggaaggttttgagtagaggagtggcatggtccaatatatttaagaggatccctccagcttctgtgttatgaattgagtagagtggggtggaggaagaagtgggaaccctggttaggaagtgattgcaatcatctgagagagaagtgctgtgcacgattgcatcctcatttgccaccacatttgtcaaaaggactgtttcactcatcgcctccatactttctgtcctcatctagtcccatctggttcatgcccccagtgctcttctgaaaatactcttggctgagatcacaaatgacctaagtaccaaatgtcaaacccaggggcttctcttcagtatctgaggctcctttataaaacctcagggccaaagcaagcccaactgtgtcttgacctataaaagtaacaccacgtaagaagatcccacctggcaggtttaatgaaatcatgacagccacagagacttgaatttccctttctaatttccttcaagcagggtttgcagactgaaatctgacaaaggctgacaggtaatgggcgtgagtgaaggtggatggaaatgggatgacccctctaaggtggtaaatgcttctcacttacacatgatacgtaccaggtgaaaaagtggctcagggtagccaggctttggaatttttcaaaagaatcctgaaatctgaagttttagtgaagtttctccatttgtaaaaattgataactaaatttttttttaaaatacctatagaccaaatagaacctgtctgtgagtcatataaaactgcagaccaccagttttcaaatcctcacagaggaattgctaagtgcagtggtgaagcctccgggcttcggtctggtgctctgtaaatgctgtggatatgctgatggtaagtgttactcatcatttccccaattctcagccttacactcctgcaggcaactctaggttttgacattctattgctcacattttctttttgagttcctgttgcctgtcccacagacttgcattttcaatcacatactgaccttttggcccatcactccctggctgtgaatctaccacacttttcttctgctcactccacctctcaccagacataccagattccttcctggttctctctgcaggaactcactctctcagccactgtttaggtcatttctagtttcctggagcagataggtccagattcaaatccctgctgacttgcttaatagacattctaagcttaaggatgtcatacaacttcctcatgcctcaattttctagatcataaattggatttttcctccacccacctttccctccccgctacccccacataccactcttttccaaactcttttgatgaaacttcttctttctacaccttaaatattggtgtttcccccagagttctgcctttatgttctcatctgagcctatgcatcaagggtggttcttttacttttttaacttcaaataatatctccattccgaggtcttacaacaaagctagtcttagcctgtttgttaagcttcaaactcctttttctaatgatctcttgaccacctgggtgcccctgttttacctcaaattcaacatagataaaactaagcctattattttcttcttaatcttccatcttatttataccactccccttttttctctgcgatattgctcacagtagtaacccgcgctgcttaaacagataaaccacaaatcttaatggcttagcacaataaaacctgactgcttgctcccactccactggatatcacagtccattgcagtcccacaggggttggggaggttccgctctatacacattttagggtcaaattccttccatcctgtgatgtggccattgtcaataccttacccggaagtttagtgcagatggggaagagagaatgaatagggccagaagcagtatgtatataacttctgcccacattctattgagcaaaactcagatacataatcccaactaattgcaaaagtttgggaaatcaagtttagctctatgttcagaaagaaaagaagaaataagaatattggacactactaggattctcagctatgctactgagtcttccaaaatagaaacctgaggataacctcaactttaggtttgggtcttagtagttctacctcagaaaagttcagcatattctctttgcaatccctatccttgtcacttctcactggcacttttgacacagccttcctctcttcactggattcctactgcttgcatccaggagaaagtccaagtttgcccaagccagctctggccttttcagttctctccttcaatccctcctgcaactcactgtatgctatgcaccaaacttccttctttcttcaaacaatttgcttccaagctctgtgtgtatgccagggtgttctgtgttctagaacgcctagtcctgccttggtcacttcaaaaaccttctttgagcatcaagatccacctcaaatattactttttttaagaagctttaccaaatcccttaggattaatgtccatagcagttcatatagcactataacattttggcacatttagttatagataattttatatgtctatatctcccataagactgggaatttcttgaaaggaaagaccatgtttttttttttttttttgtactttaagttatagggtacatgtgcacaacgtgcaggtttgttacatatgtatacatgagccatgttggtgtgctgtacccattaactcgttatttacattaggtatatctccgaatgctatccttctcccctccccccaccccatgacaagccctggtgtgtgatgttccccttcctgtgtccaaggttctcattgttcaattcccacctctaagtgagaacatgtggtgtttggttttttgtccttgcgatagttttctgagaatgatgatttccagcttcatccatgtccctgcaaaggacatgaactcatccctttttatggctgcatagtattccaaagaacatgttttgtatacagttctactgaccagatttgtaatccctgagtcctgttcaaagcttgtacattgtgggtgctcatttgatgtttgatgaatacatgtatcactataatggaaattagaacactatatttttatttttggaaaaaaacttagcccatcatttttctgtacttcagagttttatcatttgtcctataggagtttttagctctaaatatcattggatttaggaggaaacattatcaaaagcagcactcttcattagccaagttagcagatttttctctgaagattatatagaatcttacaataaatcctcagctacatttcaacaagaggcagggttttctaggattttaacctcttggtctaatcagttttacaaattgtcaatcttaaaatcctttagagcctcctaaaagagaggaaccattttgttggttatctgggagctggttgtttcttccacttcatcttatgtagagtcatgcccatgcccaataagaaagggaacaaaggcagggaaaagctgtgaatctcaactaatccagtgctgcatgagttgaaacagtggataaaggatagaatgggttctggcactgcctagtaatttcagacttccttgcttttcttgtcctacttatcatgaagcattaggaatgagcccatcattgaattagatatgccaagaacactattttgcttaccagcttctctacctctcatacccaaatggagtgtgaaggtagtgaattaaaattatttatgccatggcctcatctatcatgcctatgtaaatgagtcccacatatatgtcttaagtttagactcctcttccatgtgcactgtatctgactgactcttgccatttccactcagatgacccacaagaatctctaattcagcatgtcaaaaactgaatcaccttcacttctaagcctactgcaacttctctctttccttgctcaattaataatagcgtcattctccaagtgggacaggattaaaaacacaaagtcatctttgacagcttatatatcccatcaacaatcacttagtaagccacgttcattctgtctctgctaactcacttatggtaagattcatgttactctttttagagaaacctcttcaactaccggcagcccagagctgaacactcataatgtcagcctcaaaaaggagagtccagtctagtgccaacaagacagaatcacagcaacaaactgatcccatccaagttctcactctggcttttcacccctgactgtcttaactgtcagctctaagtatctgtaacaactccaaaaaaggaacttgtagacttttcaagaatgaactcattatagatggttggaaatatatacatatataatttatatatatataaaatatgatttatatatatatatgattttatgtatatatatatgatttttttcaggcagtggctcactctgttgcccaggcaggagtgcagtggcacagtcatggctcactataacttcaaactctagggctcaagggatcctcctgtcacagtcttccaagtagctaggactacaggcactcaccacaacactcagcttattttttaaaatttcgttgtagagatggggccttatcatgttgcctaggctggtcttgaactcctggcttcaggatatcctcccatcttggcctcccaaactgctaggattacagacatgaaccactcttcccagcctttacgatataagattttaaagggatattagaggagccagaactgaacactggtagatggtctttgtgtactgggctatccagcttcctaattatacaatgtgtttgggagaattgaagggttataaaacatttgggaaacactaaaaaaggtacttagccacatttcttgagatatatagtgccagcaagcaatgtggacaaaaacttgagcctaatccacagttagggtcaaatatctaaagaggctcacctgggagcattttgcacagaggaagggagatgctgtggaaaaatggaaaggactgtgttagttggcccaaaagcttcgggcacagggaccccatcttcatgatggtcatgaacatcagaaaggtatttcctactggtctaaaactgaaaagcattggagggcagaggaataaaagaggttagcagtgtcgtgggcatgctattggcagcaaattgtgggtggcacagcaacagtggtcaaatagcaaggcctgtattggtaaggcctgtagactccaaaaagatgagactgcagaagtggaagtatgagctccaattaaatgagacatcccctctcctggagggagaatgaatttttagagtgaataatttttacaaagcttctaaatttggtttcctgaaaatcaaagcattgtgcctcgcaacgctgaaagataataggagtggcccggggcttaatagtttatgtatttaagtataacaaattattaaaagcactccttggttaccaatatctcttctggttctcctttctaaagaaaaatattggtctggatccttctttctaacttacatgcagtctttgtccccaaatcatctaagtctagatatcttgtttcttactccagggaccttagtacctaagttttgtcatttgcttatgcactggctccaggtattaccttatgaactgagtgcttccaatgcattcagcaaaattcagactgtggctgtgtgatgctgccactctgtctccctagacagggtgagcctatgtctgtttcacgaccctttgtggccaacttgttgctggcataatcagtgttctggaatatcctgagatcttaggtggaggttttcaaaccctcctttgaaggaagtatggcttcttccttaatgatggggctaataaaaaatattaaatatatcatagtagtcacaatttctttctccattgtaaagaaattgtgactactatgatatatttagtattttattattaattacctatcttgtagtctgtaactatgtaccagctataatttcattcagatcctctttgcttctggctaggattccatatgtgttttgtttttcctgaattagactctagccctatctctgaatagtaactagaactgcatcatttctcaaggcaagaagaaacccctctaaaaatgaatgaataaatgggaaatcagtcaaataaaaaaaaagttaagacctccagcaaaaatactcatagatgctcatcagtgtcccacctgactccacacagtatggccctctaggatttcatgtttgcatataacctttgggtgagagaatgatctgctgctaggtagatatgattggttaaaattaatacttgtatatgtatttccctactattactttagtttcttttattaaaacttgtaaaagtcttctaatttggcttctgtatttctgagcatttcctttcttaaccagagttcttcatctgaatatgacttaagtaactattttcttagttctcctaagcatggttcctaactacagtagcaccattctagatgcacagggaacaagttaatttattatgtaaaatatatactttgaaagcattaaggcttaattcttagttgaaaaaaaaaagtagggttgggatggaaactctatgttaatcttcttagattactcttttgttcatgtttcacatcatcagcctgcacagaatctaccagtggctccctggtacctatacaattaggtttaaacccttagcatgtagagctccctataatctggactcaacctacactgtatctcttctctctctttatctgggccactgggcttcactctagttctccatcccaccctgaaccaaaccagaatgtactcttccaacttcctcctccctctccactaccccagtccctgactttcatctctgtatgtctcattttactcatttttcaaggtcaagcttagattttatattctacataaatttttttttgattctcccttctaccgaatctctaccacattttactttttaaaaatttttgtaatacttttcactatcttttgagtgcatatcttatcaactgctccagcctgaaagtcctctgagtaaaactgtgttttacgtgtatttgcatcctcttttaccccttatccccatgactaaaagatgtaaggtcaataaagctttggagagagaaagaatgaatgaatgaatgggaagcggaatacattggcacttgtctactggtataccacaggttcagacttcaacaggttaagcaggcgaggcttggaagagaaagcatccttgacataagtgagctttctctctctacatgcttgtgtgttacatgacatggtatgatgccttgaactcccgtcaaaaatctacatgcccccctacttcctctaagagccttaaaccaaatcttttctcttaggttgtcctccagaatttctcaccgcatgctttaacaccttgtacacagtatttaagtagtatctccaaatgtgaatactcattatgcccaccgttatatatataattactcatctttgacagtaaatgttaaatatttattcctatacttaaacataatgcacaggattcctttttagtgactgctaatgagttacttttttctaaatcagccgaaacatgaaaattaagcatttttttctgctcagaaataatttcaatgataatagtgttaaaactttgcatttctaaagtacactgtatttgagaattctacagaattgttggaacataagtcatgcaaaggtatgaatcagtcagcacttcagtaggaatattagctttacacccagaaagcacttaacagcctttgccacctgaaaaaaagataggataagaataatttctcaagagccaggatctaggaccacatttacctttcagatttaaaatatgaaggcttttcattttcacagcctttgattgtactatgtcccataatgttattttttttttaattgcttctattctttcctggtaggagactaccatgtaaccccttttgatttccgagagatgtggaatgcagatctgtaacactgcattttcataactcttcctttttgctttggatatatttttgtcattaatgtagtactggcaggtctgaatgtgttttcctaaccttattccatcctccctttgctaggagttaatttagtgagagctcaacccacataaatatacgcttataaagcacaaatgctccccaatcataaagaaaatgccccatgagatactgatcaagggacatttttttagattaaaggctaaaagatatctttacatcaagctcagctgagtaaaacgtttattttcttattcatgtatggtgagaaaatttaaattgacatttcaatcattcaaaataatgaatatctgaagtgcaggaataaagacaacatgtgtgtatcatttagaacagaaagcttttcctctgtacctggtaaaccaaaaatagattgtattttcttccaaagaattataatcttttattaggatatattctaggtaagtaatttgtgtttctgctgaaggggacatgacacagaaaaccattatttgtattttaagtagttgtctcacaaagtaccgagggagcaaagaccaagtattttccatatagtacttgctctggatcaaatacttttaaagtaaatgcactaataagcttggatcccatgaaggtgcttatcctacaggcagttttgggcacatggccagtcgtgacctgagaatgcactgaggtattaaacatcaaacattctcccttcttctttccttcccctttatccacaaacaacattgtttttaagatttcctgagcaaaccaggaaccttgagaagttattgtttttgacttaaatgttggctgacttaaattgtttcatggtaaacaagcattttcatgcccctataaccatataaaagtccgttgggagacccagaagttgaaatgttaactatattctgttgtgagccaggaatctgtgggtaagcatatgggaaggcacttttattagcagccctggtatattgtgcctgtttctcatcctgagataagggatgaaggatgcatagaatccagagtgatattcttgattggttgaaggcccaccttcccctctcctgtttgaaaacatggcttaaaaataaatgggtcagaaagcctcacccaatgaaaagtgaggaatataatatatagtcctccacattttcattttggagaccctgggtgtattagtctgttctcatgctgctaatacatacctgagactgggtaatttataaaggaaagaggtttaattgactcacagttccacatggctgggaaggcctcacaatcatggcggaagacgaatgagaagcaaagtcagaactcccctttgtaaaaccatcagatcttgtgagacatattcattatcacaagaacaacatgggaaagatccacgcccatggatctttacctcctatgggtccctcctatgacacgtggaaattgtggaagctacaaatcaagatgagatttgggaacacagccaagccatatcactcggtttacatgtattgctgctttttcattaaagaaaaaaatgtgttacaagccaactaataaccaataaatgatcttgctcttattaccaaatatgtttcctaagtagggaatgctggaagggagggaggagtcaaaaagactaaagggtaagtgtaaagaaagagaaatcatctacctttgctcttcttcccacgacctcatcaccatgcttgaaaagagtcaatgagcttttcaggatcattagcatacttccataggctgtgtgagatgcaggtctaagagcagacctcagctctaaaggaaagcacagcattatctatctcacccacacagtcaaagcattgtctccttatggcttatccatgtgtctggtgtgtatcccacaggaaagcagtggagaaggtaaggatgaaaagctaaactcaacatcatgcagcagttgtggtaggctggattttacacctgggaacaagggtgcctaactgtcccagtttgcacaggactgagggaaatttctaagacacagcattttatagttttaaaaccagaacattcctgaccaaacccagacaattggtcattctgaaaacctaggatttaggttctcttcatcattgaagtcttctagaacccatactttcaaaattatctgcatgatggaaacgtctacggcattttaaaagcaactgatgtgggtgtcccaccccccataaaatctgacttcattggtctgggatgcagcctggcccttgggagttcttaaagctcctcaagatccccagctaattgtaatgtgcaggacagattggcaacccctgcactaagtgattttgctaaattatttaacctctctgagcctatttttcttttggtaaaaatttgccctacttctttgcatattacttctgtacaaatattcaagcttctactatttggaatgttctgaatcagtgcataggaatcaatcacctaaggatcttgttcagtgaagatgctgattcagtaggtatgagaggaggctagagaactcacatttctaacaagatcccaagtgatgctgttgctgttggtccagtgtgtaattgagtttgtggtaggcaaaataatgcctccccacaaggtgttcacatcctaatctctaggacctgtgaatgtgttatgttatttgaaaagggggattaaggttgcagatggaattacagttgctaatcagctgacttcaaaatagatcaactgacttcaaaatagattaccctggattattcaggtaaatctaatatgatcacaagggtccgtgaagcaggggaaatgatgtagaataatcagtttcagagtgctgcaatacgaggaagccagccattgctggctttgaagatagaagggaacccagaggtaagaaatttgtgaagcttctagatgctggaaattgcaaagaaacagattttctcctagagcctccagaaaggaacttggccctgctaaggacacactgatgtttgcccagtgaagcttctgtcagacttttagacctacagaactgtaagataatagacttgcaacatttcaaggtctttattgttatttggaacagcagcaataggaaagtaatacaagtatgatattaatccacaactcaggagagcagtaaacacagtttcattgttcattaagccagtttctcactctgagtcattctcccagacctgaacctcagcccttcctggggttttgaaactccaccacccctaccttcaaatttggctatagttcttgagtccagcgtttagggatgcattggaggcagctggctggtccatcatccttttccccagtggcacacttataggtgcaatcttggtggggggctgcctgtggtggaacaggcgactccagacagacaggagggacgcacagttccctcccactctctttccttggcctctcctccccgccccttcagcacagcccaggagaatgtggcttgtctcagctcttctcctgccctggttcttccatgctctgtgtatatctctatgaattctctaaattatcccaaatgtttgagctttggaaaacaaagttcaggaaaatgtgcaggttatttttattttctttcggaccgcacggcttgcctgagacactgagcccagctggctccaccgcaaagtaggggaaaaagggaacagacccaatctaggaagtaaagaacatgattcagtttgtcaaaaaaaaaaatctacttatgtgtgagaagtgagcacaattaagtttcttttatacgccccctcaccccccgccagccccccgcataggaaagttcctactgcggtacatgtgccgcatctgcccagcgcgtccagaagtagaaaggcatcgggcttcctaaggatatccgcggccagttgaaaggagcacaagaggctccgagataagacgaccagggccagaaagttcaatgcatcatttcaagattcgatgtcttggaaactagactccttctcagatcttaaaggtgaaatgagtggccactactggcagccccacaacagcacgcattgggcaacaggcctgagccccacacatctccggatgatacacacctgccccatgggaagccccgggagctcagagctgaaaatagttttgcgtggagctgccgctaggctggcttcctttctgaacctgaccacggagttccttacgatttccacggcaaagaaatactctctatgtaaattgtaagcattttctctgtagatttcagttgtcgatgactacctcataagttgtaataaaatccagttttattaagagattgagactcaagaaatctcttgagaagaacatacagaaaaatgttaagggattaatttgggagtagaattgtgggtaatttttttctttatgtttttctgtattttctcactttctagaagaatgtgttttgtctatatactttgaaaaataagtttttaattacttaagaagaattatggagagtttacgctctttggcttgaattggagagggtaacagtttggagaaggctatttcccctacatacagaccttagagagatatatctgccagcctcactgggctgggactagaatcacctttagataccatgaataataagcacagtaaaagtaacactaatgacaccagatgatgtctgtgttctttggtgtgcacggtcccatttgcatctaaggactgtggagagctctgtgcctaggtcggcgggaatgacaccctcattcttcaggttctgacgttcaagtcagtgctgttagattctcagctgtcctaactccttttcctgggtgcggaacactcccctccctccactgttgttggctagggattccaaactaaacagacatcaagacttttctttttttcaagaataggtgctgcagataaagcccaaaatacagagaaaaccttaccacagaaatgcaggttggaggaacagagagcgagagggcaggtgcagttcttgcctgccttctgccaggcccatgtcaccagttcactgtttatttcttcaccaagcctgctattagcagtaggtctgaaagctttgaacttaactgatgtacataaagcaagctgttcatttaatctgcacacttaattcagctctctctgcatgctgcttcagtctggcttctttccatataaggagttcaccgtatctttctgcagcacccctacctctgtcttgaaaaacagccaaagatggctttgtgtttaatgcacttgctgtaggctgaaagccccagctgcactgccaccaccttgccccctactcctgccaggtaagtcctgtgtggtccatttccatctcatcctcaaatgagaacctgctgaattctattattttgagacttttttatgtaaatgaagggaaagaaagtcagttttaattttgcctgtctgatagattatatcagaaacaaatgcatttatgtgtgtataatttcctgttcatgaaaatgttgctggaccctgctttagtgcaccttaaggcagatttggtgaaagctttaggcacacttctgagtaaaatatgcatttcaaatgcactaataaagtgtgtagaattgaacagtgggtgggagagaaaggagggacattttctcacttgtgtataatgttcttttctaagtaaatactggtaaagtctatgtataatcacaattttattgaaaggttaagtaggtggctccattttgttgttatcataaataagcaatatttgctacagaaatctcacattttggataatggtatgtaaatatatcatattccttctttcctaagtggtttccatggcttaatgcctgtcaaggttttgtgaaatatctgcaaaaccagatgataccactcagacgaagggaagagtgaggagatttaaaaatagaggctagctttaggagtctatgctaaggaacatgggcacgtgaatctgggaatgggggtgcatgcgtgcatgcagccaggggaaagaaatagtcattaaaaggcatgagagaaggaaaatgcattataaatacaaaattgggaaaataaaatttagatgctaagccaggccttggtggggagaaaaatggaaccactcttatttggttatgccttatcaccgctgttctgcttggggtaccagctgcctcatttagagcccgttcttctcacaacattaaccaaggtgaaaatattattaaaccctgacagtgaatgacagaagcttgagatatagtgcgtatatctactcaggcatggctgtagaccccaaaccagatacccttaagcctattatccgcagaataacagacatttgctcctatcattatacatgtgaactgtgtaccttatttcaacagttattatcagtatattaaacagctacaaaatagctggccctgtgttttctgttttattggaagtatctcatttatctagagtcttctgaaagtcaatactattcccatttttacaaataagaaaaatgttagggctcaaggaagttaagtatctcagccagggccacacagttaatgagtggaggagacaggatttgaactcagatccatatacctgggaaagtttatgttctttccacttttaagcagcctctttatttaattggaaaaattcatagaattataagataggaataagtgagaaaaggaacatacaaataaaaccattttcttgggaatattggaaccacagcttaagtaaataattctatcctgaagtgttttgatttgttggctgaattttccagtagttgaaacattagccagacacaccagggcattatttctctatgttggttgcacattttaccaacctgaagagctttaaaaaatagttacgtctaatctccactcccagagcttctgattaaattggtctgagatgtggcttggacattatgggttttaaaagctccccaggtgatcctaatatgtagccaaataagtattttccccttaacggcctctcctaaagtctagacccattaattcagctaactcttagctatctctgctttaatatcccataggcatctcaaactcagcatgtccaaaatagggctttacatcttttcacttaaacctgaccctcatcttcctatatgatattttttaatgccaaacactatcactagacttattattctaagttagtcatatttttatctgagttctgaaattaaaataggcatgcctgaccactagatggctgctatataaattcataaatatttgcatctgtgggatttcaaaagagtagcaaattcaaaccctgattagttttagaaatgttgtaatagctccctcctgaatgccaaaggaagacaatgctcaaattaaatgctctacatcaggaagttaatttaaatgagcatgtgagccttattgtccataagaaagtgagtgtggagcatttaaacccgcaaggaatgccaggttccacagggaaacaaggaccactagccctgatatgcaggctctacaataaaaatcaaatctaatatattatgcgggaaaaaaacaaacaaggaccactagagcctactctctgcttccccgttgatgcaagggtattgcactttttcagaggttcacactctacatggcaaagaatggtacatggcctaagagaagaaaaaatgatgtctctatagtaactgtgatcatttctattataattatttgataaaaacccaactcaattttcctgaaggaaaaaaaatcaagaagccattggcccacataactgaagggttcagaggtgatctagcatcaggcataaataaatccagaaggcccgtggtgacaacacaggtctgtctcgctggatcagtttcccccttccattctcttgttcctcctttctcactctgtctggtcctgctctgcctcaaatttggctttattttgatttcagagctgagatcaaagttatgagtaataagtctggctacatataatttttgacattaaaaaaaaaaaaacatatatgaagaagaagcttactctcagtcaagccctttacccatggcagcttccacaaatctcgatttctgtccctccagttcttagtccaccaaagtcattttctttcttacagcagtctcacaaaaagccttgtgattgaggcttactggacccaggcttgaactaagttcagtagccagggggatttccttgactaggcctttaccatgggcccttccaaggaatcaagagagagttggcgtgctcaaaccacctgggactcacaatgggagaagggtgaatacacaggagaaatgtgggctccgttacaacatgaagagttagatgttgggctggacaaagtaaggaatccccagtgcaaactctgcaggtgcagagagaaagagatctcatccatctggggatataagaggattttcaagaaggtatgattagggatgagtcttggaggattggctagttaagaggagatataaaataaatttaattttgttgaaacataattcatgtcctccaggacctcctccatagttatgaatctaagaagctacttaatctatttggtgcttaaataaaaatgttttgatttcataaataaagattttgtttataataaaagagactgtatcattcagatactcagataagcaggtctctatcatcaggtataatgatatcttttaaagtgagagcctcccaaactttagtaattatttcctcacatgagcattccagtattttcatgaaactctaaaaagtgagaatttatgatacttagaagcagtttgatgttgggaaaatatttatttttggcactggccttccatgtaactgtaggcaagtcatttaagtggtttacttatttctaaaatggagatgatattggccagtaataacaatgactgataataaagttgttgtaaatggcaaaggaaataatgcaaatgaaatagcaagtactatacaaataagtgtgagatggtgtcattgtacagttttcaaagtaatatcttatatgaggaaattagttgataatgggagggtttgtttctttgcatggcaagccatctccattttatcttcattaaattcaccaccagagcttattataataatttagcattatgggtaaaattgtgttagtgtttactttggaaatatataaacctggtggcttctatatctggaatacttccaggaattaaggaaaaggtgaagggagcagcttccaggcacctaacaataacagccctatggccatgggggcaaaaccttttcctcatgcagtaatggggattactcataggctagcagaaatggtccaaaccaaccatctgaagaaggaaccaagtgcacggaaaaaagcaagaaattttacaaaggaaaggggaaagtggaaacaaaagagaggagagcaacagatgcaaatgcaagggactactacagtgcagtggaaattagagccagaggcggaagctgtgaaccacacatggaaacattgattttggtgagggaggggggagatgaaggggagtgatagtatacctactagattcgactccagagcagaatgtttcccaacaacccttcctatagatggccaagctattttcgttaataattgtgatgtggaatgaataataatagcctgaaacaaacacagtaaaaatcttcttttactgaactttgtgtgtgtgtgtgtatgtgtatatataaaaccttgtgtatatatacacacacacaaagtttaataaaagatttatatatatataatcattatatatgtaattaattgttagtaattgttagaatttacactaagaaaagattttttgagggcaggagtattttatcattgacattgttttgattctcatgtttgctagcacatggcaataatagaaaaatatttagagtgttatattattgttctaaaattctgtatgtccaatgcacattcttattgcttgtacctgagggagaaccctgtcacaaatggaggggagtcagcagcccaaacagaaaaatatttggttcactctgcagagaagggacacacagcctcacacctctcagtgggccctaagggctttgctgaactgtacagcctgtggatacaataccaaaagagaaatttcttcagaattccctcagaggaaaagcttctcttatgtttcctactttaagaattcctggccgggcgcggtggctcgtgcctgtaatcccagcactttggggggccgaggcaggcagatcacgaggtcaagagatcgagactatcctggccaacatggtgaaaccctgtctctactaaaaatacaaaaattagctgggcgtggtggcacacgcctgtagtcccagctactcaggaggctgaggcaggagaatcgcttgaatccaggaggcggaggttgcagtgagccaagatcgtgccgctgcactccacctcaaaaaaaaaaaaaaaaaaattcctaagtgttacagacttcattttgccactttttttttttttttgctttggcagagtacagaataagtaaatgtacacacacatatacacatgcacacatacatatagtttgtagtcccagtgtggggagcttttaaaagtctgatttctgaaccttatctctggagagactcactaagtctgggatgaggaccaagaatctacattttaaaagcatctgtgtatttctgatggtcatctaggtggaggaatcattggtgatgaatttgcatttttctagctctatgcttgtaatattccacttcaattaaatatctatggtcctgattatacatttctattgtgtgagtttattatctatgttcttattttatcttggagatcaccttaatatagaattggaatttaattgttaggagaataaaatcctctttctcctttcctgaaaccatgatttctcccaagtataaatgcagaatgtgaagcctccggtttgagaggtcataaatcagcagcaagtttctcagcagggtgtatattaaaatggaaggccttctattcttacagcaggtcactaaagttataccagcaaatgcaatgaaaattcacagtgctttttacaccctcatatattactagattctcccttagaagtgtataaaactgttttctctacttaaataatgccccccatttttttctttttcttttctttccttttttttttgtggttcttcagacagaatttacaatttaaaagaaaacagaggaagaaaagtagaaaaaaagctggcatgacacaaaacaaaacacagaagcttgtgggaaccatgataacttactgatttttctggctgcaagattgtatgaaacaaaaaatagcaatatataacacttccagtttccccccgaagcaggcatgaccaagctcgttgtggtccagattgtctaaccagttatgctttaaaaaaaaaaaacattcttctgttgtctgtgtctttactaaacctcaaatgccagtcggtgtgaatattcaccaatctattcagtttcatcatgtaagaatcactgtttttaattatttattaaaaaaacatttattaagtgttaagtattatagacaaaggactaaatgatgctttaattctcgtaacgtctctatgaaagtggttttccccccattttacagatggagaaagtgaggcgcagaggagttcagttactttctcaaatgattcagctaatgtatttcttgtattttgatgtatggatgtatcaccactgggaacttatttaaaatgctgattactcctagggattccccttcagtaggttctgtggagcccaggaatctgcattgctaacaagcaccaggtgaacctgatgcagatagttcatttagaaaaagattattgatatggtttggctgtgtccccgccctaatctcatcttgaatcgtagttcccataactcccatgtgttgtgggagacacccggtgggaggtatttgaaccatgggggcgggtttttcccatgctattctcaggatagtgagtaagtctcctgagatctgatggttttgtaaaggggagttcccctacacatgctctctttgcctgtcaccatgtaagatgtgattttgctcctcctttgccttttgccatgattgtggggcctccccagccatgtggaactgttagtcaattaaacctctttcctttataaattacccagtttcgggtatgtctttattagcagtataagaacggactaatatacttatagaatactatgggtttcccactctgaaagacagctcagagttcaggacatgaaggaagtcctcaccctgttccatttccattctatcacctggcatttgtcccctcagaactcaggccataggaagccacactccagcctacccatcctggcctgctgtgtaactttcaaccaaaagttttcttaactatagttgtgtaacttaaaaagtggttactgaaactgcatgttgtacttcattatgggtgaagggccaagagttgtgaaaattattgagagagtgggagctgacagagaggctcaggagaaaagaagacaggtatagctttatctgtctcactgggcctcccaacccataggccttccattcccttctaatggtgatttccattaaacagcagcacactcactcactgggagctgatgcaaagaaattctacagtggtggtagaaagaaagataggaggtagggcagaagtgtgggcataagatatagagaaagagaaaaaagcaggaaaaaagaagtgaaaaaaaaggcagtggctgtgtagatggggggatcttgttaatagagtgaaccatggttaaggttaacagcacattgttcagaccaccaaaggtttgactgtattctctataattcctaggacaactgcaaattactagctccaggaaaattactcctctcagatctgcatctcctccaatcaggttcactgatatcatagcttttcccaacagatgacctttccctgtgattttgagataaagtgattggaaggtgggaaataaaaatctaacagggtctggggttctccaaagccttttagtgttagattttatggtgtttgctccaagtggtataaatacctttaggaatctcctcacctatgaaattagaaacttcttggaccatctttgaagaaagtgttacacaggttacagaaacacggtatgtagaaacactatatgtagcattagagaaatgctaagttgggctttaacacccatggcagatacatgacacttggcatgtcatgtaatttttctgtccttcagtttacccagctataacatggaggttataatccaccacccagagtggtggagaagactaagtgaataattatttaatacagaacctgacagatagaaggtatatcaggatgtaacagggtcctggcaggaaacagaagccatcccacatgagtcaaaggaagagaattgtaaagagattatttacaaaagtgttggcaggaatataaaaatgggatggcgaggcacctggagactgtcatgcaggaaaccattactactcatagctgaaggcaaagaagatagaaagagtatctatctccggtgagtgcaggagctgtggaggagaagcctgtaagagctatagcctggagaaacccagctactgccagagaagcaggagcaagagaccttttcctcttcccagcgtatgagctgctgctggaggttcctatggccaaactcaactggaaggcacatgagaaagaagcctagatggtagagttcatagcagtcatcttccctgggcacagagataggcatggaatggatgggaaggaggaggtgcagaggggttattcaataaagtcatttctacctttcatttctgacccactacacacacacacacacacacacacacacacacacacacctaccttccctcatatttccaaacaaaactgcatatgtagtattgtgagaagcaggtggtatttaactaataattccactaatgtttatttgctaagtccagtaatgaattcaagctaaatattgtttcttctcccaaagttcagggccattagtggctatgtgtacttggcaagacatattaactcttggactcaaatccagttttttggatacataaatatcctctagctcactgagagagttaatgtgcttccctaaagaccttactaactgactggcagtgagtgaattcagcaccaaggatatcagactccctggaagacaaaaaaaaaaaaaaaatatatatatatatatatatatacacacacagagagagagagaaatttaaaaattagcaaggagctcagtgtgtagtgctgctgcctctacttcccactcactgttcttccccaggactccttctttaggtaatggcttctcagcaactggagctgcctcccgttggaaaagataaacgtcctccttccctccatagagatagagaagagtcagattggtggagatgtctggaccttgtgagcctacagcagggaccagcaaaggagctattcatgctgtgggtcttgagatggaagcagaggcataactggaaaacaagcgctgtgaatcatttggtcagtcttgaagtatcatttagagctccaagaaagagggaaatcttttaaccacaggcctacaggacatctggaaattctatggtcaaggtatccccattatggtttctcccataggcaagataagatttggcgactaatttgtgctcgactacaacaacattaaattgacattttaacttctggtgcacaggataaaataataattagcattataaataatagagagcacttgtcaaatgcctggtgtagtccaggcatgtgtcaagagtttttttgtcctaattctcacaactcttatggcagatactattaggttattatattagactattagattataacacattaaacttaaagagtaatcattcagaacatactcgggggggggcctcctctttacagaagaatgccagctaatatagggaaaatgacacatagaaaatcacaatttttcaaccatgattgtagtcattgattcaggcagaggtcatcaatggatgctaaaacatcctggttaaaagttgctagaggatagactataagaggtacagtctcaaagcgtcatgccacaggttagtttttaattacaaagggaaaaaaagatacttttacaatagaaaaatctagctgatgatatactaaccaagtgagcagagttaacctcagcagtaatgagacaaactgacctgatatgcctcgtgatggtttgtcatgggaagtgctcaacatcatcatatatacaggttgagcatccctaaaccaaaaatccaagattcaaaatgctctgaaatccaaaagaggaccaacatgacatcacaggtagaaaattccacacctgacctcatttgattggtcataatcaaaactgattcaaactttgtttcatgaacaaaaagtatttaaaatattgtataaaattaccttcaggctatgtgtataagttgagtatgaaacgtaaatgaatttcatgtttacacttgggtcccatcctgaaagtatctcattatagttatgcaaatatttcaaaatctggaaaaacatttgaaatcataaacacttcttgtccccagcagtttagataaggtatactaaacctgtagtattcttattgaaatgtttaacctgaatccagttgtgaggaaacagacaaattcagatttggggacattctacaacttgccacaactagcttggactatccaaaaatattaacataataaaaaatgaaaaagttcgggaggagtctaaactgaaagactgctgagacaatagctaaatgtaataatgtgtgctccttaactggatcctggggggaagaaacattaggtatgaagacattactgggataattggggaaatttgaatatggggtacatattcatgttacagtattcagagtcagagtttcctggttgatttagtgcaactgaagttatggaggagatggttttctattcttaggagatgtctgtgaagtgtttaagggtcatcaagtctgcaacttactttgaaatagatcaacaaccactgcgaagtgttatatgaaaagagacaaagcaaatgtggcaaaatgtccacagctgaggaactgaagtgaaaactagatgtatggcaacttctacttgtctacaggctttaatttttttttttaatgaagagttggggaagaaagggtagtattattggtcctactttttcaaaatgtaaaccaagcttgaggtgtcccagctagtacatgctagagctgatattcaagtccaggtctttctgactctactaaccccttcaatacattttggccttagaataatcaatgtgaacacaatcaacgtgaaatggtctttaaaatgtacgccattcatttctctaagtccctcatgactgaaacaaacaaggaattgggtttggtttgcagttgtgctgtgctcccctccacacccccacactctcagtctcctcactcagggaaggagaaaggcacttccctcttatatgaatattactgaattcattccatgtcaatcattaaggcctaatgtaaactcttgtagcatgctgggatctaaatgaatcctgacttttcatcatctcagaacacaaaacctaggagataagagaagacaactttaaagatagctttaatagaagtcaatgtaatatacagttgtagttacactgataacacctgaacaaaaaaagagtgagaaaaagggcatttcttcaaatcagttgactccctttcttcaaagacattatcagctatttatgcaaacaatgatttattttacctggtatatatgaagtgattaatcatataaccttacagtatccatcttaggtaatacgtgctccacgtccatgaatttcaactaagctgcctagacttcccagtgagtggtgtttggaagtttaaatttttacaccttatgttgctacctaatacaattctttggcatttgagccagattcttatttaaatgtcttcagtcaatataactagtcataaagcaaactcattctttggtggttatgagaagcagcctcacttctctctttgtttgcaccctacatttagtttttgaattttataaattgctgacaacagccagatctttttttggaaagtgatttaggcaggcaggagggaaacgctcacagtaagctagtggtgtcattagcaattttgttctttatagaacaggaaactataatcagtgtttttaagctattaattctataggctagtacttccctcccactaggaaatgcttattttctccacccctgaagatgggtgttttttaatgtttaagcaaatccctgccatgcctttgtctctgtaagtataatagaaacgctgtgcttctgtgctgcctgtggcgcgcgcatcagggcatccaggtatagctttgtgctgcctgtcagctgccacacgtggagggtgaagggcagggaaaatcacattttgtgggggactgtcgacattcttctgaatggaattctttggcaaacttgaggaaaaggaaaaaaataatgtgggagactggacagagtcagggtccccagggtgccaagtgtagctcagagtgaccattggtgaatcgcttcatctccatgtggaactaaatgcaactaagtgatttcttaggctttccccagtcattcttagtgaaaatatggacttcccacatcaattctgagtcactttcttcccacctggaatgattaccatttttctcatagtcagtgtatgcagcagcatataccctcatttgcctttgggtacattcctgagtcaagatacacaacaggatatcactggggctgcaaaagcccccgccccaaaagagacttggaaatattacgctcttcatgaggaatgtggctgtgcctctcttctccccagacctcttccttcttaccagctgggttgctttctttcttggactctagacagtttctagcaaagatacaagccattgaggaactgagataagaagcagaaaggctaggaccagaagtctcaagcagggttccaaggattacctctacagtcctgagcaaggccatgtttgcatgaaacgatgaacgatgggatgaggaaatgacaacatgcagtatttcatcatagtgtaatccatgaagctactgacacgtggcagggtgaagcatgaggcactagactacataggacctgtatgacatgagaactgatggaagcatatgagcatctggggcatctcagagccaaaggtaaaattaaaatccagccaatcactaaagactaggttcctatgcagactttgaatttttaaaatcctgaagttctttatcattggactacagcatggcatcatcccgtacccatggttatggataagtatgaaaattatgagatttgaaatttataatttaatcccagaaaggggatcttctattttctggccagaggccaactctctggagatgtaacaaagccaacagattatgagaccctcattggtttgcttgaagcagagctcttgaaatgttgcaatgtaaataacttgtaataccaggaccactttgtcagcaaccagcaaaggctgcttagggatatagtgaatctgctcctcaagtaaatcctgagaaatttaatgtcctccaagctttcagctttctagctatggctcctttagcaactgctactgacttcatgccacaacaacaagaacaaaaatatggagctgcattcttttccattctccataaaaccagcatccaaactgcattaatatggatgtgtgaacatttagcactgacatacattgttcttactgaggaaagcattagacaaaatattttctcaatgaatcattagagtaatataactaagagaatattatatacatttagaagtttttttaatctaaagcatgagaaaatactgtatttgaaagttagaaaactgcatttagttatactaaatcaatctgactttcactcatcctcacaaaccccctttaccttcattttgaattagagagcttcttattgttatattatttataatggaactggtattcctggctggctaatgggcgagcacacattaattccaggttcaaaggaagacaaagaccctcttcagggttctttattgtttgtgcatctgagaaaatgcatttatagtgcagtgactctgtgtgcacactcccaaaggacagagaaatcatgcagaaacttcacatgcagagtttgcagaaagaaatgtcaactcatacctaacggccacggctgctgacataagaatgacaataattagactggtacatattagaagttgcaactgttcttagaagtaggtatttaattaatggcttgatttcatcatctactaagagatgggtctaaaaagtattttctagccttttttgatgggctaagaatctgtacggaggattgctctaggtgtgaaatatagcaataggtgagatcacataagggtatgtactgaattcacacaggtttagataagaatcctgaattaggtgatttaaagtctaagctacaataataaaaagaccctacaatacaaggctaaatgacacaagacattgccttctatttcacttcataggacaactggactaagctaggagattgtccacaagatcattcagggacacaagttctttccagcttgctactgaagtcttcactgggatattaacatcatctgcatggcgaaagctggcttgtagccttagctacaaggctagggcacagaggcagtccagggcaaacacttgcctttgagggtagtaagacaaaggtagtacccatctattctgctctcattccattgaccagagcttagtcatatagccatattgagctatgtagaggctgggaaatggtgtctggctggtgaccatgcccctaagaagaataaaactagtttggaagagacaaatagcagtctactgtcagacttggacttttcactattgagtcagtattattttcaactgggcttctgatgtcagaagcactaaactggcaagctccatttctgggaaaagctgttaatgaagtgagatagatttgctgcactaggctaaaattttaggtttgtggtttttactgatgagcttaaaaatgcttttttatttttatttcagagactgtcaaaagtgaaaggtagcttttgatatatgagaatcagttagacttccattgaggtattcaacaaacttacaactatacttatactgctcactaccagaaataaattaattttcttagaaaaccagctctatgtctgtaaaaataaaaataaattctgatttttctatgccagtccattttctcatgaacagcctgttctgcaaatcatccgggactttgttagtgtcatatctgcttcacagcttgaggtgggtgattgattgtgcagtcaggttgaaaaggaccaatccttgacagaagatggctaggggatcaggaagataaaggcatctggaacaatgaactttaaaagaactcagtctgttctctgggcttcttaaaaatatgaaattcttggccgggcacagtggctcatgcctgtaatcccaacactttgggaggctgaggcgggtggatcacaaggtcaggagttcgagaccagcctggccaacatagtgaaaccccgtctctactaaaaatacaaaaaattagccaggcttggtggcaggcacctataatcccagctactcgggaggctgaggcaggacagtcacttgaacctgggaggcggaggttgcagtgagccgagatcgtgccattgcactccagcccaggtgacagtgcgagactctatcttaaaaaaaaaaaaaaatgaaattcttaaaaactatcaggatctttagctaattattctttctctaaatccctttatctgtaggtagatttattcaatagaaatcactggtggcatgtcttaagatcaccaactttcttttcctttcctttctaggatagctggcaataagtagtgaccagctatattttttaattgtctccacattcaaatgccaggagccccatggattttaatcaggttttagaagcaggctgttttctttcttgtgtgttgtgcattcctattgcctcccccaggcctctaatcttgcagagtccccagaaattgctccattcaggaatgaattgttccattcagatttcttccttcacaggcacactctcaacccagggagggacatgagcaagccactcaggactgagcattaaatcacaagttcacagttgctttcttacacccagagaggcttttgtcttatttagcaccattgctaacacatctttagcaccttatttgcaatacaggcaagtttaggaaagaatgttaatataaagctggtttggcctgaatgccagggagagaaagtcacagtacacagtggggtgcatatgtgtgtgtgtgtgtgtgtgtgtatgtatgtatgtatcattaaaataacagcagcttctctccagagcaatgttcatacacaccattaaactaacatcctttcttgcaaaaagaacacccacatataggaaccatgactcctctatgagaaacataaaataaaaataaatttaatcaatagtttgtgctagtaaatgcctaaagataatgtttttgtgtggtcactttccttatttttttaacacaacatccattgacctatactgaatgttccatgttgtttgtacatactagatattgcagtagtaaaaagatcaaaactggggagaggcaaaggtatttttaaatttatttaagctttaatttattcagatatgtaaattttatttcagagctagaatggttcattttcaccaaagtgtactcattcattcattcatttattcaattataaactaaatacttattaggcactgttaaatacttgagagactacaagcaagtctccctattttgaagaatctaactccataactcagaaatttaaaaaaatactcatatataatgcttttatagcaatacaaaataatattctttagaattaagagccaaatgggcagtatagataccaagaagatgggaaatagcacttgaacaaggtggaacttgagctgggagttgaaagatggacagattgtgaatttgtagaaaagaaagaaccagcctggccaacatgatgaaacctcatccctactaaaaatacaaaaattagccaggtgtggtagtgcgcgcctataatcccatctacacagggggctgaagcatgagaatctcttaaacctgggaggcagacgttgcagtgagctgagatcgcgccactgcactccactccagcctgggtgacaaagcaagactccatctgaaaaaaaaaaaaaaagagagagagagaaaaaaagaaaaggaaagaaagagatagtattcaaggcagagaacatagaaaaatgttcccagatgatgagttgggattgtatgaagaagtgtgattaacataaaaagcagaggagtagcatgaaatattcctaggaaggtagtgtgtgttcagcctgagttggcaaaggtgaggaggtataagtggtgtgctacaaagtatatcaccctgaaaactgactccaccatgaagaaagtataggagggaaggggtgtggggcagggagtatatatatgaagtctgtatacataaccaggtttctaacataattattttaatttctagtaaatgggtatctagcacccttctttttgtttttctgttcctttaagcattctgatgggtagacagattctttgtagccaagagaaattttgtaagggaaggtggaaaaaatatgtaaaagagaaagaggaggagaatctaattctctgaactgaacattagcctagaagtgaagggtgctgacattgaaaccagattccctaggtttgtgccccacacttccattcactggcttgcaagtttacacaagatgtttaaactttttgttccttattttactaaacagtaaaatgatgataacgttagtcccatctcatagggctgaatattgagaccaaatatgtaaaattcttagaaaagttcctagtacatagtaagtgctgctgaataaatggtagctattgttattctaatgaggaagaaggaactcaggcaaccaatacatcaattttagggtgagaggaggaagaagaaactgaataaaaatctgattttcttggatacatttagtattaaacagtgctcatcaaactgtactacttcataccaagatgaaccacaagctccctggatacgtgattatttaagaaaagaaaacccttggttctgttagaactgagtttctcaactgtgacactatggacgtttgttgggaaagaaaggcagatgtcctgtgcatggaaggatatttaatagcatctctggcctctatctatgacatgccagtagcctctccttccctcagtcatcacaaccaaaaatgtttccagacagttttgttccccagatgtcactggggaacaaaatcacccccactcaagaactactgtgttagaataatcagatggaaacccattgcttgagtttttcaaacacaagaatgtagccaaaatcaatactggtacctttagcctacacccactcaaataaaccagacagctttcatcacaatggacctcactgagcagaaaccacccatcccatatgccagtgtcaaaggaaggtaagtggtagaatgcagaggtaccaacagggaggaggaattggaaatgcgttggtgacttagcaagatttgaatagtggtattttctaagcaaccaaaatcgcctgagtaatataatcacctctgtgcttctgtagaatgggaaaataaaaataacaaacaagaaagggttgctttaatctgtatctcatgtgaatccattagacacttgctgcttcttgcttttcctgggatgatttgctttttaaagcagcaggcagcatatcagacaaaaaaacatcatggcctggatggtctctgcagatgggaagcaagacctttctgactgaaggtgatctgtctctgcctagagagttaatatagccagagtttttcctatcataatgtatcaactttagaaagattaatttcagctaaatggatatatgttgtgagctctgagaacattgaaagccccatgctaagttgcagctactatgcagtaggtcttagtcatctcaggctgctgtaacaaaataccatagactgggtggcttaagcaacagacatttatttctctgagtttggagtctgggaagtccaagatcaaggtgcctgctgagtgagttcctggcacgagctgtcttcctggtttgcagagaaatgccttcttgcattctcacatggtagagagagagtaggagatttatgtctcttcttataaagggattaaaactacaatggtgggggggcaaaacatatgaccttgtctaaatctaattacatcccagagggttgacctccatataccatcacattgggtattattagggcttcaacatatgaatttgggggaagacacaaaattcagtccatagcacagtgggtactctccagtagaataaaaaaaaaaatttaagaagaaatatagtaaatgtagaaaaatacagactctgttcagcaaaaccaatgtattcaaaattctaaaactctagtgtttactgagatatttgaaataacttgccaggtgcggtggctcacacctgtaatcccagtgctttgggaggccaaggcaggtggatcacaaggtcaggagatcgagaccatcctgcctaacacagtgaaaccccatctctactaaaaatacaaaaaattagccaggcgtagtggtgggcgcctgtagtcccagttactcgagaggctgaggcaggagaatgtcgtgaacctgggaggcagagcttgcagtgagcagagatcgctccactgcactccagcctgggtgacagagcaagactccgtctcaaaaaaaaaaaaaaaaaagaaataactttagttggctataggcaaaacaaatgatttgtgaaatgacaaaacatgatacaggatttctggagaatttgacacagtacacagagaaaagttgcagaaagaataaatattctttcctgactccaaatgagaaaaggtactgctcagagataaaattaaagacaagaaaattggatatctgtttcaggaaataaaactaacattttaaatcagattattgaagtatcccccaaccttattattttaggttgatctgctaagtaaacccattgggcaaatcttatgcaggcaggtagctaaattaagtggcccaagaattcttttcaatttccaatttctttgacttataacacaattaagaaatttataatgaggtgaaaaatagaattacttagaagggatattatcatatctcatttgtatttgatttaaactgaaacctaatcactttgaaaagctttgtgctgactgagttattttctgctacgtggtggatgctctttcttatttgttcaccatggtctgcttttatttgaaatattatggtatttaataacatgtctagccataaccacagagtttcttacagcttttaatatcagcaacataactcttctactctcttgacttagcatttcaaaagtgaggttcataaaaatcctatttgtagagcaaacatctaactccaatttcatgtaccaaatttggtagccatggatttctttatctccagtgcatttgcattaacataagatgataatgttgctagcttctctaccaaataacattctagcataagccacagcaagggcaaaagcccagcaaaattcaaggatgtgacatacccagagaatgctaatattcagtgtagctgaaaaactatgtatgaatgaaaaggaatatcaaattctcgtgtaaaatacttattttgagtttgaaatacttaattgtgaccaaaaaattgtttcttttcatataaaaatagaaggacatcctggagaactgtggctgtctctggaaaaggtacttttgacttcaaaatgtcactgaagaatttgtgccagaagcctccttgaaggcacacttttgatgaaagaaaaaaggatttctggttttgaaagctctttttctcagaaaaaaaaaaaaaaaaaaccttagcagaggcacaaattgaaaaatgtacaatatatgatcattgaatctttttaaaagttagtgctaggcaagaaaagcaatggaagaatttcagacactacaggaaactcctcaaattcatatttccctcttactggccttgaaacttgaaaatgaatgcagatttatgtgtccccacccatcaagttcacacgttgaagccccagtacccaatgtgatggtatttggaggtcaagcctctgagaggtaattagttttaaacacggtcatgtgggtgcccccctgacacacaccactgtgggattagtgcccttgtaggaacagacacaagagaaatctctctgcaccagagagagatccctcaccaggaactgaatcagtcttactttgagcttggaattcccagactccaaactgagagaaataaacgtctgttgcttaagccacccagtctatagcattttgttatagcagcctgtgctaagacatactgcaaactagtagacagctaggaaagctgatagttatattaactttattatttactgttcttccgtttcacattgtttgtggcagatgaagcttgcagaacagttggagcaataaagcagcccaggtatttgtggtgttccttgacccacaggctggggcagccacccagcagaagtggaacaatagagctgttgcccctcctagagaagctgctgaaagccggggagaaacactcaaagcttcacccctcctccttcagtccagtctcctgccagtgtctcccatcagaaaccagctggcaaggcagccaggaaaacacagactgcaaggatcagcctcttagcatacaggacacagcacagggagggcaagaaacatattcaagagcaaacaaatgacaggcacaccttgaaaatagtggtcaagagacaaaagtgcttctactggtacaaaagtactctgtgtgctctctctctctctctcgctctctctctctctctctgtgtgtgtgtgtgtgtgtgtgtgttttcttagaagttactttgttttgttttgttttgagatatgatcattactatttaatatgatcttctcaagaagcccggtaatattggacacttccttctaaagcagtgatagaaggatactggtatacttcaagaatggatggtaatatatgcatgagatatatcttttagttcatgtattgctcttaggcatcagttgtagcttgcctcactgtgtcacccaggctggagtatagtggcatgatttccactcactgcaacccccacctccgaggttcaagcgattctcctgcctcagcctcctcagtaactgggactacaggcatgcatcaccatgcccagctattttttgtatgtttagtagagacggggtttcgccatgttggccaggctggtctcgaactcctgacttcaagtgatccacccgccttggcatcccaaagtgctgggattacaggcatgagccaccgtgcccagccccttattcactcattttaatggtgcacttctgaaatttgctcccaccaaaacggcacaaccatggccttgtcagcctccaaggaatgtggtgtgaacatggatcattctaaccatacggaggcacagtaagaccaggacttaatttgagcctctgaactgagcatagggtttaatgaaccacttctccactgtgataaagtatactagcaaaactgctatggtttgtatgcacagcctgcagctgaacccattacaggatgcattatttgataggaggtctgaaagactgaagagcaattactctctacaaccaagggcaaatggcaactgtggagcttggccttttctcatttcttggtttcctgaggtcagagttctctacaatgacaaaacctctttgctctggctcatttgaaaagcaatgtcattttaaaggttagattttgcgtgtgtgtgtatgtgtgtgtatgtgtgtgtgtgtctgtgtgtgtaagatagagagaggattttatagtgatttttatgacaatcaattaaaaaaatgctttggaaacatttattgagaggggtcacaaaggtaaatgtcgtgttgaaaggaaacagatagttctggctcttccaaatctgttttaccagaacccaaggcctaggaaagggacaacagtcctcgatgaagtccattactgggccctgagaataatctttccttaccttcctgcatatcattttcctttcctcctctctcccctcccctttccccaagatacagagctggctgggaggccagcttaaccatgtcccaccccctttctctcactttgccccaggacagtcagagctaaactcacaaaggtgaagcactgatacaggccccaggaccaatccccagacccaccctccctccactgcaccacaggttcccactgccattaccgagcatggtgccccctgaccagccttcactcctcagcccttctgaaagccccccagctcttcaccccagagaccccagccccattcaagtacccatggtcctctgcttcagtctaggcattttcctgacatggaggctcaagctcacttatgaatatttaaagactcatgatttttttaatccttgaaggctactgactttctgagcccaacatcatcaacaaatagtaagggagtcataaagaaaatgctttgctcacctttcatctttcttttgtggcaagtaagaaaaaagaaaaacaaacctacttctcacaaaacctggatgtgactgtgtgttcaggaaaaaagaaagagatgggggctggtggaggcaggagggcagatgacaaaggacacagcccaaggtcataaaagggggtggaaagagttgtataagccttcactcccacctctccacttcccagaggtccagtccctgctcctcattcctcccgatgccattcctggtgcttgttggaaaagcaggatctcaggccccaccccagacctcctgaatcagatgatctaggggtggagcacaggagtaggttttagcaaactttccaggtgattctaatgcctgctaaagttgaaaagcaacaccatatggtgcagacaccagtgtcttgtgcactgttgtttaataaacaaacacttgctaatttaagtatatttgcaaggtcttggtgtggcccagactgcaagctccctgagagcagagaccatatctttcttcatgcctgacaatgcatttgttgaagggaaatagaatcagatagtattttgcttttgtttttgttttccactttaaccttttctaattaaaagtttcaaaacagcaaggaaaatcacagtgagtgttgtttagagaatggttttgagataatatatcaataccatgtgaataattaataacatcagtttaccagtaatattaataccttccagtcatatagtggctctgtggttttgaaaactcttccatgaacatttttcatttgatcctcaagaaattttggcaggaaaatgtataggtttctttctttcctctcatagaagaggaagcagaagttcagaaaagctgagaaaatagtcttggttttcctaattaggtacaaaaactggaacccaggactttgagctcctactccattggaaaggtttgtattccagttctgttatatgttatcggattgtttctagtaacttacccttgtaagtctttattttgcagtttcttcatctgcaaaatgggaaaacaatggttcctattttaaaaggttgttgtaagaattaaatgaaatgataaaggtaaagcactcagcatagggctggcacaaagatttctttattgttatatgtctgaatttacatattattcatacaatcattatatatttatgattattgcaccacactgactcccactagagtgaccaatattccatacatggtttagcaaggctggggtcttcctcgtttcagaaggtgttccttgctaacttaacaggacatttaggcctccagtctgcctttcatgccaggagtgtttctcactgctgctccccaatggatctttatgcacgctgcaggttgggtatcttctgtggtcacagtgcttaccaccctttctcatagacaggttgcctagtcattccaagcacatgccttccttagccattgtattgttaagttgttatggttaatttatatttatatttatatatatatatatatatatatatatatatatatatatatacacacacacacacacatatacatatggtagaaccacagcttttatccaaatataaaataaacacatgtcaaagatattatttaattctggacttaaagaagggaccagtaagatgttgcataggctcaaggggatattcagtgaatgcacacatacaggcaatcaggaatgcagaaatgaatttaccaagttacaaaatgggttaacacccatggagcaagaatcagatgcatgccaccaaacacaatttattggcatttctttctatttgcaagaacttgtattattattggttttccaccacctacagagctataaaatagctcaaagatgacaaaagcagagataacctggaaagctgtgctgaacagggcccccagtcatcttttctgcccactttgaagtctttcgcaatctttcctgacagtgggatctcaaaagagtagtttagtgttggaggaagagaaggtatcactatatccagttccctgcctagaaaagaggcttcacagtcctggtcttcaaaaggcccgagcgagttttcttctttggttctcttcttctcttaataccctcttccccttttcctgaagatttcatctcaaagttctacaaaatccacaaactcaaagtcccactccttctccttggaaatcccaactctcccataggactcccttggtcctgtcttaatatctcacaaacctcggtgttcaggctttggctgaatgtctgtgaagcttcttttctcagccaccaggaatacaaagtgggaagagaaggttctggtacctaagtgagggcaagtaagtactgggttctaagtttagcttccccttcaacaagcctgattgccttcccactaacctaagaaggaagcatatcttgccaaagatcactaattcccccaggacaatataaatcttgtctaatttgagagaaggatatttatttctaacaacatgactttggccttgccctgtgaaagcataacccagtcattcttgagctgaggaacgtcttaccttttcctaggtcagactttcattcctctccctttgttgtccagaagggtggtccttgcttcatctagttactgttgtttttcttccttgcatagaagaaaagaaatgtccagttgtttctaccacacatgtggtttaaaaaatagaatttgacattttataaaattaggagatcagaagttgtaagacaggcatgatggaaataggtctaagtttagatttagactaagggagaattggatgtggtgcaaggtagttccaggactaggtggatcaagaacactgcttcttgagctctcgaaatatgttctcagtactggctctctgcaacagacttaccacagagaggtggatcaaacagatccttccagaacatccagttctgcttgcttccacatgcagctgaattgacactcctagatctatgcatattgaagcatttttggtttttccaggagatatattattttctactttaaaagataatcaagcatatgaatttcttaccaagttccacattcaacacaatgtaggcactttccctcctgtgcaagcagacagcacattgaagacaagcattcacaggagccttgggatatagacccacactggccacaaagtagttgagctatctcaggcactcacatttggagtttcagctttgtcatctccaaaatgaaggtgctggactggggttcttcaaagcagctcttccacaatgtcaaagtgctaagtaactcctaagatatcctcatcctatctgtctgtgctagatcagaaaggaaaatgtgacttctccagcctggggatgaatagccagtcacacagatgtcctttgcagactgtgatggggtgaacacttgccttcccttactgcagacagtgtcagggtataaaaggttctgtggaagaagctgccagcaacacaccctaaaagggatgcattggggcactggcatcacataagatggtaatttattttgtgcttatattctgagtcaggcatttttgccgtattcagtttgtcattcactcattcattcaatctctaattctacattactgtttgagtaccttctatgtgccatatattttgctgaattctggagacttaatgatgaacacacagttgaggtctctgtcctcatggtacctatagtcaaggggggatgtgaataagtgaaaaagttatagtgagtgatgtacaaggcatatgtgggcctgcatgagtggcaactaacccagaggaagatggaagagactaagagggcctgacacagaagccataaatgtgttttagacagatggtacatgtgatggctacaggtgatttcttgcaaaactaatgaagcttaagtttagtggtgtacccataaactggctctttgaaaaaaggatgaaattatttaataatcagtgcttttgagccatactgccagctccagaacacagctaaactttgggccccttactaagacaaatcccctcttagtgtcttagtaattcccctagagcaggctctgagacaggagtttgcgcataagtagtttatgtgggaagtgaaagaaatacccatagcaagagggtaagtgggctgtgaaaggcaagacagccaataaaaggtctgtgttcaagccacctaccattatgggttaccagagcttaatctttctttaaaattctgagaatcagtatggtaacaacctgaggagaaagggagctggggtatctatactccaacttctgtcagtcattggctcaggtctgctcctgagtgtgttattttcctttcatattttaccttccctgacagggggagtgaccttccgttgctttcacgaaagctgtaaagcaaagagatgcagatactgacagttggaagtcagccaacaagcacagaagtggtaaggcctgggggatatagacagtatctggtacagattatcccatacttaattatgtatttgtaatttgcgttttacttaaattgggccctcaaatttttatgaattttagacctcacaaaacctgaaaccacctatagtgacaggcctaacttgctgaaaatacagagtgtatgggaaaatcaaagaaatttaaaagcccgtatcagaattggaaggaagacggagggtagcaagagatgaaactagaagctagaaagttgaagctagaagctagaaaggtaagccaaggccctatgaagggtgctatgttaaactgggcttttctagatttggctgacatttgttggtgtctgcagaactcagctgggttccttggggcatctcatttctgggacaaactgacagagcaacccctttctgggatgggctcttcccaagatgaagaataagaacccaagagggctgatggaagctcaccatgcctctgatgtctgttaatcacagcagcacaggtcaaatctccttatattccattggccagatccaaagttagtagggcaaggtacacctgcagggaaggacataatgactaagtaagaactgtaatacagcctactactggattttcaccaaaatgttaatagtggagatagcgagatttctgatcatttttcctttagcttttcactattgttagaatttgtaataagaatgtagcaattgtaccaaaaaatatgaacctattcttctaaataataaaagattatatcaaatattgaagagcatttttaaggatatctttttaaatttttccttttttaatgtgttatttataaatgaattaatatacatataaaaggcctaccccctaaacttcctaaaactacctattagcatttatagcatgtgtaactaatcagactttattatgttcctgtttctggtttcttagtattactctcattaaatttttttattttgtatatgtctttgtaaatcacctggaagtactttgtgatgttagctaggaaataaagaaatagattatttagaaactagaaagaaaagtagttggagggaatcatcctaataatacgcagccctgatagcatatacaaatcacctggagatttctttttaatacctctgatggagactctagaggttctaatttaatgtttctgaattgggctaatttttaaaagctctctgaaggttgagaaaaattgaataaataaatgattaaattaagtgaaaaaaataacaaaagggccaattatatgtgaagagcaaaagcaggttgggaagtttctttacaaacttgaagtaggctgtgatactaaaaagccaaagctcccaaatattaaaaagaataagggaaatggatgcagtagagcaatattagcttccagaattagaaagggcctgctattaagatctgttcgagcttcgctgggtgaggaagagtgagtcatattctctctgatacctcatattcccacatacatcccaaatcagaccctaatcgacaattgtttttgtgggtcactgaggtgcattttgtggactgtttttcagaacattgtgattaagcaaaagtctgtcattctccatgagaagaggctgaactcataggcgattacttacacacccagaacaggagagaaggaatactagaaatattgtagaaatgcggtttgttcacttgtttatagctcttcagacttaaattattttattctgtgcagagttcagttgtttatgtgtgaaacatcataaaatatcaaaagctcttttatcttgatgtctcatcccagcttttttgagactcctctttaatatttgataagaaccaaaatagggataaattatgctttcctcctctttcttttttacgtttatacataaatgttgagagaaagcttgaggtatttgttttgttttgttttgttttagctaaatggcaagtaaataacaggctttttagtaactatgatctggcactggtaaggtctgagttaactgccatttgcagagtaaccatggtgaccagcatatggcttctgattccattaatcttgttgagattaacagtaaatcccaaaggatcttttgcagtgattcagaaataaatcatcttttcacatgtatactgtttggtgacagccactcgctttcagtgtgtgtctctacccaacaaagaaataagacagtctctctcatgagatgattggaaatgtgtccctcaaataagaaatttcacaaaatacatccaatggtgaaaaggtaaatacatataaataccatgtgaaaggaggatttattcaacaaacatttgtcatacccctgatagacacataaggggaaggtcatttactcccagttaaaaatttatttgtatagaacctcagcctggagatatggaatggaaacaaaatttgagactctttaatgaaaaaaatccaattattatttcaattataggaattagaaatgatgaattaagctggatttgggaagaggagcagctggctgcccaagaggagactaataatgtgttctatgtgtaacgagatgttgcaacttaaaaagtacagtgtggccctacctaaaaccatatttggcctacaacagccccagagcatgtaaaataatagcctcattttacagatgaagatactgaactaaacaattcagagtgacttccccatactcactaagtattagagctttctcaaactggcggaataaattgttgagtctgagttggaagggatgggaactgaattactatcccagcattcttctgatgctaattcctattacagtgtagacaaaatatgcataactgtgggtctttctcaactcatggagtttatacttcctcatctctaagttttccttggttaaaggaatactccgagctcttatttcaacctagaccttcctacataaaagaaatatcaagaacacaatagcattttacgaattctaagatgcacaatttttcttacttacccatctacggctgggcacggtggcttgcgcctgtaatcccaacactttgggaggccgaggcaggcagatcacttaaggtcaggagttcaagaccagcctagccaacatggtgaaatcctgtctctacttaaaaaaaataaaaaaattagcggggtgttgtggtgcatgcctgtaatcctacctactggggaggctgtggcgtgagaattgcttgaaactggaaggcgaaggttgcagtgagccactgtactccaacctgggcaacacagcaagactccacctcaaaaaaaactgtgacattgagatatgccttttcatcaatggcttcttatgatcactatgcagcaagaccaaatgtagatttcattgctcgtacatgcactaacttggtcatagctgcttatattgccaaagtcatacagttattggtacgtgcatagaaagttattgtgtatgcagaaagaggtataaatttcattttagtgacatgaatactcattttggagtaatgaccatcattttacattttcttgcaaagcaacaacatagtgttctacaggacctaagaagggaagatacaaacagatcttgtatgttaacctaccatgcactaagcactgaaacttaaaaaaaaaaaaaagctaaatctttcagaatgcatgaaaggaatttcaaagcaacaagaagctgacataatttaatttgctacatccttttgttcttggccattgtaaaatagttttgatcctatcatttatattaggttttatgataggtggtaattcacaaatcacccaacatggcattgatctcctcttgctgatggtgggactgtgcctaaagctcccttccctgctctgctggtgcagaacaacatcaggaagtccaagtagtcaaaaccaaagccaaacattgaacatttgcaaccccaatttcaatcataaaattaaccaactctaatggcaaatcagtcttttgttcatcgtagcacaaatgctctagaccacaatttttatttcattaaaaagaaaactggtctcctttggctctctaagatttcaaaataacgattctttgtaattccctagcaattgtagaaaatattcattttacattatttcccgacaatttagaacatttgaggttacattgaaatatttcttatataagagcaaatgaagaggatggatctcatataatcatggccaaataagtatattcttcttggtcatatatttttataaatcattgaggagcagggaatgttgtatgtgcataaatgtataacctattacagcagcctgagaccccatgggttattattatgtcagcagaactgagatactcggatgtgtttagtggtagaagcaagcattccattaatttggttaagggacatgaatcagctagtaggttgtgagttatgtaccttcctgaccttcacaaaaggacaccctgacttgggtttatacagtcaggggtgcagtaggatgtactggcccaggtcagaagagtgccaaatttcctcaaggactcatttgtcctcaggaaactcagaagctgggtcattaacaccctggccccaggtccttccttacacaactgtgacactctctggtgaaccccttgtcactaatctcactctgggtatctgatttctagctttactaccaggatgagaactttttctgttaacataagtgctctctacccagggcctttccaagcccctggcttacaagacctataggaacaagagatcatttcttttaattacatgaagaaatctgatcggatgtgagatcctttaaaagaaacttttgacttcgtttgtaaaaatatattagcatttgttacttaaagtgtttccaagagtggaatttattttacaccctaattcattatgaatgcatcatttttcatattctgtgtacataagattaagtgaggaaaaagaatagagtttagaagttctgtctttatttctccagtcctgccaaatctcactgttgctaagggaatatattattaacttaggtatcagaattagaaaggtcgtattgttctgataaaatatgctatgactctgagatgtccaggtggaatcaagaatatatttccccagataatttaatctcatttgaaaacttagatgtacttggttcaggggaatatgctgaaataaaaccctatctgcctcttcactctttcctttcttctcaggaaggagaaacagtgatcatagctcattgaaaactctcctgctgtagtttaaaaagctataatatttgctttttattccctcttcaagttgagaacagctcattgccactttctattcaatgatccttcacttgactattgtttgtaacaccattcccaagctttactttttgacatgttacaaatctgttttttttcaaactttaatcatttgtttacgtttcaacatttcaatatttctctcctgaccaccaccaggtaatatgtctttcccacctatcttagactgttcttaaataaaaatgtggctgatataaagggagaattaaaaaacatagcttcctctcagcttcctgtagataacaataaatgcactagaacttcagtttttgaacttttaatgagtatcatggaaatatgttttaaagcacaggcttgagagccatactgccagaacgtgactcccacatttgccactttactggctgagtgatcttgggcaattaaccactctatgcctcattttcctcaactgtaaaatgggcataataatattctccttaagttattctaaggattaaattaatgcaacagatattaagtgtttagaaaaatacctgcgctttttctctgcctggcattgctgggcctgcaggtctgtgtcaagccatggatgagggtctttgttctgcagaatggggtttgttaaagttgttaagaatgaggcctatttaagagataccaagtgaaatttaggaaatgacaagagggtagaactgattactatactcagaaacactctgtgatacaggataaaaataaatacaacacactcaaatacagggtgatagtctgtgtaacaaacagagatatgatttgtcagattacttatgcccatatagaaggggatacggtagtctgcgcagcatatgtacatggtacatgaactaccaaaataaggtgtgaaggttggcctgacaaattatgctgcagcacattatactggcctgccactggcccacgggcttctcggtaggtttggcatggacaggatctatgaaggccaagtggagatgactggagattaatgtgatgtggaaagcattgatggtcagcctggtgccttcacctgctatttggatgtaggccttgccagaaccatcactggcaataaagtttttggggccttgaagggagctgttgataaaggctgttctgtccctcacagtaccagatgattccctgcttgtgattctgaaagcaaggaatttaatgcagaagcgcatgggaaacacatcatgggtcagaatgatgcagattacatgcattacctaatggaagcagatgaagatgcttacaagaaacggttctttccgttcataaagaacagcgaaacttcagacctgatggaggagatatacaataaagctcatattggctgggcacggtggctcacagtcccagcactttgggaggctgaggtgggtggattgcttgagcccaggagttcgagaccagcctggacaacatggcaaaaccctgtttctgcaaaaacaatttataaaaattacccaggcatggtggtgtgcacctgttgttccagctactcagggggctgaggcgggacgattgcttgagcccaggaggtcgaggctgcagtgagccaagatcatgccactgcactccagcctgggtgacagagcgagaccttatctcaaataaataaataaataaaacaaaaaagctcatgttgctatacaagagaatccaaactatgagaagcccaagaaagaagttaaaaacagcaggtggaaacatcccaaaatgtcccatgcccagaagaaagatcaggtagctcaaaagacgggaagcttcctcagacctcaggagcaggctctgagagctaaaacaatgttctaggatgatttttcagacaaaaacaataaactttttttattttattattattacacttagttacatatgtatacatgtgccatgctggtgtgctgcacccattaactcgtcatttagcattaggtatatctcctaatgctatccctcccccaccccccaccccacaacagtccctagagtgtgatgttccccttcctgtgtccatgtgttctcattgttcaattcccacctgtgagtgagaacatgcggtgtttggttttttgtccttgcaatagtttactgagaatgatgatttccaatttcatccatgtccctacagaggacatgaactcatcattttttatggctgcatagtattccatggtgtatatgtgccacattttcttaatccagtctatcattgttggacatttgggttggttccaagtctttgctattgtgaatagtgtcgcaataaacatacgtgtgcgtgtgtctttatagcagcatgatttatagtcctttgggtatataccctgcaaaaacaataaacttattggctaagcaggtttaaaaaaaaaataccctgcagaagcaaattattacatttattatctaagttccaaaatcaaaagttggttatttgtgtcatgaatcatactggaggcttattctaaattctaaatatcctgtttatagcaacttaaaatgccagctcattgtattataattttgacattaatcaacctgacatttttcttttataaaggtaaggcatgaacatattagctctcatgattctttttttaaaaaattattacttctcccagatttcctaagccccatttctttagctctttaagttgttactgtgataagggaaaatattgttttcgtgtgatgtgctgtaaataggttgggcagccatctcagtttgcctgaaacggaggggtttctcaggacatgggactgttactgcttaaactgggaaagtcttggggaaaccaggatggttggctatcctactgtaaagctattacataaggtggggtaaaagaggaaaggaagaatcagtagtggtattaatctcattaaatacaaaagaattattagtacaccactgttcccttgatttttgactcatgcaatctctgatgagtatctgaagggtaaaattgcactcaactaattaactctaaatgtcaggcatttggacatcgtgttttttttttccttttgctaccatcatcatctgtggaatgtatttcttctccttcattttatgctgttctgctttcctctgattgtgtcatgcttcttctttttcttttaggtcaactcaaatcaaaacatactcttgggacaatgcccaagttattctggttgggaacaagtgtgacatggaagacgagcgggtcatctcaactgagcgaggtcaacatttaggagaacagcttggtaagaaacaaattaataagttaaaaagaaagataatttgcttattatatgtaactctgtacagagtccgagctaattgtcagggtggagttaatgaaatgtttgtcaatctaagagtggaaagcaacataatcctccctaagtggacaatatattttctcccacttactatggcatcatgagagctcaagcgcaattacagaagcaaaaatgatactcagaattttggtcttagtacaaggtatttaaattcttattccatgagaaacacaggttatgccttgtccgttatttttggtttttttcccccatactctattttgcattcagtgagctctttattttattgtgtgattattgttctcaagtttccattggaggaggataatggcacagaataggtcacatcctagattctgattctagtgacatcactgataagccatgttactgttacaaatccttttgagacttagtcaccccatctctccagaatgagtatcatagcccgtgcctatttaaccaagtccttgtagataagatcaaatgagataatagatatgagaaagtttcagaaatggcaaagccatttcaaacacaaaacattgtatctaaagagaaaaatgctggagtgagaagggtagagatttaatacaaaggagggattgatgattgatgattgattgattgagccaagaaatttttactgggtactcgttgtatgctttatattatgccaaacatcatggggtatacaaaaaagtaattcacagtccctaggctcaagttgctcccaatcgagtggacactgaagactggagatatacataaggaagcagaaatacaagtcaacaaaaacaggtcaatgaggagataagctgcaaggcagatgccaacaggaaagcaacagggagagggaggcagacacaggaaggggaaaaacattgccggaaggagatgtaggagtggagtgtgatgggaggaagataaagagcaatgcagagagggcccccggggagatcaggtgtggaaatgaatacaccaagaggaagagatgagtgatgaggggagatggagatcatatgggtgaaatggcaagatacagcttgaatggtctctgaaggagagtagaatttgcaactacaaaggagatgaggcattatgagtaaagggcacagtcatgcatggacattgagatgagcataaggtgagaggacagtgaatagaaaagtgagaacctagcagaaagttgcagaactgagttgtggatttggggaacaactccagtcctagaggtgaaggagttggaattctttttgttttttgtttgtttttggtagaccactgagaatattgaggcattcttagcaaagaagagtttgacttttaacctttttggccaggacctgcagtaagaaatactttcaatttagcaacccaatacatacatatataaaacttctgtaaaacaaaagttttacaaaacacattttaactttacttgatgagattcactctgttttctgtcttacttttctttcttcttttttcttaaatggtggtcccaacccactaagttgatccccagaagcagtaatgtgtctcaatctataatttgaaaaacactgttataaaggggatgatttgggattaatctgctggtgttgtgcaacatgagtcagaaaagcaaagtccctctcattgggtcactcttcctcttgatcatctcataactaatctaaatacagttcactctgaaagtttgaccatttctcatgagcttaatgagttccttagactaaaatctatccctggatggccacaagaacccttccaccaaatattcttagagccacccaggagaaagttacctggctggtgtacggtctcctgtggcagcttttgaagttaccatctctgccacagggcctcttcccactctaccgattaaacaatatgaagagtctgaaaaaatgataattttttttcttaatcctcttaggacctcagaaagataagaatgggaaataatagatccccaaagaaagagagggaggaaacctgggagagggttggcaggttggcttcccaagatggtctcttccctgtcttcctgtgttttcttaactagctgggcacatgccaggatggggaagaaactgctacacagatgtaggctgtctctatgaataaaaatgaaaactgtttggttaaaaaatatatatatgtatctccaagccaagaattgtttaatgtcattgatacataggaggcaggcaactggctaaattttttaacactctaataaattacttggatattgagaagaccaggttgtgaaaagggatgttaggatgatggaaatgcatcaatagggtgactttcccactgctccatcgactggcacacacacaaaccctttccattcagtagacagatgtagcaaagttcctgaaattgtgaagcagaatgttttatgttcctgttcaagttcttccagtggtttctaattgattttttgctctctattcaataaaaacccagctgttgtcatagcaaccaacacatgtgcattcttggagagtcatttacctcgtttaatgtggcttgttctcctcatggctacacatgcttctacaaatgatcctgagggacaatttgtatttttaaaaaatgctctcacaatttaaatttaaagattttaaaggtctttgctttgttttttaattacttgtacattttattcttcagaataccatcacatacacacaaaagttgcacattgttttttaaaagtcattaccacatcttggcagatggctcgaaataactgctttatcgatctggtagcaattaattctccattgtggattgttttttctgtacaacatttgctcatcctaatgagggtccttgatggaaccaagttgtaatggagctctttaaaaattcttgtatggcagctgtcggtcgcaatccagtttagttcatcaagcatttattaagtgtttacaatatgccagttactgggaatgcaatgacaaataaccctaccttctaggagcaaacattgtaatgcctgagatagactacacagacaaagaatatttttctggctttccctttctcagccattttgtttcatttgatcctttgagcacccctccttactgaatgctgcttcgtcagcatttatgacgtggtgctctctgttcatctcctccctctccagacttgcatttagtttccttggtagactcctcctcctttatccatctcctgcactctggctttctatcctcagtccaccactcctctctctctacaccctcccttggatgtttccatccactccaaggttttaactgcacctccagactaatgactgccaaatcatgtcccaggcctgacctcacactggcgcttcaggcgccaacatccacctgccagctgtgcatattcagtacttctgatttagagtagtggtctaatcatctgcagctgaattggctggggttcattttcaaacgcacattcatcaacccaactcagacctgctgcatcagagtttttgaagttgaaggctagactctacatttttaacaagcatttttgtgacttttatacgactaaatttccagaacactggcttttgtgggaagcgagtgtttggagagggtagggaattattgctgccagagctgaacattaccctatagctggtgttattttaccatgctttttttttttttttttttttggatggagtctcgttctgtcacccaggctggagtgcagtggcgtgatctcagctcactgcaacccctgcctcctgggttcaagcgattctcctgcctcagcctcccaagtagctgggactactggcacgtgccaccacgcccggctacttttttgtatttttagtagagatgggctttcaccgtgttagccaggatggtctcaatctcctaaccccatgatctgcccacctctgcctcccaaagtgctgagattacaggtgtgagccatggcacccggcctccatgagtgttttaacagttagtctatatgtatgtacctataacaatatataagaatgtttttaaattctatattaaatttatagtatggtacttatatatgtacaatctcataatttaagttttaaatgtacaactactgttttaaatgagaaaaaaatttggagatacaattaaagatagattttcctaaaatagaagtaatttatctgggaataagaacaaagaaagaaatttatagaggaggatggatttgtattgccttgaaaccacaggtgaaagaatacttgaaccattattataagctcggaaagggcagaaaatgcagaaactcctgttttccaaaaatgtagtcagagaaccaaagactgcagagaaactataattgcttctgaggagaagtcattattaataatttgtaaggagccaattttaaagcgttttcaatttgcattaatatttcttcctaaaacaagtaacagataatattcccaattctctccactcaaacaattatcttaatagcctctgaacatacgtattaccaaattccagattcatcccccgtacccttccttcttgtccagcactgaaccccatgagaatttctgaaagtacaaaatattcttatattttgccattttaccaagctctataatttttcttcccttcttttcccatttaatggctcttttgattattcatctgacaaatatctataataatactgcggagtcataaaacgtgtatcttccctctcacggagcttaaagtgtggactgtgtttcagaaatagactcaaatattatgaacacgtaaacagggctgagtgtaactcagaggataaaggaagggcatgaagttctatgaatgggtagttacttctctttttggaaaatgaagaatgacaaaaagatacattctatgtctatatactccgaaacatattgatttgataaatactggcttaattaaacaatttcttcaaggaaataatctcttgaagtagaaagagatacatttaagacaaatgaaaaaggatattctttcacctaacaaagaatatactaatggaaccaattatctctggaagtggaaggtagtgcaggcgggacatataattacttcccaaaaggtctagataaatcaatgcaggcagatctaccatggctaatggggggagtttgcattctgtgggatatttctgtgtcaccaagcataagagtttgggtgtattgaccatgctacatcatatgttgtggtaccactctcagagacaagatgactgaagtgactgaaacattataacctagccagcaaagtggattttaagaaccatgctcttgatttctactgagcctgaatgaccccagcatgcctgatttgggaactctaagattctctgattcactcctatgaacttttcagtttaaatcacccttgtctctcactgccaacccaggtaagggagagaaaggcattgactacactgtgaaatcatacggtggtggaagccctgaacttggatccatgtgctctggccataagcaaccaatttctatttatacaatttccaccaggaaaaattgtaatagcagcatcatcataccttccataaccaccaagctccacttcagtcatcatacccttgggacaatcttgagtcacgcaataggtctttttttttagagatgggatcttgctctgttgcccaggctggagtgcaatagtagcatgatcatagctcactgcagccttgacctcttggactcaagcaatcttcccatccaagcctcccaagcaactggaactataggcatgcaccaccatgcctggctaattcttttttattttttgagagacagggtcttcactatgtcacccaggctgatctggaactcttgggttcaagcaatcctcccactctactttagcctcccatgactggggttacagtcatgagccactgtgcctagcccacaataggacttaactgaatttagttttctatcttaaagtccaggaggaaggtagggcatatgtagctggtaaacctatttaaactccgaccttggaccccacaatctttcagtgatccacacaatccaatggaagatgctagaaaataactagatgattacaaaggataaattatcctaaatcaaccatactcaaattcataatttctcttttcaaaatgtgctcacctttctggaacttccccaactaataaactgaaaaactccttagccaagtgtgctgtgatttataagaaacctctggaaattcttggtatctcactctatgtccaaattacactgagatgattaccactaaattgtacagcaatttttcagtacctttagagcaccactttagggaagctataatcagaactacttaaggcggttctcatctgaataactaaaaaccaaggtgttagagagtgtgctattttatttgcttgtttgttacattgagactgctgatattgggaatagcagggatatcaggagtcactgctaggcctcagcacattgaggggaccttgcttatttctcaaaaaaataataataataaaataaggaaaacccaaggcggggacaaggaaacaaatctagaaggaagactagatatagagaaaggttctcgatcttggctacacatttcagtaggttgggaagcttttaaaaatcctagtgaccaagctgcatcccaagccaactaaattggaatctctgggctgggacccagacaacagtatgttttttaagtcccaggttattccaatgtgtagacatgattgagaaccactgatttacagaaaaaacaaggggcagattagcccagagagccagcagaaggaagctgtaattggttccacccttcatggtggggctcgtgctgcccggccacagggagctggtcttccaggatggattcatgctgaagctttcatgcaccctagtctagtccccatgtggccaataggtgcatggattttacagaaggctattggggatcagaagaggagtatgaggttatacaacagaacgtaattattaggaccaatgtaaatttagcaaagtccacttgtaattgcataacaaccactgagctgaaataaatgagccaaagattcttttcttaaactacagtggggtcacactaggagtttatttcttttggggggcaggagatagacacttcaaaatagaactcatgaatatattacgggactttattcatttactaatgtattcatttattcagtattattgagcaccaactattggtcaaggcactaggagttaggaaacaataagaccaaatttctgtcaccccaaaggagagtctgagagacacataaagactttcaaaagacagcatataattgttgtaatagaggcatggactcagtgctagaggagcttaaaagattaagaatgtccctgtttggaggctctgagaaaggtcacactgtggagacaatgtctgaaccatgtcttgaagtatgaataggattttgatagttagacaaacaggtgatggtctccctaggcataataaatagtattctggagggatctaagcctggaaaagttgacatcatatatcatggagaaccttgtttgaaagaatcaaaaactcgggctttgtcctatacatgctgaggatcctaagttttaaacactggagtgacaagatcagatttcattttggaccaattacactggcaatattccagaaattagggtgtttaagatcagcaggagtacaaaaggaaaatattaatagctctatttattcgtacctcaatttttttttcagttattgggtatgttttataaggtactactggaatagtacattatataatttatgaaatattcatgtattagggcagtactgttttttgaaactaagaattataaaacaacatatgtttggagaccactggctaaaggatagactggagggtaaggacaggaagcagagattccaataagaagctgatgctattgggtaaattatggcgaggcctaaagcaggggttccccaccctggctgtacattcgaaccacctaggtagcattttaaaaaccatggcacggaccccatcacacacacacacacacacacacacacacacacacacatattaagtaaatcagaatatctgaagctgaggtacaaacatgagtgtttttagctccttaggtgattctaatgtacagccatggttgagaacccttgatttaggccctcaccatgtctcacccaattgtgttaaagttgaggaccacagacctaaaccaagcagtggcactggggatacaaacaaggaattagaggcataaaagatgatggaggtacctggcctgagtaacagattaaaatcattgtggagggagaatttcggagtaaaatcaacacactaacaggcagaagggaagacatccagaaaagtcagagagtagagagtcaggatagtggagatacttaggtggtcagtcatgaaggcaaatgggacaagatctagaaaatacattgaaagaactagtcttaaatctaagcaatgcaatccataattttaaatatgacagtaaattactatttaaatgctttgataagcattgatccacaaatgatccatgaggtgatacacataggaggacagtgggaatttggaggctctttaggaagaaaaagacaacattgcatattgcatagagaggtgaccacccctttctttttaatgaaatcgaaatagatttctaagagttgccttcattcaatgtctttttgataacacaagaaattagttcaaaaaagtaaataacatcattaagaactggccattgtagctacctatgtctgcattgttaaccttctttttagcaaaagaccatggctgatttaatggtttggtggttcacacacatttatagctaatttcatgtcatagatttcagcctatcgttacagtttcagtccagcttgccaaggatcatttagtaagctgggcaccaaagccagagaaacatggacagccctagtggtgggcatgcacccaccttggctatcttaaagcttttctgttgagctcagacctgcaatgttgcctccagccacttcactttaatgaaggatgatggttttttccttcagttttaatcctttccctcttacccctgcaaaaacaattatgtaataaagccaggttgtgcagccagaaactctaatgaggttaacattgccctaaagcctatttttaaaactcaaaccacctgttccaaatatgcattagctctgttcttcagcagcttttaaagatttatttaactctcaattgaagtatttctcaaagaatgaaaattgccaacctctgggttcagcagggaatcccagtgatgctactaaaatgttctaagtacctatctgcacacacctctgaggagaagcactgccaccctaccattatatccccaggctcactttctttttggctaagtattcccaggaggtataaactaaaccaacattgtacattttaatgtgtttgggttggtttaggtgtggtcatatccatgggctgggaagggaagggactgctgtttgtttgccctggttcttgtctcttttgtgcttcccagttcctgttaacctgatctttatttcataatcttatggatctccactctcccttctggcagctgaaattcactcctcagaaactgtctgttccttatgaataaagtgaccatgcatcccagtttgctcaggacagtcctgtttatgttcatttcccagtgtaagtattaatagcatcccctttcaatctcaaaagtgactcagtttggagaacaaatggtatggttatccaatccatgaaaccccacccatgcagcatctttgagtgataaactccacttcctctttgttttttatgctgcccttcttctaaacctctacttattttttctcacattccccagtgaataaactctcaagactctggcaaatccctattttactgagactctggcacatcgctattttactaattgccttccttaaccaactccactaatctaggtgttctttcctatactccttcttactaatccagatcttaccaacctttgacccctgagtttccccattctcatgattctgacagctccaagggacatcaatatgcaaagtgcccttcttcattatgaagagcttccaaagccccactgtctatctgttacttgtggatcaaagcttatcctctaacaaacgttatgtttacatgtctcctgtcccatctcgacagacaaaattgtctagccctcatttttctacctggatttggctcagaacttcacctttgctccttctcttagaatgatcttccaagctgtgcccttttctcattcacacaaacttgcaaacacatttggtgaaatgtttaaaaattaatccaggtccatgtaaccgaaatctgtataaactgccagcttcattttttatttgtttttcttttttaacaaaaaaaagcataaatagcagtattacttaccaaaattaaagtcagatataagaaatataaactgcagtatttggatttggatttaattaatctgctaagtgttgagagctgaaaaagattaaatcaaggatggctttctcacactaaattgtggaatctgtgcttggatgcagctggcagaaaccatctctgttcatcagctttgcacactggccagtgttatttcctttctcccagggtaaaattattagggcggggaacagtagagaaacaaatcacactaaccaaactcacaggggacagatttctaatttaaaatgccttttatcatgctctgcgaaatgtaaatgtcacacagttggtaatattcctgttagacaatcagtgtatccttttatcaatagaaaaaatacccttagaaaggctatcaatttattatggtttcttagtggttctagatcaaagaaaagggaatccaatgatgttcactcatatatttctttatttttaaaattaaattaattttttttacaaattatgatgtttcatattcatagaatacatagtgaatttttgatacatataatgtattgtggtcagatcagggtaattaacatacatttatcatttctgtgttgggaacgttcagtattctccttctcgctatttgaaactatacaatgtattattgttaactacagttatcctacagtggtacagaacactagaacttacatcccttatctggctgtaattttgtatcctttaacaaatacttccttgtgcctcccttcccccacacccttctcaatgtctagtatcttctgactactttttactactataagatcaactttttttagcttccccatgtgattgaaaatatgcactgcttaactttctgttcctggcttttttcacttaatataacgtcctccagttctacccatattgctgtgaatgacaggctttcatttttttatagttgggcatatttcattgtgtatatacaccacattttttaatctattcatctgtttttggacacttaggttgattccatatcttggcaattgtgagtatgctgcaataagcacgggggtgcagaagtctctttgatatactgatttccttttatttgaataaatgctaagtagtgagtttgttagagcctatggtagttctatttccagtttttctgagacaccttcatactgttctccatagtggttatactagtttacattcttaccaacagtgtataagagttttcttttctctgcatcctcaccaacatttgttattttttgtgttttgataatagccatcctaactacggtgagatagatgatacctcactgtggttttgattcacatttctctgatgattggtgatgttgaacattttttgatacattcactggccatttttatgtcttttttctttttttcttgaggcagagtcttactctgtcacccaggctggagtggagtgggtgtgatatcggctcactgcagcctctgcctcccaggttcaagcaattctccagcctcagtctcccaagtagctgggattacaggcgtgcaccatcactcctggctaatttttatatttttagtagagatggggttttgccatgtttgccaggctggtctcgaactcctgacctcaagtgacccgcccctcttggcctcccaaagtgctgggattacaggcatgagccaccgtgcccagccatttttatgtcttcttttgagaaatgcctgttattggtctgatcgagttttctatttcttcttgtttcagtctctctttttttttttttttttttgaaacaaggtcttactctgtcacccaggctggagtgcagtggcacaatgtaggatcactgcaacctccacctccaaggttcaagtgattcttctgccttagcctcccaagtagctggaagtacaggtgcccaccaccacacccagataatttttaagtatttagtagagatggggtatcaccatgctggccaggctgatctcgaactcctgaactcaagtgatccacccaccttggcttcccaaagtgctgggattacaggcatgagtgaccacacccagccttggttcaatctttgttggttgtatgtgtgcaggaattcattcatttcctctagttcttcaaatgtattggcatatagttgtccatagtagtctcttatgatcctttatatttctgtggtatacattttgatgtctcctttttgtctctgactttatttatttaggtcttatctcgttttttcttcgtctagctaatgatttgccaattttgcttattgtgttataaaaacaactttttggccaggtgcggtgggctcacgcctgtaatcccagtactttgggaggccaaggcaggcagatcacgaggtcagtagaccgagaccatcctggttaacacagtgaaaccccgtctctactaaaaatacaaaaaattagccaggcgtggtggcgggcgcctgtagtcccagctactcgggaggctgaggcaggagaatggcatgaacctgggaggcagagcttgcagtgagctgagattgcaccactgcactccagcctggggacagagtgagactccctctcaaaaaaaaaaaaaaactttttgtttcattcatcttttattaatcttttattcttaatttctttcttcacccacttgtcattcagtagcatattgtttaatttccatgtatttgtgttgtttcaaatgatcttcttgttattaatatctaattttgttttattgtggtcaggtaagatacttaatataattttagtttttaaaaatttgttaagacttgttttgtgttctaatatatggtcaatcctggagaatgttctacatgctgatgaaaaaaatatgtattctgcagctgttgtgtgagatgttctatcaatgtctgttaggtccatctggtttgtggcatagtttaaatctgatgtttctttgttaatttcctgtctggatgacccaatgctgatggtggattgttgaaattcccaactattatattattgaactattatatcactggggtctatctttccctttacatctaatacttgctttatgtatctgggtgctgtggtgtcaggtgcatatatatttataagtgttatattattttgctgactcaatctttttattattatattgtatcctctgtctctttttatagcttttgacttgaagcatttttttttaactgctgcaagtatagctatccctgcttacttttggtttctgcttgaatggaacatctttttccaatccttcactttttgtctatgtgtgtctttacaaatgaagtgagttttttgtaggtagcatataattgggccttgatttttttttaatctattcagcctgtctatgtcttttaaatggagaatttaagccatttacattcaaggttattatttcataggtgaggaattactcctgtcattttactgattgtttcctggttgttttatatatcttttgtttcttatttcctcttttattatttatttttgtggctgggtccctatctgtaatgataagtttttattttatttatttatttatttatttatttatttattttttgagacagagttttgctgttgttgcccaggctggagtgcaatggcacaatcttggctcaccacaacatccgcctcccaggttcaagatattctcctgcctcaaactcccaagtagctaggattacaggcatgcaccaccatgcccggctaattttgtatttttagtagagatggggtttctccatgttggttaggttggtcaagaactcccaacctcaggtgatccacccgcctcggcctcccaaactgctgggattacagacatgagccactgcacccagcctgattcctttctcttttttccttcatatattgcctctactagggagttttatagtttcacaagtttttattatgtcatttatcatctttttacttccaaatgtaagacttccttgaacacttcttgtaaggccagtctggtaatgatgaatttccttggtttttgcttttatgtgaaagattttatttctccatcatttctaaaggatggctttgctgggtataatatttgtggttgggaggtttttttttttcttttggtactttaaatatattattccattccctcctgtcctataggggttctgtgagaatttcactattaatctaatgagggttactttatatgtgacttgatgctttctctgtctgctatgattttattaattatgctatcctcatcttttcccttcttttctgcttcccaaaacactgaaaatataaatatttgttcacttagtagtgtcccataagtcctgtaggctttatttatttatcttttttctttttttttctgcttatattatttcaaaagccctgtcttcaacttcagaaattcttttttcttcttggtctagtctgttgttgaagctctcaatggtaatttttttattttagtcattggattcttcagctttaaggtttctgtcttgttctttttaatgatacccatctctttgtcgaatttctcattcaaatcatgaattgtctttctgaattcattgaattgcctatattctcttgtatctcagttttcttaagtttattgttttgaattctttttctgggatttcacacattttcttatcattgaggtctgttacttgagaattgctgtttttcattgacagtgtcttgtttccttgctttctcatgtttgatgtgtccctacactgatttctatgcacgtggtaaagtcacttcttccaattttatgaagtaggtttcatatgaatgagttttagggtattggtttggtagagtacattggctttgcttctaggtggatgcaacagtgtactctccatgtagtttcttcagctataatccatactagtagcataagcaagtttctcagtggtctaggctgagagagtctgtggcaccagtggtgtggctttgtaggattggggttgctgggctgtttctcaggttggaggcatatatatgcacacagtgtgctagctaacttggagtcactggggttggagctatggtactgttactcttgccacaggcacaagcatgcaattgcttgtctgacctagaattgtgcctgccaggagtggtccgtggaactatttctcaggtctacatgcaggtgcaaggctcttcagttggcctgggggtatgcccaccaggggcaacctgcaaggctgtttcttaggcactgatggagagtgcaggaccattgggtaggccacagccatgtctgcagggggcagggggcaggggcactgcagggctatttctcaggtcctgagcacggtcacatagcgactttgctggccaggggcagatcagctgctcagagactcaggtcctctcccatttaggggagggcatgtagcagtttggctggctcaagagtagagttgccctgggcaagattgctatactcttcccccagctgaaagtgtagtgacaggagttgttttccctgctgtgcaggaccagagtcatagctgattctgggcccaggctctgcacagctggggttgtggcattcagctacctgtatcagcttgttggaaataaaatggagtcccagtgctggagaggtgcagtagatactggcccccagagaagggtggaccccagaggtagctctggtctcaagatggtgctatgctgcagaagcttggctcacaggggtgtgaggtatggggagtgcaaaccttgtgctcctgctacagggcaatacagctgcatgaattcctagcggctctccaaaatgggcttagggtttgcaagagctttgggattctcctcttataaggactgtaggtgtttgtggtggcagtgggggctggtggggatcattttacattttctcttcagtggaaagtccttcctaactccaggcagatctgatccagtttggatagacaagtctgcagagattgggtgcttctacacagccctatggtgatttcaaatcaccctatgtgtgtctgcagtctcttgctgcacttagcattctccctttgacaaatcgtagctgtctgttccttgccttggtccttttctactcatgtatttcttatcctattgagctctcactatgtgccaggcatgtgatgttaagggataccattgagtaagtacaatgctctttattgggatacagagcaagtaaacctgtatactcagccaactcaatgcaggcatcctctcatttccccattgaccatactgggcagtaaataatctcaatccttgactctttttttccttgacttcacacaaatcaactccattttcttttaatggttttaccttgaaatttttatcatttattagactactgataaaagagaagtcttaccctccatctgagaaatttgggagacactctagtcccttgatggattttgagaagtgtgctgttctcaccagaaaatcgtttgttcatcctatcttggagtgaattccttctgcagatggctaatctcatggactttgtggcacttacttaataactttattctcagtggatgactttttcttgtctcaatcccaaatcccaaagatatactctctttgatgcctgtaggcacctgctttcagctgtgtacagactgacccatgatatttcatccgtgtaagccattagaatagttttctccactaaatcttggtactatgccctattgtctctattttacccttaactttacttaactggcatttgcatggcttggctttatttgacaaggaagtagccatcctaagaaagattcgtcatcatctcatcctctgccttgagagttcagtgaaaaagctagctgcttctggagagagttccttttccatattcaaacttcatcaagacaagggatgatttaattacaactttcagaatttgtcactatataaagtaaaatcatttgtatgaagcttcacatagtgttctgtgtctaggctgtgttactattgaaaggaggtagatatagacctcgagaagaatttcttgattttaagaattggcagatattagtacatattagaaaggataagaaatcccaagaacttgtaaatgaagccaacagctagtggaacactgccaaaatataagaagatggacattagggatgtacaaaggttaagagtgtggactttagagtcagattttagatcttgtcctggtttaccaagtgtgtgactcaaccattttcgcaactgtaaaatgagccttgtaaagtcatctacttcatggggctggttacaggattagaaaataaatgcaaaaaggcctagcgtagtatgtgcatatagtatgtacttaataaatgttagttacatttaagattccatatcctttgatatcacaatgaaatttcattcatttgggccctagtaattaaaaatgtattacactatttgctctatttcatatgtatccttcacagcaaaaataacttcctaattgataatgcatatgttattgtaacctgaaaatcctaaacagacagaagttatcaatgtttttgttgacaattcataaataggctgagctggaaattgtctcctttatcattgaaagcctattgaaatgttaagaagttacaaggttatatttaacccatttcagagaaaaaactcttttaaaacacttagcactctttgcatataagcagccactctgccaatcataaatgatccttatctctttattaaaaccaatatgacagaacattgacttctcagcactttaatagttcttagttcaggtgttgaagtgtaacgatcttgcatttcttcaaattttttcagaaatatgtctttccttgtgagtaaatagagctggtttaatttgttttatatcataaatttcccacagggcaaaaccaaaacgatattttgtgaaattccatgcttggtaaactccatctaaaaatgatatggctgacagaattgttcactggtttagtcacgtcataactaaaaacaaaggaaaagtgattctctttctctccatttccccattaaccccactacttctcccagccaattaacagaaatctattctttaattaaccctataaatatatacacctactatatacccacaaaaatttcaaaagttaaaaaaaaccttttaattagccaaaatctactggacacctgctcatgctgggcactatgttactatctctagagatatggagaagcacagtggaatgtacattctaattgcagagcaaaacacacgtagtatggaggtggtcaaggaatgaggggtgtttgcttttggatgcaaagtttctttctggggggtgatgacaatgttctgaaattagatcatggtgattaacctttgtacatccctaatgtccatcttcttatattatggaccaggatttgttaaggccatagactgaccattgcatagtttcagaattctaacagaagcaggaaaatgctaccatctggtcatgcctggctaaagacacagactcaggggctgaaataccatttttttagtagcactagcctttggttgagctcctattcttgcttttctacagctttggtctgcaattttggcccttcttcaggcaaattgatcaaaagccttacctcccacttctcttcctaaagcctgtctctgggctggggcccagtagaggacgagctaatatgccagtttgtcctgctgctcagcaatccctacttctggctcaaatgtcacccacccggtagcagaatgacctttccttgcagttctggcccatccagttccacaggaaaggggagacaagacattgcaactgtaactagaatctggaaaaagaagattttctcatttaggagcttgggaatagaaacttaagaacaaatcacagatttttaacaattggagatgaaaataatttattgcagtgtgactttagtggctatttcctctctacagaaaaaaaaatatcacttgtgatttttctttcaaagtaaagtttaaaagatcagagtgccccaagcgatgtttccctggggttaaaaaaggagcaacagtgccgcagaacatctcataaaaacaaatggcatttcacaatatggtgtagctattgatgggtggaaatgaatcaagtgtttcctgtaagattgttgtaatgcactggagaaagcgggggaagaggtggttaagtgtgcaatactgtgattgtgattattaccattaacacaatgcagtcacatgtggaatggagtcccctagggtgctctgacgttccagtactcttcaagcgccagagtgacatcctggagcctgccacctcagtgagcagcacacttctggcctaaggccctgcttgctgccctgtgggtatcaatgtgaaaaggcctcagccttctctgaggcttcctttgctctaaggacctcctgggagcaaagtggacagaagagtgtcggcaaatcaggcctgcgccacagccaggaagtgtgggttcatgttcttcacgtgcaccggaaggtattagaatgccctccttgaaaagcagctgctctttcatctccattgagaccagagcaaaaaggattagatttaaacacctgtaagaagggttcttgttgagcatgggaaccattttgtggtaggggattctgccagtcaccagaatggtttccccaatcggccatggggtttctcagaaaaatctctaagggcaacgtacattctcattcatttaggacagtgattcttactatatatatatatatatatgtgtgtgtgtgtgtgtgtatatgtatatatacatatatatacatataggtatacatatatgtatatatgtgtatatatagttttatagaggtataattcatataccataaaattcacccatttgaagtgtacaattcagtggtttttagtatgttcacaggactgtgccaccttcatcacagtcaattttggaatattttcataaccccagaaagaagccccctgcccatcagcattcactctgccttttccctcactctctaccccagcctaggaagctactaatctgcttcctgtcttatagatttacctattctgggcattttttataaaatggtctcatatgagatatggtcctttatgtcaggcttttttcacttggaatactattttcactgttcatccatgttgtagcatgaatcagtatttgtctttttgtgactagcttattacacttagcataatgtcctcaaggttcattcatgttataacgtgtgaaaatttcctttcttttaaaattgaataatattccattgtttatgtataacacattttgtttatccattcataggttgataggcacttggattagttctaccttttggctatcgtgaataatgctgctctgaacatgggtgtacagaggagggtaaatcttaaccttaaatgtgcgtaagaaacctcccaaggagcctgttaaaaatgcatattctgaagccccatacacccctcttgattcccattgttcagtatgtgtagagtggagttcagaaacttttaagcacttcaggtgatttgctctgtcacccaggctggagtgcagtgacgtgaacactgctcactgcagccttgacctcccaggctcagtggtcctcccacctcagcctcccgagtagctgggattacaggattgtggcaccacactcagctaatctttgtatattttgtagaggtggcgtcttactatgtaggccaggttggtcttgaactcctgagctcaagcgatcctcccaccgtggcctcccaaagtgctgggattacaggtgtgagctatggcacccagcccataatttaggtgattctaatgagggtgaacctccaatcctatgaagtcagggtatagaatcacagccgtttgtcactagagtgtagtctggcttacactgcctctctctgcttgctctttcagtgtccaccatgaagaggacacaggttggcttttgcttctgctcctctttcctcagcatagctaacatgttttatcaaacaaaacctttccaagcttttatttggtccctaacatcaggtgaacctgaagggattagtgtcccgctgtacctgtagtggtttttggaaagggtaggagtgaccctttcaggatcaggcatgaggaagcctacaacagagatgtgctggaccacagtgcaaagctcatgcatctcacgaacagtgccgcctgcctctgccaaagagattagaaaggctttgttaagggaaggatgagaaagaatgatcagagtttctacagttaagtgaaaggcttcactgatttgctgatgaagaaacctacatgagctgaaaatactaattctggatgatgtagtctgagagacaggtgttcaaggctgtaagctaaatcagtaacttatttatcaggaggtctttgtcagacttcacaatcggcttgctgtgtgactttgggctacttatttgatcttgctgaaccacactcttctacccagtagattggaagtgatcttcaaagttataagactctgtttctgaagtatcattgatccagcttcccactgacgttggtgtgtacgaatgggagattaaagatttctcagaacaagctcaaaatactgagaactgatctcaaaatacagagatactgggaggtaacagccataaaatctgagttagtgaaagaacaaaggctgtagtggttgcattagtggttataacttaggccatgagctttaagcacccatgggcacacacagttgagggcatgagcatcctcatacacaggtgattgaatgaaaagactgattcgcttggatagaaaatcaagccccacttgattttctaaacatccctgtaccccaaatctaaactactaaatgctaaaatactaatgatattgattttgatcctgaatatcttattttatgacaaacttatgacaagagatcccagcatatctggtcaatgagaagcactttaatttccagaacctttatttatttatttatttgagatggagtctcgctctgtcacccaggctggagtgccagtggtgcgatctcagctcactgcaacctccacatctcaggttcaagcgattctcctggctcagcctcctgagtagctgggactacaggcacatgccacaacgcctggctaatttttgtatttttagtagaggcagggtttcgccatgttggccaggctggtctcgaactcctgacctcggtgatccacctgcctcagcctccaaaagtgctgggattacaggcatgagccaccacacccagcctccataaatttttatatctataaatctagaattctgtatagaaatacagctgtcatgatgaccatcttgatgaatcttgagcagtgtaagatatcagagtacttttggaatcaccaagaaagattgtttcatttggtttactggcagtgttaaatctagttaattattttctgattatttaacttgatgaaagtttatggtatattgtgattgttaattaacataggacttacaatttagccaaaacaaaatggtagcttactttttcagtgtatctggagaagcaggagagtgtacaagttagtagttcatgttccagctttgccatttactagctgagcaacgaaatacttgagcaaattacggagccattttctgcctctatttcatcagtaaattggagaaaataatggtacctactaatggataaaatgagttaaaatgtataaaatgctctgaatagtacctattatatagtaatcattcaacaaatgttagtttattattgctattgttgttatcatagcattttctagtttgcttggcacttatgcctatcttttctcattttagcctcatgataaccctgtaagttaagtaaggcaaatgtcataaataaggaaattaaggattttttttaaagtgacttgttcatggtcccaaagctagaagtgttgctaagtggggctagatcccacatcttttgactgataatctatctctcaccatatcatgatgtctccttctcagcatgctgaataaataggtgccattatttctggcacattgtctctttaatagccacatattcttagggttccagttaaggttgagaagctgagatcatgttggcttctgagatcaaagataattttactgacctcaaattgtataccaatatgatgatagggtgttgagatgcccagggtaaaggagtcacatttgataaaaccttgtgtggattatcatcttttcataatggctaaatcttttatgataccgttcaagctcagtgacttcccaaatcatactaataagtacaagaagtgttagcaaaagagatgaaaaaattgaacttgtaaatgagacctttgtaccaaattcttggatgttttttcttcaaaggctcattcagggatcttgaattcttcagtgggttcttggtatcttatgacataaagcatcctcccattaggtctgggaaaatcaccacaagcatgccaatagttctgatatcttagcaacaaggatcttgcttagatccatgcttgcctttccccaaatctggattgaattactggaagttgaacgatctagctctaaagactgcacaaacattataaaagagagctctgttaacaccagatggccttatctgcagatttttaaaatgtagactataagagagccatataagcattgtccagagagacaaaaggaaagaaaaatacaagccacaatggtttgaaatatccagctctattttatagaaccttgactctactgatgttcttcaaccccaatcctgcagttattcatgtggattttaacgagagtagctagtgaaattcaagctcagatgtagtcattgaaccaaatagtataacgactaagttggagattttaactcacgacacttgccttttgttgtctagcttcaatactatttaagaaaataagtatttctaggttatttgagggattttgacatggatgcaaaatattaatctgttctttttcctttggccccaggagctgggatgaaatcacatgatttcatcattttgaatccatgcggctcctctgagatagggccagatgtaaccagaaggatttatagggtgtaaaattcagaatggattagaaaagcctttctatgttcagcccaacacatcctaaatcaacgtcccctgaatggaccagagcaatctctggctggcctagtggggaggttgtcatggcaactgactggcaagctcagccagtggaatgtgaatgcaaacaatagagtgataagactgtgtacagagcagcatactaaggctgcttctgcccaggtacagtggcacataggtgaaagtgtgaaactgttgctgcattttgtaacttcttaacaatctctggcagctcatttgaaatttaccaagtgccctttcccagatgttggtaaaaacattcctgctgatagataacagaagctatggaaaaatcagcacccagctgataggtgcagaggtatacaaagccctggagggctgttggaataacactactcaaaaattttctgaaggaggttgaagcaggtttaaggtaaatcttatgactcttcagtgccatcttgtgtccttttagatactgacaatttactagaagcccactctcagaccgatcattaggcagcagcagggcagacatggaaaagttagagctggattatattggagcttggtattcccttttacagcagaatatgcacaccaagccttctgagctttaaattgatttaaaaaattgaaattaaaaattttggtagaatctggaaataaaaacagaataagatgccaaataatgccatgaaaagattgcaagagtctacatggtgcgctaggggttgagggaagggatggaaaatctagatttagtgttgaagattcttacagatagatttggtattgaggattcttactgttgtcattactaactcttgcaatagaatatttttaatctattcagtcatgctgataatgcaaatgaatcaacagagaaaaataaaatgtgaacatcaccaattccactttataactcttttgttcatggttaatggagtaagagatggtagcatttgcttaaatggtacctcatgcccacctctaatctcttacctaccccaaacctaccacccactgatgtctcaccatcacctcatcactattgaaagccataatcaagtcccatttaatttcagaaatgcaaaataaccaagatgtgtttctgtgtgtttcttccagggtttgagttttttgaaacaagtgccaaggacaacattaatgtcaagcagacatttgagcgccttgtggatatcatctgcgacaaaatgtcagagagtttggagactgatcctgccatcactgctgcaaagcagaacacgagactcaaggaaactcctcctccaccgcagcccaactgtgcctgctagtgtccccgtgcacacaggcagctccagggggctctggttgccaacaaacagcatttgtaaatggtctattagccttcatttatactgcctaacaattatttgaaggaataaattgatgtcaatggctcgtacgcattcaattcttgggagctttcctgtttaatatgtggcaaatatgtgatcttaaatttataaggactatccatctataaacatctggtacctgcatgtgacttgttatttatttgtctgctaggctctttttgtttcaaatttgttctcagactacttctgggacatcagactataatctcactacaactggcttttgtcccattgattcaaattatgctattcacttgtaggaatgatgaccaaggaattgcttgtgtgtgtgtgtgtgtgtgtgtgcacgcatgcccgcatgcgtgcagaggaagaagtcacaagacttcatttgctttactcttagttgaaaatcaaatggaagtttttctcatgattagggacgctgtcacgagtctggtcagtttactgttgggaactgtgtctttatttcactgttattaaaaactgagatcattggcctataaagaaattgaaatgttgtttttaaggtccttgcaattttcctaagtcattaatattacctgactggggctatttaacaataatcttcgtttacacatttaaataagcaagtatctacccaggactgctttttccactgatccttcccaattctgtgaatattcaacatcattgaacagattgagacatatctactgaatgccagttatgcaacaagcattttaaccaagaagggtatgagtagctatggaattccaaggtccaagcccccttatttttcaatgacttgccttccccaacccccataatgcacaccaccaccaccatcactttctggaaccatcaccaactcttggactagagcttatgttgaagcttgttagggctcctctttccgtaggatgtagacttgcctccccaaacacggccatcttctcaaacctcagctaagttcttttacctgtttagatgctatttaaatcagatttcaaagggtccccagttgagaaaaaggaaaattttaatctttaatcatctttttaagtccagatgttcataaattctaaagcatattcctattacgtgaatgcttaagttacacaggaaacattctataactgtagtatttcaatttcagaaatatttaggatccatagcaatttaaaagagggaggaaaccactggagcattctaattttgtatcacaaacttcctaaaggacctatatgaataaagagaaaacaacaaatcctaccagctgtacagagagcaacagggaaatttggcctctgtatcactgtccagcattatttaaagctaggatttaggaaggaagcaggaattatttggcagatttggaaggatagtttcgttaagtgaactttctacttttttggtggttatgtcaaagaatttttttcctcttctcaaaaataggcttcccatgaaagtattggatgcaaatgaaacaggcatacatctaaagatatctttggagaataaatccttacaagtcacagaactaggtcacacacattagtaagtcaaaagttggaaattaggggagagagcatttggaatgctttaagcatttccatgttatttctcaccttcctagttgaagatccactaatcagtagtacatttctactttggtgccctacaaagcaaaccttagcatagtaaagacaagaaaacattaatgttttattagtttttaatggggcaaccaacttcaaaatcacaggaattacagtgacgggagagaaagaagcaggaggcataaaaacagatttgtttgtagcagtagtctgtttgtacaatgttataatatttctgtaacttgggccagaatgtggccatgttaaatgatatagctattaagctcacttttacaatctaaaaggaactaataaagccaggaaacccttctcatcctccttcacagccctcatcccacacatagatgtaaaaagcttagaaagaatattctgatggctttttcagaaggaaggaccttgatgtgtgtattgtggtaaaatgaaaagcaaaatgagacagtatttaaaagtgaaagagcagagttttgctctgctgaaaaccccttccctgaagaactgattgctgttgaagttaattggcccttagatgggaagccctaagccaagctcccacttacacagtgtcaaacatcccgaagtggaaacattttatgccagtcaggggagagacaggcaacaatagcccaaatgtcattgccaagaaacatctgatactttctaatttctaaaccccaatggaagtgaggcctttttcattgattctcagttctgaaactcccaccctgttaggatttccattccaaataattcaatgagaggtttccagagaaacagtcacagagctcaagagaaagaacacttaaatgctcctgctgtaattgcatcaaaaaatccgggttttaacatcaaatttggcaaatggtgggaccaacccaaggttaactaagtgggctttcattggcattgagctatgttacttataaattataacactatagttccaaggtttttcagccttttggccaacacacacacacacacacacacacacacacacacacactataccatcatctatcaatagtctaaatacataaataaatgcaggtcatttttatcaatggcctaactaaatttatatttaaaagaacaagacttttaaaaagtacatactcctgttggtttgtaagttatacacatttatctcttgtctttgatttaattaaattagtgttttaagtatgaatttattttcctttgctactcattacctgaccactttcactcctctagatacccttaggaataaacctgaactgttccaaatcgattcttccaagagctttggtgttggtaccttcctttcttttcctaatgcaactgaaaaattagactgaaaattatttgacttaaatagccatcctcagagtgaatcagcatttcagtttttggagatggggatggaagtagaaggtgcacaaagcgtcctaagatggcagtttgaatgttagcatcgcatctacatgctcataagaggaattgcttcaggacaatgaatcagttcattgttgctgcccccagtgaacagctccaactgccttgatgaacttctaatgactgtgaaagctaggaggttcttctagttcctccttagggtcacttgaagttcagtatttttttgctgcctggtaactaagtgctaagatttttacttggaaagaaaactatgacaatgccttcagttgtagcagaaagttgtggcattgtgataataaacaaaatctacaaagttacaacccaaattatacaagacatcaaaacactcagtaaacaaatatatatttcacctacttaaatcttattcatattaattataggccttttgtttagtacactggttattttttaaggaaccaatttaaactttcaattttaaatacatctatgctgacgatagactttcgggtatatacaaccttcttcttctcttttaaaagttaaatacattccactattaactgaacttccatgaagcaacattaattttagagcatggtagtccataatcagtggttcattgtgatgtgctttatccaacatgtatcttagtgcatggttgaggatgtactatgtgatattttagttaacagtgtggcatttgtgggactatattaaaagcatatccaaactaccaagctataccaagctgaggtaggtaacacctgcatgtgaaaaactgtgatatgaatcttatttataaaaaagtcataactaaaacccttctagaccaaaaagttactgtgtgtttgttaataatcttcatagtactattggaatgctcaatcagttatttttggtgtggcatacttcagagctggcctgtccgtctgaagaaccctttctctcacaattacagtttgcatgactagaacccggaactctgttcctttgcgtgtatagtcacttagtgtgctgtccgggtgccacatgagcaactacacccatgtggcctttctgtcactccctggaaaatgcaacctctacagctctgctcagctctgcctgtgtgcattgattaccttcgctttagtagtttgcctgtaaaatggtgaagtctttctgatatgctgaacctttgagccagcttttgggagttcttcatattttaggtgaatttttgaccaaagtcaattaaagacataaacctgttttatatcatggaatttactgggccaaattaagtaaaagatgaagtttatgaccagaataaaaaagcctttacccctgcacagcactgtatctaaagggctctaggttgtagaaatatagtaccccctaacagggaaaaaccaagttgggggatttatctaaaatgtatctacctattgttactggtatttcacaaataatttttttcttaaaaatatttacagaaatgcttgacactccggtcaaataatatttccctttgatagattgaaatatttgcttttagattacacatacagtgctgcccttctcaacagtcactcacacgctcactcgcctgtacaaaggtatcaggtaaacactgatacttttttttaagaaggcaaaattccatctatggtgctttctcagtgctagggaaaagggagcttttactatgttccagctataactcacatcttacttataaggtccataaaatcggttcttcacactgatttcgtttgattagtctgtgcatgtaattaatttcctccaaacagagagagtggaggggaaataaattttgcaagcattctagataacagaaatgagtcattttaaaacctcactcagagctcgagtgttaagatcagaccatctagctagtggacaaattgaactttctatttgcagttctcttttactttctgactttcttttaaattactgcagtttttcaaaacactatcctcatggaatgacaggaccaagaatagaaaatgagactcaaatttcaccatttacttcccatcagcaaccattactggtggagtttcaaacagtcattacttgctgaaatgaggtttgaggttacctgtgtatttcattcacctgtgttaatatttccttcatcgtggacaagtgagagttggctgtggctttatttcttgaggcaaattattttgcattcatgttatttggggctaggtattgcttaggttcgtgaatgctgttcttacagacacagatggtacctgagcccctcagacacctgccctttcagggacgtgagcatgacttacatctgtcaagtggttccatacttcttgtaaaagtaaagtttgggtattgtttgctgtatcaatatgatggctttccatgcattgtctcattatccctaggatacgtgctaaaggaaaactgtcctgtaattcctgttaatatattgttaatgtcagacgtgatgtgatactgttggactgtccaaatgtacaacaatttaatggtgtttgtagaactgatatgtcttaaatgttgcatgaaatatgttataaaaatagatttgttttctattttcaacacctcagaattgagggttcatgggccaataagtgcaatatttaatgactcactcagtgtatataaactagtatgaaagagtgaattataatgaatgtgtgagatgctttgatagctgtgtgacttattcaaatgattttcttgtagctgtatttgtctagtggtgcaatttatacagtaaatatcttattggtgtcatgtaaaacccctctgtgcctacttcaaaatacttttttcttataaaaccaaacatttagtatctggaaatatgtgtcaattttatctcttagaattgtggattttattgtcaagacagaatggctgttcatttattttataaaagcatctccttctataactcaaaattgtctttaagtgtcatataaaagtgtacattttacttttaagcaactaatttagatacctaagaaaaactatgtgcattaggaaaagtcatgtttttcttctcagaaaggttgatcacatgatatgtctactaagaattttcacctctgtacttgtatgtatattttattgttactcaatcttgtattttatttacaaattcaacactgtcaaccctgggaattctaaaataccaatgtatttttaggttgtagctaatgttgtattcactttcaattctcagttgtccacactggtgatataagaggaacaaatcagaatcattaaatactttgtaatgccatcataaactcatatattcatcctcaaactcccttgtttaatgctaattggtggcctggaacttcactgagatgcaaaatcaagaactgaagcctagttgctagataacgaaaagctataaatgtttatgtatgtgaattttaaattagaataaccgtcttaaactcctacttgccatttctaaggcaaagcattcattttaatattgtactttgccttttcattcagttagtggagtaagtcatgaaacccttaggaagaaaaacaagttatgacttattcactaaaattgatgcaagacagttggttctagatgaccatggccatgtgttcatcatataaaaccttcagttctctctatggtgcttggctggagattgacatgtgaggatgtgccaatcatattaaatggatttggtctatgtgggtgatatgtggcctgaatgtaactgtgatagactgaaatttgttcttagctctcaaaatccactgaagaagtcaagtgaaggtgggtaaaatagggagattagtgacaactttgtgccaaattttttaaaaaatggaagcaggtagccaatattagaatgataatttaagggtgtggttgaattttagttagttgtcacatagttattgaacctcatatgctcagtgctgtgggaatcaaacatggaagaggtatggctcctgcccctaatgagaacaagggggaaaaatccagatataatctaaatgctaggttatgtcagggtataggaacacagagaatgggggacctgtaagaactggaagagtcagagagggctccattgaagaggtcaaacataattccggaaagaattaggtagtgaggagattgtgccaggaaaataagtgggaaaggccacagttatgtttcctttgaatggaagagagacaaagctatcagctatagatcattgttttcttaagacagccaaactggccctttgaaaccattcaaattaccccagtttagctccctaccttttagtctccgtgaggaagacaagctgttgcattatcatattcctctgtgctgagcagctcaagactcagccacaatatgcaaattgctttaatgccatattacggcagttgatttagacatttgccagtgcaccaaaccatgagagattgtccgacctaatgccacctggcagatgtgtacccagagatttttctgtagctccatgtttcccataaagggcattggaaatgcacagatgaagatcttcctttggaaccaggcacatttggccccttctcagtgactgcactgtggaactcttcttaagaaaatattgaaaacagcttaatgctttcatatagtgaccgacatttagttgaaaactactgctgcatagcaaatattgtgactcttcatgtgtccacaggagctcttgtgtgggtttaaagctatgaagtgtattcacattgtgaagttttaattatctttattgaaattaattgtgtaaaaatggtatgtgctctattaggtattcagtttgtatgtgaattctataaagaaagtggtttttgttctttgagtttgttttatttcttgaagattacaataaatatctaagagactatattcctgaatttcttagccttagtctgattaatgtttttcatctcctttcaattcatattatttttcatcctaggatgcttatttccatttcttctcccacttctataatcttaggtacaacactgagtttgaactgaagatgaagagtgaacacatttagggctttgagtatctcacacatgaatttggacttaggcacaggaatgaattctaatacttgtaatctttcaaggtcgataactttctaactgacccaactgactgggttccagagttacaaagcttagctgtaggatcaagaatagctgctaagggagataaaggtcttcaggtctgcaacttgaagaccatgtgtccctaaatgaaaagtctaaggtttgatgatcacttagcaccctactggcatagcccgaggcaagggcggtcaacagagaaaacatgtggatgggatgtgtgaatggaatgggtgtcatttaatgcacagtgcttggtgcagtgatgattaggatgccgtgcaggatctccttggccatgggcctcaaggcatggggaagcacccagctaccaatctatttgtatcacagcagacctactactaattttgcaatcttgtagcattctacttgtactaacagcactgattctatggaatttcttccaaatgttcctcagggcaatttccaggaaggagtctgcactgaaaatcagtcaagggggaaggtccctggaagagccacatgagtcccatgggtcaaattagcttcctgaactgaacttggtaatagaagggtaacctccctgggtagacaaagcaagtagcacttaagaaaccaaaaaaaaaaaaaaaaagaaaacaatgataataaattaagggatttccagttatattatcaacaaatacttacaaaatgccttctaatgctaatttatcagtatttatcagtatttatcagtattttcagtaatttatcagtatttatcagtatacatgaaaatacatactatagagtcctgaccctccatgaacttaaaccattgtgatagaggaaaatgtgtaagttaatatcaataaaaaactcatcattgataaactaaatattccttaatatatatgtctaataaatacttaaaatgaacattggaaatttgtttcatttcaaaagagctcacaaaaatttcctctttgaaatgttgtaaaatgcattttttggactgtagtcctttgcccccagataaatatataacaatcaataaaagtcagttcaaaacttaaaaaaaaaaattaagagcccagaaagacttcacatgtttcctgattattctgaggctcttgtggcagaaccagatccaactggttttagcaggaatctgcctgtaccctattccctcaagtaatatgcccttagcttttttaaaattaattttaaaacatgaagttactatgtggccacttactcaatagcattgagacagtaggcatgaaacagaaaacatctgtcaccctcagaaaatgctaagtcattctctcctcaacttcctaacagacttgaaaaggacaccttctatataaaaggccataaagtctttgcacagttctcagggacactccacctcttggttcttggttctcctctttctcctctaacttctcaacccctcacccagtccaaagaagctttagtctgatagagactgcctgctcatcttttcttcctaatctattgttaatgacctgagtccttttgagctagaatttctcattgtttattaattctaaatctcaggaaattttatctaaaaattatgttctcttttttaagtattgcctctcccttaaagcaattctgctaagtggaagaaaggcaaagggtatagaaaatatatggaaagtgagtgttggatgaaaatctggattaatatttcaaaacaatattctaccaagcagacaattacaatataatttgattagtgtcaatatagaggttaaacacaagctactgtgaaagcacagagagaagcaattattaatccagattgaaagcaagggctgggatgttctgagaaggcctactagaggaaacaaggactgagctaaaacatacaggagatgtaggaattatgcagaggcagatgtgagagaagactgctccaagcatggggagcaaaccacggaagtttagcaaagcatggtgtatttatggaatttcaaagccattcacatagggtgatcacaggatgaaacaaaaggagaaagagtgagggctgagatcataacatttatcagaaatgctttaaatgtctagatttcattctctagctgtggggaattcatgaacagatttaagccaggtagaagtttgaacagatttgaattttagaagatcacaaaattggcaatatgagaaatgaattaaagggaggcaataacagaaacagaaagagtattagacagctattatagtaacctagaagttttatctctaaattaattgcagaatgatagaaatgaagagtagggaatacatgaaagttcact

SEQ ID NO: 3248 - DNA, 270 bp, Homo sapiens
atggaagacgagcgggtcatctcaactgagcgaggtcaacatttaggagaacagcttggtaagggagagaaaggcattgactacactgtgaaatcatacggtggtggaagccctgaacttggatccatgtgctctggccataagcaaccaatttctatttatacaatttccaccaggaaaaattgtaatagcagcatcatcataccttccataaccaccaagctccacttcagtcatcatacccttgggacaatcttgagtcacgcaata

SEQ ID NO: 3249 - protein, 90 aa, Homo sapiens
MEDERVISTERGQHLGEQLGKGEKGIDYTVKSYGGGSPELGSMCSGHKQPISIYTISTRKNCNSSIIIPSITTKLHFSHHTLGTILSHAI

SEQ ID NO: 3250 - DNA, 1403 bp, Homo sapiens
gcggcgccaggagaggacagctccagtgctgatgttggagccggttagcgaaccccaagagtgcagagtgtggagcgtggagcgccgggactgtgcacgcttgaccggaagcccagaccagtgcggtcctagccagagagaaaggacatttgccaacaatgagacacgaagcgcccatgcagatggcctctgcccaagatgccaggtacggccagaaagactcctctgatcagaactttgactacatgttcaaattactcatcatcggcaatagcagtgtggggaaaacatcttttctattccgttatgcagatgactcctttacatctgcattcgtcagcacagttgggatcgatttcaaagtaaaaactgtattcaaaaatgaaaagagaatcaagcttcagatttgggacacagcaggccaggaaagatacaggactatcaccacagcctattatcgtggagccatgggctttattttaatgtatgacattacaaatgaagaatccttcaatgcagtacaagattggtcaactcaaatcaaaacatactcttgggacaatgcccaagttattctggttgggaacaagtgtgacatggaagacgagcgggtcatctcaactgagcgaggtcaacatttaggagaacagcttgggtttgagttttttgaaacaagtgccaaggacaacattaatgtcaagcagacatttgagcgccttgtggatatcatctgcgacaaaatgtcagagagtttggagactgatcctgccatcactgctgcaaagcagaacacgagactcaaggaaactcctcctccaccgcagcccaactgtgcctgctagtgtccccgtgcacacaggcagctccagggggctctggttgccaacaaacagcatttgtaaatggtctattagccttcatttatactgcctaacaattatttgaaggaataaattgatgtcaatggctcgtacgcattcaattcttgggagctttcctgtttaatatgtggcaaatatgtgatcttaaatttataaggactatccatctataaacatctggtacctgcatgtgacttgttatttatttgtctgctaggctctttttgtttcaaatttgttctcagactacttctgggacatcagactataatctcactacaactggcttttgtcccattgattcaaattatgctattcacttgtaggaatgatgaccaaggaattgcttgtgtgtgtgtgtgtgtgtgtgtgcacgcatgcccgcatgcgtgcagaggaagaagtcacaagacttcatttgctttactcttagttgaaaatcaaatggaagtttttctcatgattagggacgctgtcacgagtctggtcagtttactgttgggaactgtgtctttatttcac

SEQ ID NO: 3251 - protein, 227 aa, Homo sapiens
MRHEAPMQMASAQDARYGQKDSSDQNFDYMFKLLIIGNSSVGKTSFLFRYADDSFTSAFVSTVGIDFKVKTVFKNEKRIKLQIWDTAGQERYRTITTAYYRGAMGFILMYDITNEESFNAVQDWSTQIKTYSWDNAQVILVGNKCDMEDERVISTERGQHLGEQLGFEFFETSAKDNINVKQTFERLVDIICDKMSESLETDPAITAAKQNTRLKETPPPPQPNCAC

SEQ ID NO: 3252 - DNA, 46373 bp, Mus musculus
  misc_feature (1)...(46373): n = A, C, G, or T/U
gctccttggctactttctctagctcctccattgggagccctgtgatcaatccaatagctgactgtgagcatccacttctgtgtttgctaggccccggcatagtctcacaagcgacagctatatcagggtcctttcagcaaaatcttgctagtgtatgcaatgatgtcattgttttgaggctgattatgggatggatccctggatatggcagtctctagatggtccatccttttgacacagctccaaactttgtctctgtaactccttccatgggtgttttgttcccagttctaagaaggggcaaagtgtccacactttggtcttcgttcttcttcagtttcatgtgttttgcaaattgtatcttatatctcgggtatactaaagtttctgggctaatatccannnnnnnnnnnnnnnnnnnntaggataggtaaagatactttcccgaatctgttgtgtggcctttttgtcttattgatggtgtcttttgccttacagaagctttgcagttctcatgaggtctccatttgtcaattctcgatcttacagcacaagccattgctgttctattcaggaattttcccccctgtgcccatatcttcgaggcttttcccccactttctcctctataagtttcagtgtctctggttttatgtggagttccttgatccacttatatttgaccttagtacaaggagataggaatggatcaattcgcattcttctacatgataaccaccagttgtgccagcaccatttgttgaaaatgctgtcttttttccactgggtggttttagctcccttgtcgaagatcaagtgaccataggtgtgtgggttcatttctgggtcttcaattgtattccattggtctacttgtctgtcactataccagtaccttacagtctttatcacaattgctctgtagtaaagctttaggtcaggcatggtgattccaccagaggttcttttatctttgagaagagtttttgctatcctcggttttttgttattccagatgaatttgcagattgctctttctaattcgttgaagaattgagttggaattttgatggggattgtattgaatctgtagattgcttttggcaagatagccatttttacaatgttgatcctgccaatccatgagcatgggagatctttccatcttctgagatcttctttaatttctttcttcagagacttgaagttcttatcatatagatctttcacttccttagttagagtcacaccaaggtattttatattatttgtgactattgagaagggtgttgtttccctaatttctttctcagcctgtttattctttgtgtagagaaaggccattgacttgtttgagttaattttatatccagctacttcaccgaagctgtttatcaggtttaggagttctctggtggaatttttagggtcacttatatatgctatcatatcatctgcaaaaagtgatattttgacttcttcttttccaatttttatccccttgatctctttttgtgtcgaattgctctggctcggacttcaagtaaaatgttgactaggtagggagaaaatgggcagccttgtctagtccctgattttagtgggattgcttccagcttctcaccatttaccctgatgttggctactggtttgctgtagattgcttttatcatgtttaggtatgggccttgaattcctgatctttccaagatttttatcatgaatgggtgttggatcttgtcgaatgctttctccgcgtctaaggagatgatcatgtgggttttgtctttgagtttgtttatataatggattacgttgatggatttccgtatattaaaccatccctgcatccctggaataaaacctacttggtcaggatggatgattgttttaatgtgttcttggatttaaggcaggagattttaaaggtctatttttttttttttagttttattttatgtgtataggtattttgcctacaaaatgcctgggcatcacttatatgcctggtgtccagagaagccagagcatatcagattgcgtagaattgaagttacagactgttgtgggctgccatgggagtgctgggaatcagccaggtcctctagaagggtagccagtgctattaacgctgaggcatctctctagcccctgtggttaattcttatttttgttattgttgtttgagacagggtctctttatgtgaccctagttgtcctggaacccactatgtagaccaggcctgcctggaattcacagaaatctgagtgcttctgcctcctgaatgctagagttaaaggtgagtactatcatacctgactctggtgtagttttgttttgttttgttttgtttttttcaatttctatttttgaggagtaagggttggaaaactttgttcatttatttatctgtttgatgagtatttaatctagaatgcatggcatcgtggcaaagaaagatgatttttaaaaaatctgtccggtaaagttcaaattccaggtgtcaccaagtagacacagggacagtcagtgaacggccttccttttgccttctagtagaggtctgacccagtttccagtaggtggccagccgttttaataataccagtaattttgaggaaccagcaaagtacagacccatgactcagggaatggaagttctcaagacagctgagtagcttcgaggccactcaccagccacgcgccttagccaaacacccggtctgtggtctacaacagtgtcagctctgtgcttggaagagccgcttgaaaatagcagggcctaacacaatgcaggtgaaagtgcttatagaatctcttgggtagtgcttgacatattatatgcatggtttcaggtaattatataaatacagcgttatttaaaaaaaaaaaaaaaagaccctttcagataattccgtgacatttccagctatctcagaaacgctgcagtcctgttcgggatggaggagtcagcgtttagtctgttgacttgacgggatcctgttgccctttgaaacatttagtttcagccagaagcagcagggcccaaaccagtagacccagacacagtgagagtcacttctcacagctgacatcactggggaggaaataagtggctattttcacattccttcattaaacaaatatttgctggttgcctactcttgttctgttcattgctatgaccttggtgtccagaataataccactgctccgaagcggaatggattctaataggaggaggtgattaatatagagagatgtgttgtgttaggtagtaagtgctacaaggaaaagcatgactgggctatggatgctgggatnnnnnnnnnnnnnnnnnnnnagactgaatgatacgaagaaagccagctgagtgccagagttcatgtctctctgcttcctcactgtggatgccacgtggccaactgactcctgttcctgcctccccgtccttctgctatgatgggctgcaggctgtgaggcaaaatccacctttccctgaattacatttgtatgtagcaagcagaagtggggaaagactctccactgtctattttaggtgttaagcctgaaatcctgagggttgtcattgcctactcgagtgagcaagcaaagccttagctacctctgctcttcctcctgcaaagaggaagaagaggagccacaaacataagcttggcatctggtagacctgtgcttagcccgcttaaccccaggcctccactcaccagctcttggccttagggacatgttctctataaatctagcagttggtgtgttatgtactcatatgatatatgtatgtgtgtgtgtgtgtgctgatataaaaaaaaaagaacataaaaaagcaagaagggaagagaataaaaaagaaagcaaaaaaaagaagaaaagaacagacaaaacgaaaaaaaaaaaaagcaaaaaaaaagagaaaaagagaaagaaagaagagaaagaaagaagacaaggaaggaagaagaaaagagaacaaacaggaaacaacaaagagaaaggagcaaagcaacaaaagaagaaggaagagacgaaagagcgaaacagcgagagagacgaacagcgaagacacagatgacgcaaagaagacacggctcgaccagaacagagagaaccgagcaaaagaacaacaaccaacgggaagacaagcaacagacaagagaagacgggaaagggacaagcaaaaagacagcagagaagagcaaggaaagacaaagaaaagaagaacagagacaagacacgagaaggcaagaaaggacaccgccgaaaagacaagaacacgagagggagaggcagagaaggacgaagaagaggaaacggcgacaacgaatcgagaaaagagcaggggaagagggagaaagagagcaagcgaacgccgccgcaaaaaaaacaggaaaaacagagagcacgacagagcccacccgaaggnnnnnnnnnnnnnnnnnnnntggatttccgtatattaaaccatccctgcatccctggaataaaacctacttggtcaagatggatgattgttttaatgtgttcttgtatttaaggtaggagattttaaaagtcttttttttttttttagttttattttatgtgtataggtattttccctacaaaatgcctgggcatcacttgtatgcctggtgtccagagaagccagagcatatcagattgcgtagaattgaagttacagacagttgtgggctgccatgggagtgctgggaatcagccaggtcctctagaagggtagccagtgctattaaccctaaggcatctctccagcccctgtggttaattcttatttttgttattgttgtttgagacagggtctctttatgtgaccctagttgtcctggaactcactatgtagaccagccctgcctggaattcacagaaatctgagtgcttctgcctcctgagtgctagagttaaaggcgggtactatcatacctgactctggtgtagtttttttgttttgttttgttttaatttctatttttgaggagtaagggttggaaaactttgttcatttatttatctgtttgatgagtatttaatctagaatgcatggcatcgtggcaaagaaagatgatttttaaaaaatctgggggctggtgagatggctcagtgggtaagagcacccgactgctcttccgaaggtccagagttcaaatcccagcaaccacatggtgactcacaaccatctgtaatgatatctgactccctcttctggagtgtctgaagacagctacagtgtacttagatataataataaataaatctaaaaaaaaaaatctttccggtaaagttcaaattccaagtgtcaccaagtagacacagggacagtcagtgaacggccttccttttgccttctagtagaggtctgacccagtttccagtaggtggccagccgttttaataataccagtaattttgaggaaccagcaaagtacagacccatgactcagggaatggaagttctcaagacagctgagtagcttcgaggccactcaccagccacgcgccttagccaaacacccggtctgtggtctacaacagtgtcagctctgtgcttggaagagccgcttgaaaacagcaggggctaacacaatgcaggtgaaagtgcttatagaatctcttgggtagtgcttgacatattatatgcatggtttcaggtaattatataaatacagcgttatttaaaaaaaaagaccctttcagataattccgagacatttccagagatctcagaaacgctgcagtcctgttcgggatggaggagtcagcgtttagtctgttgacttgacgggatcctgttgccctttgaaacatttagtttcagccagaagcagcagggcccaaaccagtagacccagacacagtgagagtcacttctcacagctgacatcactggggaggaaataagtggctattttcacattccttcattaaacaaatatttgctggttgcctactcttgttctgttcattgctatgaccttggtgtccagaataataccactgctccgaagcggaatggattctaataggaggaggtgattaatatagagagatgtgttgtgttaggtagtaagtgctacaaggaaaagcatgactgggctatggatgctgggatggagggagggagggagggagggagatagataattaaggccagctgtctcaacaaacaaaccctgctatttcagtggcttagccctgcagaagctttctcaaagtcggactgggagtggaggctcagagacttgcccccaccccccaagccttccatctcacttctgagtctttgaaagaagcagggggagtctgatgaggggaatgtgctgcactcggacctctagggtaggtcggggtccaagcaaaagaacagcaaaggcaaaatcagggggctgtcccaggaggagtaaagaaaccagcccgccctctctcttgtggaagaggcagccaagagccatgcaccttagcttaggcctccctagccatgggagaaagtaagaaaatacaggtgttagaaccacctagtgtcccttaaagaatttcaaatatgaaaactcagcgaaatagaaacagttgatagtggcgacagtgactacatgaactaagttatgagtatgttctatattctagagaagtaattctcaacctatgggtcatccgatacactgtatgtcagatatctacaattcaaacaggagcaaaattacggttatgaggtagcaatgacataattttatggttgggggaggcatcacagcatggggagctgggatcaaaggtcacagcatcagggaggttgcgaggaaggccgctgctctagagaaaaacttccctatcctttctcactcatgatatttagaacagattgtacgaacttaggtacatagctatgtgccatcattatgaaaattaattatttattagtaataaatcaacaattttaaacaatccttttatatgcttatgattttaccatttattaaagataaaattgcatactaataagtgtgcctgcttgtttttaagtaagaattacatcttggataaatgcttgatactgaagggcacaggatcttcagtgtttttcagagttgattggcattagtttttatagtcatcagttcttgagaactatctatttcacataaatatgtagtacaaaaagtggcagaagtatatcaaaggtcatttcataaattgctagcaagttctatcttattccaagccaaaaattcacctttttgtttctttgtttttccagacaggatttctctgtgtagccctggctgtcccagaactcattctgtagaccaggctggccttgaactcagggattcatctgtctccacctccgaaggactgggattaaaggcatgcgccattatgcctgactccaaaattcacttaacaagtttttacaaacttaagtaactcaaacaacagctggaagtcaaacactctgaacacagcctaaagatgatttgacacatacatgttgaggaagggcggcaagaaactattctctctctctcttattattatgcttctataagagcagagaactttatattcacactaaaaacattgctgctcataatacacagttgtcttaaatcacagctggggacccttgggcactattcaagggcatgtctgatggtctgcatcctgcaaggtgagcttattgtgtgtctgaaaccaaggctgcagtgacgttgggctcgtgatatggctgagcattggccagaatcacctcagactcattatgtatttgatgctgaattaaatatttgttcgctgcctgttccgggaaaatgttactgtcacgagtcatgagtttctcattcagctatgtggactctctatggggttgtaagccacagtttaagctgtgttctagacaaatcttttataaatgcattgatatatttacttccataggtgaacgattgcaagttattcatgctaaaacacattttctccatatccaagaccatcttagggtagagtatttcctaccattctgaccacagggccaagcaccgtggcagttttggtcccctccctcccaaagcctgattcctcaagaacgcaagtctgtaacctttctctccgaggctgagcactcacagagccatgcacacttagaacatgcgcactgggggtagagagcatgcgcactcggggtatcactattcccccccacacacacacccccaacacgcggagacccttagcaatcgcttctgcagttgcacaacccttttgaacagactttcacgtaaactcatggaatcattatacctgagataagcctgaagttactgtaactaactctcgaatttaaagtttactactgactaatccgttgtgttttatctggaccatccgaggtgaatatctcatggatcatacataatttaagctgttcagttggtgttgactttatgtttccgactatggcaagttgaatctcactgattggtctccacgacaatcgtcacattcggaattttgagctgaaagtgcttgctgcacttcagaaagagctcaggagattgagttaaggctgtgcaataggaggcccagtgcgggtgccgagtgtggtgtactttcgttagtggctttgaacaggatgctaagttagctgccgtgcttaggagaatggaatcttctggtctgattgctggattgccatagaaggggtcagagggcaggcggaaattcatgacacgtgactgtagaactccagttagaggtatcctcaaaggattaggctagactcagtaagcggagcgtgagaaaataagccttgggcaaattacatattgaaggaaaagatttgaaacaaggcaaccacgggatattgacatacgtctattaaactctcaggaagtgatttttgatctacttaacataaatttattgaaaaggagaggttttgtcaatgacctaggaggaagtgtaaagttgtaagcctgttgcgtaccacacctatgacagctctagttataactagttctaggacccttctttctctcttagaaaagaggccagagatcgcgtttcccctcataacagccgcagccaacaagtggacagtgcttaccgagtatattagcatttcacttcagtcacctgtaagataagaaagccattatcacacaatccacaaactctcagagataaggacagcgcaagtgacaggctcaaggtcatacagccagtcagagccagaaccgagcctggctcctgcgccctgggccctgaagcctgagctttcattcgctgcacgtgtgctagcacccaactctgcacgttcactggagacttctcagctctctttccctgcaccacccttgcctctggtcaaacaaggatcttcccgaattccagctttgttccaggctccactccttgtgtacaagatcagagagtacaggaaggaagggaaccgcacctttagtgacaagatgaggatcttgtgagttactacacattaaccctggcaaagacgtacttatcagtgcaacagctaatcttctttgtgaacgcctttattacaagcttgggttaaggtcattttaagagcatttactctgagaagtaacagctggctatcgtagatataaataatctatttaaaaacaacaacaacaaaaaccccaaaaacaacaaaaaacaaaaaaagaacaacaacaaaaaaaaccctaccccacattttctaacgtacaaatctaaacaatttcagataattcacttctgaaagcctcccacccaccacgtggtcactcaagcgcgcgccttttccgtagccgccacaaggtggcagcggcggccgcagagtcggcgcaggcacggctgctcggccgtcgcttgctctcgtctggcacgcggctctcggcaatggattagctctgctggggacgtgggcgctccgggccccgcccccggccggcggcggccccgagttgcagtcgctgctgcgagccgagccgagctgcacggagggcgagagcggagcggggagcggaccggtgcgctgccctccaggcttcccttcggcgttcgggggggggatcctgactgcaggggccctcggaccggcccgagctcggggcgccgggctcgggaccatggcgctgcgcgcccgggcgctctacgactttaagtccgagaaccccggtgagatctccctgcgggagcacgaggtgctgagcctgtgcagcgagcaggacatcgagggctggctcgaagggatcaacagccgcggcgaccgcggcctcttcccggcctcctacgtgcaggtgatccgtgcgccggagcctggccctccggccgacggcggcccgggagctccggcccgctacgccaacgtgccgcccggcggcttcgagcctctgcccgccgcgccacccgccgccttcccgccgctgctgcagccgcaggcgtcacccggttccttccagccgccgggcgccggctttccctacggcgggggcgccctgcagccgtcgccccagcagctctacggtggataccaggccagcctgggcagcgacgatgactgggacgacgagtgggacgacagctccacggtggccgatgagccaggcgcgctgggcagcggcgcgtacccggacctcgacggctcgtcgtcggcgggcggcggtgcggccggccgctaccgcctgtccacccgctcggacctgtctctgggctcccgcggcgtctcggcgcccccggcgcaccaagcgtctggagccaagagctcggccacggtgagccgcaacctcaatcgcttctccaccttcgtcaagtcgggcggggaggccttcgtgctgggagaggcgtcaggcttcgtgaaggatggggacaagctgtgcgtggtgctgggtccctacggccccgagtggcaggagaacccctaccccttccagtgcaccatcgacgaccccaccaagcagaccaagttcaagggcatgaagagctacatctcttacaagctggtgcccacgcatacccaggtgcccgtgcacaggcgctataagcacttcgattggctgtatgcgcgcctggcggagaaattcccagtcatctcggtgccccatctgcctgagaagcaggccaccgggcgcttcgaagaggacttcatctccaaacgcaggaagggtctgatctggtggatgaaccacatggccagccacccggtgctggcgcagtgcgacgtcttccagcatttcctgacctgccccagcagcactgatgagaaggcctggaaacagggtaagcggaaggctgagaaggatgagatggtgggcgccaacttcttcctcactctgagcaccccacctgccgccgccctggacctgcaggaggtggagagcaagatagatggcttcaaatgcttcaccaagaagatggacgacagtgcgttgcagctcaaccacaccgccaacgagtttgcgcgcaagcaggtgactggcttcaagaaggagtatcagaaggtgggccagtccttccggggtctcagccaagcctttgagctggatcagcaggccttctccgtgggtctgaatcaggccattgccttcactggagacgcctacgacgccatcggcgaactcttcgctgagcagcccaggcaggacctggacccagtcatggacctgttagcactgtatcaggggcacctggccaacttcccagacatcatccatgttcagaaaggtaaagcttggcctgtagggccggtggcacggggtgtttttttaaggtagaaagtggtgacttggataggcataccactgccgggtttcaggctcctggtggttctccgtgtctggggatcttagggttgtggactgttgggattttcctttccgagtgttcagtggattgttagaatgctccttctagtcagggactgcctgccactctttagagggctagattttcagaccgtgttgtcacttcagaatttgaataggcagaggaatcagctgttctgatgtataagcttgtgggctgggcagaattggcaggggcacccaagccagactaggcagccctttgaacactgcagggctggcagagatgggagaggcagtaggaagaatggatgcctgggaataaaggtaaggcaggctttcccctccattcctgctgtggcaagggagtttggccagccctgttcacagtgctggggcagcacaggaacttcctgtgtcagcttgcaggacggcctaaaggctctcgaccttcaggaactcagctctcctttctctgggtttggagtttattaaccagctgacatttggactgttctttaggaaagtgatgtgggagactagctgggtgaagtaggagtgttgtgtctgagagcacgaattcgctgtcccagcgacagagtgctttagtagtttggtgtgtcgctggcttttgttaaagcactgactttgcaaatgatttttttttttgtaaacatcagcagtcatgcctggctgacctgaagttactcactagctggccttctgatataatggctccattgattgagagagagagagatgggaggtgttgctattaagaacatggccttgcttctggaggtccggtgtgggggaggtggcagtcacctactgtagcgtcctgggctggtggaaggctgcttggataaccagatctggccttgggtaggggggtgacctgctcacttgccggccacgtggaacagagcatttgtgaacacatctggtctttggctttgtctttcttatattcagccaagtcctttctcgattggctctcaggacgcaaacagaacaaatctgtgtcaagccttcagccgtttggaaatagcggtcggtctctttgccatctccttcctctctgcactttccttcccctcctctgtgtgacaaggcctcggactcttaaatagggtggggggatgggaggaagttcaaaggtcctgagtccattcttgctgcttcgaaacacagtgctgccgttatctgtggaactggtctcctagagtagagcaacttttttttttgacaatttctaaggctgagttagctctcggagcaatactattgctgctggcctgggtttaaccctcatctgcaatcagtatgtttttaagtggttatgaatccttaccttctgggcgactgctagtgacactgacactttgagtctttaatgcaagatgataccatttcgattccattgtattacttcggtcaggtcacatgctggctgcctacttaggaatgtccctgagtttgtacagagcgccggcagtcaccgaaggagccccagcacaggcacccgtgggggcgggcaggtgtctgtttgctccacctctgtgtgggctcattcgtgggttttactgtcaatcaggcctttggcatgtcctgctgtggaaactgtatatcagaaaagctgtgtttgtccaaagggctgcttgaatgtgcggttggttcttttagtctagtcagccattgaacttttttttccctaaatcctaaaacttggattgtctcctgttgcttaggctctggaaatccttcctttcaaaaccagggccgtttcatgtggtttaagcagttctagagattaaacatctgtacgcattggcagcgaattttgtttctgctgtcgccttggtgtgtaatgtctagatgactcgccttaagaacggtgccacctagtcccgtgcatacgtcccgtgtaagcgtctgcttacaggccatatctgctaaggaagtacagatgaggttaaaatcctgccccagcctgggtgaagctttttcagcatgctaggggacttggcgactcccctcaactgcatagctgctgttgtgttggaatgactcttttcaacctgagcacttaggagtttgtttactgcttgagggtttattttttccatccaaggtctcaaagtgtaatcacatcaaagacttttgagattagcaacagaaaaaaaaaaaaaaaaaagacaaacaagaaaaactcacagtggctctccagtatttcgctgtaggtgatccaaagttcacatttctgtttaggaagaaatcttagagttaagaaattcaaaacagttgtcttacccctggtgtgctcattgtttaaggaaaggacagtgcttcgttgtacgtacgcggtaaattaaaattaaatctgatgaaaacgtcagtttctcacgctagtggtcttcaagtaacaagtgctgaaatggtttgcgatgagaaggtcgggcaggaaacgcaggcatttccatcattgttcagagttccattgaacagccctgcccagcaggctgtggcttcagcaacccctttcctaagattctcgggccagttagtaatctttccgtgagttttcatggtagttttctttctcttgggtaatcctgtggcaatacttaacttccctagtgagtgtaactgctcaagcccgggtcggaaacaggttctgctggatccctgttgcaatcttcccagtccttccttcgccctgggagcattgtgtctcagaacacaacgctggcctcctttgggactaagccatcccggaggggacccccaccattacagaatgagggtgggtactcctaaatatgctgggctagcttttgcttaggctaataaaggtcttagtttaatgctttgagcaaaggtgaagagagccatatggtcccatcagctaaatgataattctagaattgtgtttttaaatcagctaatggactcttagctaaatagacctgcttagtttaatggagtggagcggaggctgaagggggtggggtgttgtagtctgtagtaatgttggatggaaatgtagaacatgctcaggttggcagtggtagtttttcttgacttaacaggagtcctctcagctcggtagacatctgtaggccgtgtgtgctcagctctcactggcctggaaacccagaggctctgattttgcttccctccgcggtggggttttctttcctctctgtttatcattcctgcccgcagtgtgctttgatgatgccggagcccggagactctgcggcagtacatgggagagggtttattgtgcgagtcacagcacattcagcctgctttccaaagatacgctgagcttctccggctaataaaagccacatctggatggcagaaagccacagtttaaagttttacatttatctcctgggtgtcacagccggggacgaccataatggtaaaatgaggagacccgggttttcatcttctctgataaatacggactgcaggcctggagggagtcacacagagctgcctcgttattccaaagaaaaaggcatcaggccatggtgcactctgaaagtttgaaggagaatcttaggaaaggagtttccagagctacagcagtgctacccagtggaactttcagcaatgacagaggagatgtctgccggtgagacctcatctgtgcctcggtgagacctcatctgtgcctcgttgtgaccagagaaatagagtcttgcctttcgaattctttgcttgatgctgcaaactctgacttctttgctctctaaatgttccagatggcactgccttttcaaccaaaaactaagccccggacctgaggtgcggtggcggccagaagccggcctgtccgtcctgccgggtaggatttcaccactgtacctgcctttcacccgcctggggagggtgggtcctgtggcctcagacattaattaaagatagccaggcagggcaggcaaggtgaggccgtggtgctccggcattcgttcagtgcccctgtctcctgtgctgaaaatagcctgaagaaggcggtgccaggagtacagagaaagggccaagggggcgggcgggctgtgtgcaggttcgtccttctgaaacccccctgggccagaaactgaagccaggccttctttgagtttaactgtttcatctcgactggatcgtttctctcttctcctacctccacctcagctgttgacttcatttctcgatgtgacctttgccccagtttgcccttttcttcctttggtttttgaagttgaggaatcagttgcttggttaaagcttgaatgtgactggcgaggaccacttctcctcccgatccgcggctgtcctgccctggtagctggatggatgcctctccattctcccggccagtggtttctaaactttgaaccctgaagtcctgtctgtcccacggggaagccaatcacagctggactgagaggaggcaggagacttccattccttgccagtcccaccaggaactcttgtcacccaggggttccgtggggcatcccttcttgatgggaaatgacacctgtcaggtcaccttaggatctcctagcacaagaaattctatgattcactaggaaacaagacatttcccttacacctaggttcctttttggcagctgtataagaatctgctgtattatttctaatgttttaaaaccagagtttaggattaagttgggttgtatcatttctgaagcccataatgtatgattgtcaccagtaaagtggtctggaggctgacctgtgtttactgcggttgtatccagaaggcagaggctggaccacctggcagctggggttcagacagccagaccagatttactgaggcatggatagcacccttggattctcagtgagtcctctgctgtgggaaagtggtggtgcgtcaggtttcggagagcctgggggtgggggtggggggccacaatggaaacaaggtgtgttcttagtgtaccggtggcactagggaggttgcagggcttgggtctgacagctgagctgcagtagccaagaagtcttgtgtgcagcttcacggctgtgcaccaggcctgtctgtagacgagcgtggtgtgctctggtgggccttatacacgagtgagtggatgcaactttgaagagtaattggaacctccacaatcttcagtggcaaggagggagacctccctcaaggtcgtcatgaagactatgttttctggtgctcagtagctacttactaagtgtttggtgatgagaaccggaaggtgctttaaaagaatgggaatttccactgaaacacaattcaaataagcgtagcttccctccaagcagcccggtaaccgtcagagctgcagacacaggggcaagagctgggggaatcgccagctcggggtgttctggtttaatcaggttattctctagtgagaccagaagtactactggcatcagagggataaatgcagatgctatctggagtggttgctattgttcacattggatagtttatgtaaattctctctggtcagccctcctcctacctcagattaatttgtgcaggagcagattgcttcagcatttctgagcatccttccccacgtctgtgcagagatgatgttctgcatttcctagatactgcttttgtttagatgattttttactttgttaaataacataatttctatattgaaagcaaaacagcccaagactgcagtcaacgtttagacattgtcacaggctggtttcaggagtgttttgtctgcccatgtgaccacaagctgggagcatgaaagccctttatcagcggacagtgttgaggacattaagttcagatcagtaaacatgggtccctggcttcattcatcagatgcttctagagggaaggaaggcacctggcctcccggctgccggggaggaaggtacctggcctcccagccaacgtctgcaagttctagaacgcagatgagggttctagtgaatgggttctagtgagggttgtcatgaaaggggccacaaagcagtcagttggaatgctctttttcttctgtctgcaaagagaactttattttgaactctaaatactgtctcctttcccgaagtaagagaaaatcaagtaaatagtttacttttcatgttgtgaccaagcatctgataagaagggaagaagggcttgcttttacttgtgtttgaaagtgaaaacctcaccctgggagaggagacacagtgggtagacatggtgggtccgtgatggctgcagtgtacagttgagattcttgcctgcttccaactctggaacaggaagcagaggggaagtctcgggctttctccctcttctcttcagtcagtgtgagacctacccagcctctatgtggtcttcagtttatctttcttattagcccctcacagacacgcctaaagatgtgtgtcacgaatgcctttagtccagtcaaactgacagtcaaaactagccctccccgtggtgtatagtctgactaaactggtgcgagtacttcgaccagagtgtccattcctaccctgttccttacagctttgtaactcttgctgtgattggattttcctctgtgtattcagtggaatgggtgatggtcactgggagaaaggcaaaatcattaagtttatacataggagcctctaaaagataaactcgatttttattgcataaatatttaagtagacatcataacctaagcactgccaagattacatcattgacccaagtgactgctgcccttggttgcttacattctagcaggggggagacacagtgagagacaaacacagcaaaccgtagtgcacaacacacacacacacacacacacacacacacacacacgtgtgtgtgttcagaagtggggcaggggagggagggtgtagaagacaggatggagcacagagaagtatggccaatgtggacctcactgaggaggtggggtttgagtgcactgtgaaggaggggagaggagggaagttacaggtattgcagtagagggttgttgggcaggcagggggttcatctataacaaggccctggatagttgtgggctaggaaggttgaagaatagccaggaggtcaaaggttgggtctagaggctgtcctagtaggagaagccatcacagaaaattgcattggtatggctttgtgggtcattgtcgggacctgttaaaaattcaagcaagatggaagctcttcaggatcttgagtgaagggacagcatccatttgtacgtttcctagttatgccgagtaaaagaatgactcagactggagcaggtacaaacaggaaagcagtagaaatggtaaggaagtcccaggccacccgagatctgtgttgaaggtgcagtctgcagggtagaaggaacttttgtttgagcctggtagatacattgggccctgcatctcctttccacacaagcgcaggcagaaaccccagatctggacctagtgcttggagtctcctatttattgagggtgcatcccttgatagcagttcagtgtagggcttggtgattgtctgctatttggtgtctcccttttgtgttcctgcattatatagctacactaactgatgtgtttgtgggaagtgcttaatacacgttggttgagttaatgaaacaggcacttactgatacactacttggctgactttgagagagatgttttcagtgacttaggaaatgctcttgttttctcatttaaaagtgcacaggatctgaagatagaatctacatatattttatggatggagtcattaatatgtgagtgattttaaggtcttagatttacgtggctttgaattgactattcaaaattcatcggaggaagaaaaatgaatatgcccctcatgatatttctttgtgtgggctgctgggtgtttgaacatggagagacatagttcgagcgcacacacacttctttatggggcccccctttgtttaatttggagaacgaagacgtgtgtgcattggcgtgatggatggccttggaatcctggagctcagacgctgagcaggtggtgcctctgggaattcactgttctgttgggtaggatgtgtgtatggaggacgcagataaaaggcaaattcacctcagaatgagtgtatgaacatccaggaggtggagagagaaggcttgccagcttgcattagtggtctgtgtggtctgggcagagggtactcggtttctactctgatgaaagatattcacatttgacttttggaagaacacggatggagagtacccgcttggtcttggacatgcttcagaatgggtgtaacaaaagcgttacagctgggccattcattggtgccactgaagtctgaaggaacgtcacgtaggacacacacagtcaaggcatacactgatagaagtgcatcaggagaaggttttcttggtttggtttttggttttagagctttattgtagaaaggcagagagagagagaaggtagagaaggagaggctggccatggccacgtggagagagaggagagcgagagggctagagaagccagagaggagaaggtgttctccccccctcccccaagacagggtttctctgtgtagccctggctgtcctggaactcactctgtagtccaggttgtccttgaactcagaaatccacctgcctttgcctctggagtgctgggattaaaggctaggagaaggtgttcttagttgcacagtttggttcaaagataagttttgaaagcaattgtaaattgggagggaacttcccagactaaaggaaccgtgtatgcaaaaaacagtcctggcagcctctcagaatcagctgggacccacccagctattgaatctgaatgtcaaatgcttgctgtgtggcctttagtgcttatattagcgttaagcttctggggtttacagttgctgtttgggggtggtgggggagtcttatagaaggtgggtattaatatggccaggttagcatgtccgtgggacaggtgtttggtgtgagaagctttttgaagtaattgaggcaagacatagtaaaatcttgaatggagctcagtgacacaggatggagaagagacaggaacttgtgtctgcagaagtggagagagggggacataagatgacctgttgagcgtgcagtgtggagccaccagtgtagatgctggcagggcagatagctttaagcggaagtctgtaggctgcagcccctgggcaggtgtacgaaagtgctcgttgacggcacttgagctaaggatggctctcaatggttctgtaagcgcatgtatagtaaccccagttctgcttgttggtctgcaaagcctaaaatgtttactgtctcccctcaaaggaaatgcttgctgagcctcttgttaaaggacaagcaggttagtgggatggagatataagcggcgatgttgctgtttatcgagtttgctctgtgattttcgctatttcaggcatacaggggtgggggaggggtggggggcattacgtcatagttgtttaaaacgtgcctcccatctctgttgtaatggaatccatgcttaatgtttttaagcattggtgttagctcctgtattggtttcctcgggcggctttaacaggttcctgagatctgggtgtgtcccgttacacttctgcagactggctgtcctaaacgaaggtgttggtggaaccattgctccctctgcagagaccacttccgttcctggttacgggcctgcctcagagtggcctggctataggtggtcactccagcctttacccatcgtgacatggcattatccctgtgtaactgactgactgactggctggctctgtgccccgttccttcctgcctgctctgtcacatttgacatcagctctctagttacatgtgcagagacgggctccaggtggacaaggatggggcgatgcgctttaatccagtgcagttagctagccccccaccctcacccccccaacaggagtattattattacctcctgaggctgagaggttgagtgagtcctgtatcacaccactgtcaaggcaaaggcaggatttgaattgatctttcttccttgaaactgttgtgcttttcactgccagaatccttgctaggaaatacagttgactttttttttttttggggggggggcagttggcaaccagtagaggtttttcaactaaatagtgacaccctgcccattttcaaagtagctagcatagtttgaaggctgaccatgtaccaagcatgcatggcacgtcctgttctacattcactatacctgcttgaacctcagggagcttttgaggtagacactccacaattctcgctgcttcaccgcctggaagcccgaggccccgcttacttcctggtgttccctgtagatcaactttaggaagctccgcccatgcacgcggaggggcggaggctgttgagtgcgtctgtgatgcgcgcagctttggaaagagcgggtggacttgagacatctgctagctccagtggaagcacttggtgtggtgctggctgtggcagcagcctgtgttaccttaggtgttaagttggaaacgctgaagccagcagtagggacagatgagagaggaggagtggggtgaggagacaggagtggggctgaaaggaattatgggaactcctgcagccaggctgctttctttgttttgttttcagactggtccggtaagtagcccaggtttaccttgaatttatggatgtctcctgccctagcttcacgccgggattgcaggcgtgcgccactatggccaccatcattgttctaattaaaggaaaaactccagtttcttttgatctacaccggtaaagggaggctctggctaaaataaacgggtatcaaagccccgcctcctgaggctggcagcataaatgagtgattccagctcttgacagtgaccaacaaacagagccttccaggagcctgggggtttatgcctttgtctcacagggcactcagttcctgctctgcaccacgggatacccgtaaccagtgcagcatgggtcatctcttaatgttcttgctagacattttctaggtcttccgttttggtctctggttggttggttgttcttttgttatcttacccaaggacgtgccagaggaaagagtaaagccagggactcttggtcctggccagcactgggaagcagggaaaccacagggggggggggtggtggtggtggtgaaggggcttcagtttaaagtggctgacttaggaactgcctccccccgccccccatcttagtgatccttcctcaggtggtgagcaggagcaccctcatggagtgggcacagtgaaagaaggaagagcagacctgagccgctttccttgtgtggtgggggttgtaactcagctataagctggacactctgagagaaaaaatactagacagcaaaaatacatcctctggaactactcctgtggttccaggttagcactgccctcctgggagccttcacagccctgcctcctgggaggccttggctctgggcttccagcttcccactagatctggcctgccccgtggggagtgtctcctctgtttagcaggctgtagagattcggttttagcccaagctccattttatcttcccagaacaaaagaaaccaagattttactccaattaaaagtactttctgagtccacttctcactggtagccaaccattcctggcgttgtttggggagggtctgctaaatgtaagtgtgggcagctggctggcacggcttagtgggattgtgtggccagaaaacactcaagaaaagaaataatacttgctttgccttttttatactcagagttttaaagtctttatctgtatttgttgatgtagagggtgctcagcccggaacctggtcttccaaagtaaaggcgtaaaagcgtaaaggcgtaaaggcgtactgtatgtagcccggtgctgtgaggcctccttggttccagagctctacctcaggctttgctcgaggagcgtggctccccgctgagctgcttcacccaggtttagtatttctcaggagctcaggcttcatcagaatctttatgaagttccagctacgaacattctgtttaacaacttcaagggccccatggctctgggcttcatggggaaggaggcaaacggagcagttagtgagttagtgagtgtgcctcctgatgttctcatgtgcactagggtccttctacctgtggacctcgtggacctcggtcactggggtgcagctgagccagcaaagctctgctagcggccatcaggctgtagcagggcttttgtaccaccaacaagcaacttcttttttatttttagggccaaaccgaacttagagaatggaattctttaaatggaattcttgaaagttctttttttgttgttcccctgttaacacacagccaggattcactcactcttgtcctggctctcttgaaatagctccagacttcccttcatttagtgcagttccaagttcaaagtgaattcaaattaatttacctttaaatattttagtgcttggttttcgtggccagcttaagccccttcaaaaccttgtttggggactgggcattgtaatcctaggattctgagagactgaattttagaggattgtgaattcaagagtaggctgggctacctagtaggtccatgtctggaaaacagatacaagctgacaaagtgcttgctcaccagggcagtgtgtgtaagtgtgctcaaaccctcctctgacttgaggcagtttggatgacggctacctgtgactgggcaagggagttcctaccaggctgtggtcaaacaaacttcccagcttcctacgatccagtgggtggagacccaaaaagaaggtggggaacaggctgatggagggaggggggctgtaagggggtggggaccaggaggaggaggagaagaaggaagtaggccaccttggttaaattagcattttctttcagcatctgtagcataggggaatgaaaataacccatccctgccatccacacctcccatccctgcgctctgtcctctgccttgccccttaaccttgaggcctctgtttcctgagaaagcccataggaagaccaaaaatctaccttgtgtttttggcaccttggtgatttcaaaattcagtgagtttttccaccactccccttttctctttcaagggaaaaagcagcctttggatggatccctgttgcttagtgactgggctttttgtgtagatggcttttgagggacaaaaccgggaaggctgaggtgcggagggagaatgtggggggcacaaagtgccccgcaccagccctggcgaggttttcagtggggttggggcagcccttgaggcagtagagcggctgtgatgtgtggaggggcttttcctgtctcttgctgggttggttatgcgaggaaagttgcctgtccccttagaggccagcgagacaccaggcggcttgcccaggcccttgttgacttggcccagtttaggtagcttgtcagtgttcactaaaaccagagctgcggcgctcccgaggtctccaaaggcggtgacctgaaatgcttggggggcagtagctttttacagaggggattcatgcagtgacaccgtcgtatgtaaatagtgtcgcgctctgtcacgtggcgccgacttccttgaccattagtcatttgtagaatttgagtcctcaatgtagtgatattaataaactttgttaataattaattcttttggctcagtattcatggtaaacacgaggaccatgttcctgataagggagcgtgtgcagagactcgcctctctggctttgctggtggataagacttcacaaggggccctaccctggtggcacactaacataggaaggggatggaagtgaatctgagacctcgggcgtctgtggagctgattctaatgttggaaatgcggggtaaagttccttccaaaggtgataggagtggggcaggtgtgagaatgaaccttgctgaattttgcagttacagagtctgccttggagtttaggagattttgttcataacagcaaagttaaaacattggtttacttcctcttaactctcaaaatatggaacatgaaagggtcccctttgggcttttaggactacctggtctctgtagcctaggctggtcttgaattcactatattgttccagtgcctttgagctaatgtgagcttcctgcttctgctcccaactcctgggatgcaggtgtgagcttgcgtgctagcttgagatgctcagctcacgttgtacctgtagatgcccataaagttgtcagcagtcccctggagacacctgtgtaggatgaaagcgacaagtgccaggctggctgccaggtgggaatggtgggccctttgaaacacatagctctgggacattctggaccagtgacaacctcttacttgtaagattctagaattataccaagaacttccaagcacctttcggctttaaataaataaggaaggaaacctggcaccagcgctactctgtgcacctgggccagagctgaagctcgcctctcaagtctgtcaggcctggagggatggggttggtaatccatcggccactgaataaaaatggcccccataggcccacagagagcagcactgttaggaagtgtggccttgttggaggaagtgtctctgtcccttcctgttgccttgacctcaggggtcagggtgcgcctttagaaataaatcattagctgggtgaacttttggtcttattagagaggactccggatagtttgtcaaactaactcaataaaccaaccactcactgtactactcactgtaaatatccctttcgacacatgtcttagttagggttccgctgctgtgaagaaacacagtgaccacgacaactcttttaaggacatttaattggggctggtttacagtttcaaaggtttagtccattatcgtcatggcaggaagcatggcagcttgcaggcagacatggtgctagagaacgagctgagagttctacatctctttgtttttgtttgttcttttgagacatgttttctctgtgtagccctggctgtcctggaactctgtggaccatgctagcctagaactcacagagatctgcctgtctctgcctcctgaatgctgggaggtatacaaccatctcctgactcgagttctacatcttgatccaaaggcaacaggaagggacagagacacttcctccaacaaggccacacttcctaacagtgctgcttcctgtgggcctgtgggggccatttttattcagtcgaccgcagtgtaagctttttatgtgttttctcctgcccctttgacctactcggggagcctctcctaggaaggggcttttagagtgtcctagaggccgggctgctgctctgggacagcctgtgctacctctgccttctgggcaggttgctcaagtgttgacctcacttcaggccccttcctgtgcttggagcctgtgtcagggcacgtttcctgtgggtgactcaggctgctggtttcaccaccttcctgtaagaagcaagtcctctgacccacacggccccatatctctgctgaagagcaaaccatgctctgtagtagaccctttaaagtcagcgtgcctcctggtcaggttattccaggcaagtaaggtcccattagaaaccatccccacccatcacttatacactttcctgtcatttatgcacaggttcacgatatgggaacaggatttcactgtgactttttatacacgttgggaatatactttgagcatagtcccaccctcttatttctaccccttcctcccatgtagttccccttctacttttatgtcttcctttaaaaaaaaaaaaaaaaaaccctagatttttttttcatgagagacgtgtgatatttgtcttttatgtcatgtctcacttaacgtgggattcccctgcagcagacagggtgttgcaatgcttctgtgtgctccagtgtgtacttctgttagatctctcattgaatctggagctcagacttggctagactgccaaagagactctcccctagccaggagcccctcctgcctctgcccctccggcgcggggcggtatgtggggcgtgtggcaagggcacccctctgtgtctacctcttccgtgggctgtgggtgtcagggatttagcttaagtcctcaggcttgcagggacctggcttgagccgtccctgcagccccagtttgtacttctttatggcagaataatattccgttctctatgcccgccacatcgcccttattcatgcatttcttgagggcccctgtgattaaagctgtagtaattgtgaggggtatctatggtatggtatgcgcgctcatttttccagaggctgcagtgccttggagtccctcaaccttgtgtaagccccgcccccaaacaccacgtgctctccgaattcgctttatgtcttcccggtggctaagaatttttttcatgtgtatcttgtctgcttgtttacatctttgagaactgttcacttgccaatttttggtccgacctgtatgtccttttctttctttgagaaactgccgccctaaacgtgggcatcacgggacctttggtataacagtgctcccttgactttagaccttgccacatattttctccccccccccccctttcatttccctcttcggttttaaagcaacatggcaatactatgggagggacccggtccctcctaaaggagccacttaaggagcagagcctctgaaaccttcgcctgtttcccccgtcgattcgctgatggaaatgtgtggcccctttgctgttctgttctgggcagggtttttagctttcattttaccggcctcctgggttggagacagcttcaggtctgccttcctgtgacagcaggctgcagtgtgcacctctgcagttgtccctgaagccattcaaagtacagcccttttcagagaaggagcaagccagcattggcattaatctgactccgcccacttttcctctctgggtctctttacatattagatttgctggaaaattttgcaagctgcttttattttgatatttaccatgttaaacacgagatgatgtaaagggctgctcagagttcccagctcgagaaccatcagcttcgggaatgagcaaccgaacagaacccaagtcctagcccagtaaccctggtagttcacttcggcggtcaggaaaatgtgtttgctctgctcagtgagtgcaggttgggcactctgggaccataaaagtagtcgtgtttccctttcctgtgttcacgcacccctgaagtacgcgtttctcagtgctctacttactcccagtctggattaggaaagtaactggtaatatttaatcttggtcatagaaaggaaaacactccagctacctgtctatctggtagaggttataaaacacaacattttaatagctttcttgtaccaaaaaaattactttttaaggaaaaaaaaaaaaaaaacaacctatatgttgcttcagatgtagaagcccctgaattgtgactctggactttgtaggcaggccaggctgcaggtcccacactgaagctgagctgtagaatgcttgtggttgtcttccattttatttctcagtataattctgtcagtttgttttgtctttaatcatcttgctttcttttgacaagtagttctgggaggagccaagcgacgtttcatttaaaaggcatcatttaaagagactgcgctacaccccgagcgacagagccagtggtacagtttgaggcagggtcttactgtgtgggccagaggcctgggatgtgcgatccacctcagaacacagctcttgccggtgtgagtgcacgttcacacctccacatactgtttacctggtctcacctatttcaggtgtgtgtgccttgttacctcaaaaatgatttgagcccttgcacgggggccacatgtttcatggacatgtctcctgctcatctctctgtggcagacttgacccagtatgccagcaaacttgaagtaagtgggtcacctgggatccaagtggaactggctcctggcgctcattcttccctcagtcctgtccttttacagccctgagttgtctttgcagaatgttaccgtttgcccatcaaatgaacccatacattcccgaagcaactgtgtagtaatatttagggttggagtctgacaatctgtgtcaacttctgaagcatctaagtagatggaggaaaaaaaagaaaagaaaaacataaactccctcccatatttgagtttgtgtttagactttcgaataccgtagtgtgtaccttttcaatatttaagataagaaaaccatacatcttaaagtataaaaggttttacaggttcagttagtaagttgaattaggtcagtaaaaggaaagtgtcacacataaacaaatagtttcctgtatacattcagagtaccttttgaattacgcgtttgaaaatgtcaggggctggaggggtggctctttgtgtaagagctgagcaggagccgagcgccaggatctgagtttggatctcagcatctgtttcacaaagctgggtacggcttcagctgccggggatcccagtactctgggaagagaggagccagcaaggtcaccgcgcctgctaactctggtcttgctccaagttcagtgagataatgttataagggaataaggtagagaatgataaaataggacaccacactcacatacatccttgatatccatcctccctcgacatacacgtatgtgtgcatggatgtgtgagcgcagcacacaccgtgtacaccacacaagcctgtgtgagcacaccagcagtctgcagccagaagggagcaacattggctgacctgtaggcaggacgggctcccctctgcccaccgtccctgcttgcctgtccaggcactcgctccttttctgctgagtcagggtatttgctctgaaatcaggtacacattcagaccccacctcttactacggggttacctgggtgactctcaggttcacgtagggagcagctctccatttcccttgttcaagtaggagtagtaatatctgctgtaagctgtagcaagggcaggagcagtgtgcatggtgcctagcctataccggggctgtttttgacaatgatcccttaatttatctccttcctatatccccactacccttatcacaacacatggcatcttgctgaccctttgagcaaccgtagtgaagctagcctgtggggcattttctgtcatgacatacttgtggtacctttgggaaggcacatctggctcccattcagaattctgagctttgtagtattgtgtcactgagtctggctggtgtgccagtcctgagtgtgcttgcctgccacatggtcccctggtgagctcacagagggttggggctagagtacgcgtgttagattttacctgttctgcagagtcagcatgttaaacccgttaggtttgcttgccatcggtattccttaactgcgttaaggccattacatgggttgtaaaaataaccgctctgtactgtttacctaacagagtcacaggtggaagaacactcagtcctgaatttttttcttggccccttgaacaaacactcacacttggaagccttggcaattctgtctgttcagagttccttatcctttagcttagaggacattcacccgctcctgggccatgtttcactcctgagctctcttgacggctgggagccagaacaccgcagtgagacaaatgttatatactgcacaggcacctgagcagggcgtgcactgtgcagccatggggagcacacatggctcggtggtcagtggtagagctcatctcttgtgtttgcgtcctggactatggtctccagaagcacacagtcaaatcacaaaggcctcccctcttccctccatgtcattttaaaacgtggatttttttttatctttgggagtcttttgagattttttttttctctagagtgttgcctctctgagttcccggtcttttcattttttatatctgtacatacatgggaagcctgcacaaacgtaacagagacactcactgtattacaaaactgcatgcggctgggaggggtctttttaccatgaagcaggcagggccaggcacggtgcacatctttaattccgcactcaggaggtagaggcagacctttctctgtgggtttcctctcccccttcccccagtctacaaagggagttccaggccagctaggagtttacagtaagaccctgtctcaaaacacacaagcaacgatacagagcaggcacatgctaaaacttcactgatgctgtcaggctaggagaaaggttgaaggtgtcatacttccttagctgagcaggggtaaggggcagtcttgaaaccatgagttgcttcagggggatccttgccgcctctctgcctagcaaagcatctttctcagtgacagggtggaatgatgcccgcacggatgtctgcccctgctgggctgtgccctgctgctctgggactctgcccatctcagtgaaagatctcatttagaaagagctcatgaaaaatgtgtggtatgtacgttcctccacagacgtgcatttctcttggtaaaatctgctgttggcgggttttcacttccactctggatagtgtgaagcagggcggggccaccccagagcgcagtggtagaagagtgtggcatatgtgaggtgagcctgcattttctacaaaaagtactaacatagcattttgaaaagcacactgtttatttagccttagttgaatactggtttgctctcttaattttcagatttgagggtaattagagacaaggtgagctccgggtaaacgcaagctcataactgaataggtttctcctcgacattgcactcacagactgctgggtcaccctcctggcttccacgttctctagtctctgccttttagattgcttaagttgtatgagttctagatgcctttgacatctccattctaaaactgctgaaatgtgctcagaccatgtgagcgtcaaccttgttcagccctgaagccagtagatactttcatgtcctgcctcctctgccttccgtgtggcatgtgcttcggagggagagtcacctcttgtgtggcccctgccaaaatgaccgatcccaccctgcccagcagtactagataagaagctgtggtacccttggtgaccttctgaagcagtcattagagcaaacttaaaacccacgcaagtctcccagacgatgctgctgccagactaggcatccgttaccccctccccatccccccgctgctgtcaggcacatcatgtaggctcgggctctgggtaaacctggcatgaacttgggtgccctgacagcttcattgtaccctggcaacactacccagacaccctcccttcccccaccatcgtttgatttccagcttgagttggtattgacaggcttcagagacggctctgaccttatacagtagcactgtggtgacatttcttttcctcaggaaaggggactcagcctttataaggtattataatgattctcttaatatgcaggggtataatagtcttaagcactgtaaaaacgaaaagtatggtttgggggtttatctttaggacaaatttttgtacctttttgttaagtacagaggcttggtcagcatggaacattggttggagcgctggtcaggctgctttataaattggtatttacagtcaccattttgaattccaaaggctgctgaaaaagtttaggcaaatactgacggtacccaagttcctgttacttagctatgtcattgggatttgtgcatgtgtgtgtgtgtgtgtgtgtgtgtgtgtgtgtgtatgtattttaattaattgttgtctttgaccacaggagctcttaccaaagtaaaggagagtaggcgacacgtggaagaagggaagatggaggtccaaaaagctgacggcattcaagaccgctgtaacactatttccttcgccacgttggccgagattcatcacttccatcaaattagagtaagagactttaaatcacagatgcaacattttttacaacaacaaataatatttttccaaaaagtgacccagaagttggaagaggcgcttcacaaatacgacagcgtctaatgactgcacatgggaccgcgctcttgttttcagttgaacgataatttccacagcagaacaaaacctgccttctcagagctgttgccaactctaggtggtacaaggacggctttgtgttcagccgaaaccggctggatatataattatgtaggaaagaagcagttaatatggctatgtagcagaaacagtaccacactttgtaactaaattatactatgtatgcctacactaccattgtaacttttggataatgattatactatttgccttattgctttttgaagtatgggtatattagtgtatactttgtagacctcaaaacccatgaagagtctcaaagaagctggctggataaaagcctgctgtggatgcctttttagtctcagagatcgagactacctaaatccaacctattctctgtttacaaactccaaccggagcagctatgcgactttgtgcctttagtccgcttgttttcctttctgtcccacctgggttcgagcccccaacgtttctgatggaaagagcaaagggcgggcatgttggtgacaagccgatgacaagctcccatttctgggggtggtgggagaaccagtggccatcactttgcacaggaagcatcgcctggtaagatgctggcagttacagaggcaggagacgcttctgccgtctctggatgtgaagtctcgtaggggagaaggcagtgtgccatattccctcacatctgtagttcacggcctcgactcaagggtcgcacggattgggcctgaggatttcggcagtgccctgagcacgtggagaaggaggaatccgatcggggataaagaacagaaacagtgggtgacaacgcactccatcttagtttgggggagggtctcctgtcttcctttttcttttttcttttttcttttatagcttgaaattttaatgttcagctttttgtttcggtttcaaatggatctacactgttaactgaatgagactccactgtgattcactcgtttacttaatcaaaaaaaatttcagggatgtctgtaaatttcagtgttgtacgcgatgagaagtgctgttggttgatttaaggagggaccagaaataatttctactattccagtactgaaagaaaaaaaaaatactgatttatactgtttttaaaaactaagtattgataaagcccccctcagaacatttaaccttaaaattattttgaatatcgccttttattattagaagggagctgcaaatgactgacaaataccaaaaagatttacatgcaggcttcatctaaaaagcacaaagaggttctggtgtgaaatgcccaaatctcaactgttttttgtagttgctgagctaaataatgtgattcttgagtttacagatgtaagagctgtcactgaaggctgaggtccctgcatctgctgtccctgtgaactacttccaccaccccggaaaccctggtcctgacatggtaacgtgggggtacagaggccaggctcagagggggtgagccacagttatccgaaagggtcagcttgcagaagggtcaagcaaggaaaggcgagtgggataattacttcacagcacattcactctctacaaagaaatcacatatgggttgacattttaagaacggatgatgatcattttgacctctggtcaaatccttgtgcttcagaactctgaggcggacgtggcatcctgtggcgctgtctttactacaggcacgtgggactgccgccaaaagccatgctctcttaaaaagcaacttcctctcttggattgcaaagtacagcgagataaagaaaacgcatatatatttaaaaattaattttattccagaattttggaggttacaatgatagcatttaagtttgaattggtgttgaagaagcaagctctctgcgtttcagatgatttgagcgtcccatttatttgcctctttgttttgatggtggtttgattttttttttcttttaataaaattactaaacttgtgcaatagtagcaaggacatccatcacctgaggtgtctgattgtgctttagccagggtggacatagcttaaatcataaactaagattaaagtccagagaagtggaaagctgatgctgcctcctgctgagatagcgtttgtcctccctaaccacacagcatcatctcaccggctcgtgggacttgacgtgaattctgtgggttaatgcaccaggcttactagtgtccattttcatccaagatccttactctctaacgttcttggtcctattgaagcatttcagtatctaagcatactgcaatgttaatacccaagagaaaagccattacgtacgtattctggtcacacgatcggtgtggcaccgttttatttgttactgttgttgttttattttgttgtttctgttttttaaataaactatcacaccctccaagccatcgcttgtcttttatttctagaacttgtagttttggtatggaattatgtataccacgagggtgggagggtggccctgatgagcctggtcttaactattttaattgcaggcagggagttgtttatgggcggtagccatggtgcagtgagactggtttgacagtcatgcatagttttctaggtggctgtatctgaaggcacagtcacaccccgaatggagaaacacattggaaagtgaagcatcaatcagagccctttggcttgaacagtgcaggagtgcttttcccagacttctctgctacactggcttgcatttactgctaacaatacagcaggctctcaaatgctgggttgtaaccgtcttacattttgcggctgttctcataactaacaacctgaaagaagttccagtttgtcaagtcgaacatgtaacatttgtatgtaacccttcccgtgccagtatccactaagttcctccatctagacatttcctcccctgggagcttgattccctctctcaatcaaatcctctgtctgagcctttcatggcccaggcattatctgcttgttctctttcagcgttgtctttgactaacagagggttcgtcacacagggcattgttgacgattgcttacttccttcacaatgttatgagtagtgcggatcagacaaatttatctttccaaaaataaacaagggttgcttcatcctcggcttcagtagggtgatgtgttttcttctttcaccaaggaagcgttctctaacatgagacacagagacgctgaaagacagtagtcggctttcagcagaactggccacttgtgtcgtccatgggacgctgaatgtcaagccatgcaccatccaggcggtcttcctgggcatttatgtcggtaaactgagatccttcagatggtggttaacttggatccaaccccaaacacacagtaggtgttggagtaaaatccttacaaactgtctgcaatggttatgagaaagggccaaactcaaatctgctgaacccaagaaacaacttgcaagggacctgggccatcccacaaggggccacagtccctggggatttcctttgttccctttggagttttctgaggtgatccctgttcatcattgcaattctgccttcccgctctccctcagccccgctagccttcctttctcaaaggacctgcatgggaagacaggaagtgcttggcccctctcaccaggaactgcatcctgtggtccacacgagccgctgaggaggagtctgtccattcccattgctgtgagtgttaaagccccagtgaggtcttgtgtcttttcccagagatcacacaaactaaggggtgccactgctgacgctcattctggaatctggccgaagcctcttaatcttacctggttccattgggtgacatatggccgcttttggacattctctaagacccctgatactgggtatatgggaaccctcgcatcctttggctgtgacataaaggtgtagaagacacatctaaaatttgctttgcgcctgttctgctgggagtacgagcgtgtgtggaacagctttgtcttaataggaagaagtgactgaagtcctgacagactgggaagtttgtcagagcttattgatgctacctagctccctccccataccagtaacttgtgacgtaagaatgaccatggttgagtgtggtaagatgtttgatcccagatggtcagggtgtagctctgacaaatgctactggtcacacatgggagcaacggactgttctccagtgttaatgttctggttactaagagcacgggaggctgctgctgttgctgtgccaatgctctggacaggaacccaggaaaacccccacaatggaagccttttggccctaccccaggcctctgaggtggagggaagtcaatcaggattggtttgtggccacagccctggaggtcacaagttcgcaaaaggccctggtcccttaatgtccctacaccatcattcttgtggtagccctagagctctcaaacatgatagtggctgtcttgtctttttttttttttaagacatatttattatatataaatacactgtagctgtcttcagacactccagaagagggtatcagatctcgttatggatggttgtgagccaccatgtggttgctgggatttgaactcaggacctttggaagagcagtcggtactcttatccaatgagtcatctcaaaagcccgtggctgtcttgtcttagtccatccttactggtaaagtatttgagtcatgtactgagggcaagactgattgtcctcatgaagttacgttcaggggggcttgaaacactcaagagagtgttctattgccttgtgactttgttagcccgttgagaaatggactctgaggctgaagtcatattttccctgtgcttcccgttttcatacactccaggaaatgactctcaggccctcagagtttgctgggttggcaggcctctctgcaagctgagccagcacatcagaaaaatgacgctttggagccagaggcctgggtccaccccaagctgcttcatacctcgtatgacctcaggcagttggctgacccatctttgtcttgtgttatgcggtagacctccttagagtttacgacactggggacctattgatgcagaccaccatggaaagtccttagccattttacaattgtcttctctaacagatattagaagcgatcattgattccagaatcaggtaatgagtgtcacacgaccttgagctgcgagtgtatgtgaataacctgcagcctataagggcttcgtgtgcccagctgtgaatgtgactcagaacaaaacagtgtgtgctcaagacattgagttattttcataactcatttggacaatccttcatctggggcttcgtaagtgacaaccacgtgctgcgatgtctgatggctctgcactcctgggcttttctgatctagctctcctattttttaataggatatagtgactcctcgacaaagacaaggcaacagttgaatggcaaatgaaccctgagctcaaggatgggaagagagggtaaagcaaagttccctaattataggggacaaagtgacaggaaagatttggaaaatgagaaccatggtggcaacagtgccacagaaaaatgaaggaatccccagtagggtcccaagcaggcatgatgttcctgttcggtcctgcctttcttctgccctgtgtggacaggcacaggaccaaaccttcctccagcatcccactccccagagcccagcccagcctcctgaatcctgcaaacctgactcctatcactctcagatgcgctgaatggatgatggggcttgggattccagctcaggcttcatcctttggtaccactcccaatccctgagctttctaagagctgagtgccagtgtttctaggaagttgtcctatagctctaggcaagaagaaagagcggaagacggctcagaattctgctagcttgttctacatagcaccatagggcctacataatgaagtctcaaataaataagaaatctatatgtgagtttagaatttccagagaaaatccaatgaaataagagacagagcagtatcccacatgctgctccaatgaataaaacaaatgcttatatgtgtgtggattgtttcatacatacccccagactggtaacaaggttatgttgtttgctttgggggctgaagatttggggcaaagagaggggtggctgttcattgaaatctctgctggagcttttgtggatgaatggttatctctggaatttcaaacaaacagagctggagataaaatttgaaattaaccaagggaccagcaaaatttaagagggatgtcagagaggtggatggggctacagcccaatgcctttgggaccttgaaacgaatctattcactgtgttaccccttgttgagacccactacatttggaataactggaccatggaccgtaaggacaagtgtgaccaggccacggactcttgttttgtgtactgtgagctatccatttgtcttgctgatcaaaatccctcctggctcctgatctgtgaatccttgtgaatctaaggctctcttctcagtgcctggccccctctctctctaccttcttgttactgtcatgatgacatttagcaaagagttacctgtggatccaggaacagaacctctttctctcaccatttatatgtggagtctactatgggcatgattctccattctgccatcacaaccatgctttatctacaggaatctcctcaatttggtgagcaaggaagatagaaaataacagatctagaaagaggcagcgctggaatgtgactacaggtcccctgaccccacagtcaccaaagcgttctaaatctcttgttacctaggcaatcctatgcaaggtggcggggaagtcgtgctgttgttgtctgtttcttccctgtccctgtcttctacttccccaagatcccagctgtacaaagagccagcaaatgcagacacaggcagccttaatcacgaaaacccgcgagtgactccccaggttggtgaatgatactaaatggcactttaagaaacaaatgaaatggagacatttgagccctgtgcaccagccctgccagcacacacagtcgccttcctgtgagggccatcgttcacaaagacaggcctctgttcagcttccaggagaatggtgggccggctggctgcagagcgagcggccacagagacgctttgtgcagcagggcactgcctctgtgcaccagcctgccgatgcagatttgtggccctgcagagtgacagatccctcccccctccccaacccccacacatcacacccttctgagccattcatgaatggctggctgttgggttttgactgtcaaaccctccactgctaagctgctgctgtgcagtacagggaaagggctttgggaatcgggagggagggaagcctttgagttgggggcccagggaaacgcggcatcgtcagagctgctggagagatacccatatgcaccaggaaaaagtcacttgccatgttgtttcttttacttactgtaaacactccagtgaagcagacttcagaccagcatgctctctggtgagtctgaagccctttgggaagccatcatttcttcaaggacatttaccccagtgaaccacacactgaagtaaattagttccaaaagctcatgaaggcagccatctacatggtagagatgtcctggacatgaggtgatggcgtgcttcattcattccacataattggggctacagcagtgataaaactcaccagactgtacatcctagtatacggagaccgggaataagttcattagtgaaagaaatagtaatatttggaagagagcaagtgttccagggaaaacatgaagtgggaagagatggaggatgagcagtgagggatggttttgctatgagctggtcaggacgggacttacgacttgaagggttttagagagagccacatggataaccaaagacagaatgttgcagagcatatagagcagaagcaaaggtcctgagccaggaccatgcctagcatggttgaaggacagcagggcacagggatctgtgtggctatatgaggaagggtgggtgaggtggagtaggtagtcttgcagggttgagtgggagattagcctagaggaggaggaaagggcagagagggccatagctgtcagggaatgctgtgaatttctctcagtgcgatggagatccttgcagagttcagtggaaaaggttacaatttgctttgtgggacctgaacaatggccactgagccggtgaagaaaggcagggagacctacagaaagctttgcatcctccaatgtgggcgtggcctatgccaagactggcagaggatgctcaggacagctgggttgagaccctaggccaggacagcatatccccagagtatgtacctgtgtcttcttagcatctatcactggcgaccgcctgcttttgattgttgatgtatttgtagtctgttgactgccttgctcagtgaattgttgattcactattgttagataggctctcctatgtactgccttcataaggtagctgggagggttatcctatggaccacttcactgtcgctaccatcttcaggtataatatcctgacctagaaaactgccttccaagtctctgagtgccacatctattttcagtttttcttgagttttctgagaaccttgcctctgggatcaatcgagtctgcctacttgtcatagacgccaagttccgtctatccctgggatctctactccaggtctgttcattgaccctggagactttgtaactgcctggtcttgagttagccaaattggacagtctgagggtgctcttggattccttcccactgcccaggacagtcattttcctagctttctgtagcatggggctttagctgtttgcttgcctaccaggctgccacacctccaaactgccatgtgaggcttcttgtacctctcttagtacttttggttcttcttttgtttttttgtttttgtttttgttttttttttttgtttgtttgttttttgtttttttttttctctccattacttatctgcaaatgagctagcaaaaccacagattctttttcttttggatatggtcattttggaaccaagtttaatgacaacatcacccaaggacctttaaattaaaaatgttattctattgggctggagagatggctcaagatggttaagatggcacactgcttggttttgcagaggacctaagttcatttcctagcacccacattggatggctcacaactacctgtaactccagctccaggaggatctgaagtgttcaggcatgtacacacatgtgcacaggcacacatgcatatatacataattacaaatagtaaagggccttttacaaaacagttgtgatgcctaaaccaatcaaggctgtgtcttgaggtgggctcaggcttcagtgtgctgccaaaagctcccaaataattctgaatacaatgtcactttcctcaaataaatatgggtagggccaggctccacaaactagactacagctcagaaattctctcagggtgaggacgtatggagagtcagtcaggggagagattagaacagtggttctcaactgtagcaagtagtttctattgatttctactttatgctctgggtagaccacgttaccatccacagccttacttcccttggatcctagaatgaaacacacacacacacacacacacacacacacacacacacacacacacacacacacttactaacatgctcttaccttcatacccagctcaacacctctaaatctgccctcagcttagttgtgtttctaatttcctgtctgctacccaaggcccagtctgggaagcagcctatggctactctccccaagatcttacatggctgctggctctcttctcctctgaaacatgacaaaacctctcctcctccgctctactagcttgcctgcaggaatctggaagtcccacctcttccgcccggtcattggccactaacatcttcattgattgatcaaaaaccaattggggagcaggaccttcattggtcacatgcagattccctatcaaagcatcagaacgaacccctacctcagcttccctaaggctgcgaccctttcattcagttcctcgtgttgtggtgatctctaggtataagagtatttccttgctacttcatagctgtaagtttgttactgttatgaattagaatgtaaataagcaatgccgggtatctgatatgcaaccctcaaggaggaacgacccacaagttagaattagaagaagttggattagaagaagaaaaacattcattatataaacttaaatctttgttccattaccaggacccaaggcctggagcgcactgtgagttaatgtggtccagtctataatctgttttgagtagcacaatcctgtattacagtttgtgtgcatgggtgaaaggtggtgatttgctaactgtgaatgatttcaatgcatcatgaaatgtttctcattctttaatgcattcgagaagcggcctcagcccacctgggaagcagggactggggagagtagacatggccaggaagacagagatttctagaagttggatcatctttttttttttaggactcaagacattggaaaagtctcttagctttcccacaatgggagggtctgtgtgtctcctattacaaaggtggaggactaagggtcgggaagttaattatgtacaggtccttcatgcagttttgtagaacttcctggtctccttgtgctaccccacccatctcgccacactggacctcatgccagctggccttttgtaagccatttcctctgttgttctgccctcccaagtcctctttgtctggatagatcctgctcctccttttggaatgggtttgggcattacctcccattggcagctatccctgtcctgtcttcctagccttacttggttaggtgtcccgccccttggatatttgtcatacttcatataatctcttcccgacttccccccctctcctttattttgcttcttttctagtgtttaacaggttggccagcatattgatttatggaataaagagtgggtaatgacccttttcactgttaggttttaattgccacgtagttccaagcagagtgacttaaaagctcagtggccatcttcctctccctcccttctggttcaaattggttggcaagaaacatcacccccctctcttgggcaaagtacacagcccttagcatccattgtcacagcacagtgctttaccaaactccttcagatgggtgttccaagcatctgctgtgactcagatgtgacttaagtatactggaggctcactcctcactctggtggtattgtagctggtggtacctgtaagagatgaggcctagcagaagatgggtaccatctctgaagatgcatactgtcgttcttgggagcatctgattttcatgatagcagttgttaggaaaagaaagagcctggctctaactctttctctggctgctcatctcacatgtgatctcctcaacacacgtacctgccattgtgatgcctgttagcagcagtccttcccaggcagctgaacagatggggtggtctaaacttgaacattcattctctaaaaactgcttccttataaaacggctagctccaagtccttgttagaatgatagaaaatcacagttggtggtggtggtggtggtggtggtggtggtgacagagggtgcttcagtgcaccccgttactcagtacattagttgcctgctgttgctataacaaaccatcacaaactcaatcacttaaaccatcagacatgcattactttatcattctggatttcacaagcccaaaacagatggcatggaggtcaaggtgtcaacaggattgcccttttctttggagactacaaaaagggaggctcttttcctgtcttttctagagtcatgatgatgacttcatttcctggctccaggtctctttcatcttgacagttcacactgactgagtctctcctattttgaatcactctggcatgacccctctgtcatccttgttcccatttagaaggcccttgaggctacacggggcccagcaggtaaatctaggcgactcttacttagtaaggtaacctttatggcatatgcagcctctgttgcctcttgccatgaatgtaacagagttacaggttctcagatttaagatgtaaacatctttggaggcagctttattcagtttaccatatcatctatctttgaatgtttgtatgatgatctctgtaaaataagttaactagacatgaacttgcagaatcgtggaagatttgcatagtttatttgccttcatggtggtctagagttctgtcacccatacaagcaagtcccaggcctgtcaccctccagcctgaacattttagtgcattaatttattgtcagt

SEQ ID NO: 3253 - DNA, 4435 bp, Mus musculus
tgcagtcgctgctgcgagccgagccgagctgcacggagggcgagagcggagcggggagcggaccggtgcgctgccctccaggcttcccttcggcgttcgggggggggatcctgactgcaggggccctcggaccggcccgagctcggggcgccgggctcgggaccatggcgctgcgcgcccgggcgctctacgactttaagtccgagaaccccggtgagatctccctgcgggagcacgaggtgctgagcctgtgcagcgagcaggacatcgagggctggctcgaagggatcaacagccgcggcgaccgcggcctcttcccggcctcctacgtgcaggtgatccgtgcgccggagcctggccctccggccgacggcggcccgggagctccggcccgctacgccaacgtgccgcccggcggcttcgagcctctgcccgccgcgccacccgccgccttcccgccgctgctgcagccgcaggcgtcacccggttccttccagccgccgggcgccggctttccctacggcgggggcgccctgcagccgtcgccccagcagctctacggtggataccaggccagcctgggcagcgacgatgactgggacgacgagtgggacgacagctccacggtggccgatgagccaggcgcgctgggcagcggcgcgtacccggacctcgacggctcgtcgtcggcgggcggcggtgcggccggccgctaccgcctgtccacccgctcggacctgtctctgggctcccgcggcgtctcggcgcccccggcgcaccaagcgtctggagccaagagctcggccacggtgagccgcaacctcaatcgcttctccaccttcgtcaagtcgggcggggaggccttcgtgctgggagaggcgtcaggcttcgtgaaggatggggacaagctgtgcgtggtgctgggtccctacggccccgagtggcaggagaacccctaccccttccagtgcaccatcgacgaccccaccaagcagaccaagttcaagggcatgaagagctacatctcttacaagctggtgcccacgcatacccaggtgcccgtgcacaggcgctataagcacttcgattggctgtatgcgcgcctggcggagaaattcccagtcatctcggtgccccatctgcctgagaagcaggccaccgggcgcttcgaagaggacttcatctccaaacgcaggaagggtctgatctggtggatgaaccacatggccagccacccggtgctggcgcagtgcgacgtcttccagcatttcctgacctgccccagcagcactgatgagaaggcctggaaacagggtaagcggaaggctgagaaggatgagatggtgggcgccaacttcttcctcactctgagcaccccacctgccgccgccctggacctgcaggaggtggagagcaagatagatggcttcaaatgcttcaccaagaagatggacgacagtgcgttgcagctcaaccacaccgccaacgagtttgcgcgcaagcaggtgactggcttcaagaaggagtatcagaaggtgggccagtccttccggggtctcagccaagcctttgagctggatcagcaggccttctccgtgggtctgaatcaggccattgccttcactggagacgcctacgacgccatcggcgaactcttcgctgagcagcccaggcaggacctggacccagtcatggacctgttagcactgtatcaggggcacctggccaacttcccagacatcatccatgttcagaaaggagctcttaccaaagtaaaggagagtaggcgacacgtggaagaagggaagatggaggtccaaaaagctgacggcattcaagaccgctgtaacactatttccttcgccacgttggccgagattcatcacttccatcaaattagagtaagagactttaaatcacagatgcaacattttttacaacaacaaataatatttttccaaaaagtgacccagaagttggaagaggcgcttcacaaatacgacagcgtctaatgactgcacatgggaccgcgctcttgttttcagttgaacgataatttccacagcagaacaaaacctgccttctcagagctgttgccaactctaggtggtacaaggacggctttgtgttcagccgaaaccggctggatatataattatgtaggaaagaagcagttaatatggctatgtagcagaaacagtaccacactttgtaactaaattatactatgtatgcctacactaccattgtaacttttggataatgattatactatttgccttattgctttttgaagtatgggtatattagtgtatactttgtagacctcaaaacccatgaagagtctcaaagaagctggctggataaaagcctgctgtggatgcctttttagtctcagagatcgagactacctaaatccaacctattctctgtttacaaactccaaccggagcagctatgcgactttgtgcctttagtccgcttgttttcctttctgtcccacctgggttcgagcccccaacgtttctgatggaaagagcaaagggcgggcatgttggtgacaagccgatgacaagctcccatttctgggggtggtgggagaaccagtggccatcactttgcacaggaagcatcgcctggtaagatgctggcagttacagaggcaggagacgcttctgccgtctctggatgtgaagtctcgtaggggagaaggcagtgtgccatattccctcacatctgtagttcacggcctcgactcaagggtcgcacggattgggcctgaggatttcggcagtgccctgagcacgtggagaaggaggaatccgatcggggataaagaacagaaacagtgggtgacaacgcactccatcttagtttgggggagggtctcctgtcttcctttttcttttttcttttttcttttatagcttgaaattttaatgttcagctttttgtttcggtttcaaatggatctacactgttaactgaatgagactccactgtgattcactcgtttacttaatcaaaaaaaatttcagggatgtctgtaaatttcagtgttgtacgcgatgagaagtgctgttggttgatttaaggagggaccagaaataatttctactattccagtactgaaagaaaaaaaaaatactgatttatactgtttttaaaaactaagtattgataaagcccccctcagaacatttaaccttaaaattattttgaatatcgccttttattattagaagggagctgcaaatgactgacaaataccaaaaagatttacatgcaggcttcatctaaaaagcacaaagaggttctggtgtgaaatgcccaaatctcaactgttttttgtagttgctgagctaaataatgtgattcttgagtttacagatgtaagagctgtcactgaaggctgaggtccctgcatctgctgtccctgtgaactacttccaccaccccggaaaccctggtcctgacatggtaacgtgggggtacagaggccaggctcagagggggtgagccacagttatccgaaagggtcagcttgcagaagggtcaagcaaggaaaggcgagtgggataattacttcacagcacattcactctctacaaagaaatcacatatgggttgacattttaagaacggatgatgatcattttgacctctggtcaaatccttgtgcttcagaactctgaggcggacgtggcatcctgtggcgctgtctttactacaggcacgtgggactgccgccaaaagccatgctctcttaaaaagcaacttcctctcttggattgcaaagtacagcgagataaagaaaacgcatatatatttaaaaattaattttattccagaattttggaggttacaatgatagcatttaagtttgaattggtgttgaagaagcaagctctctgcgtttcagatgatttgagcgtcccatttatttgcctctttgttttgatggtggtttgattttttttttcttttaataaaattactaaacttgtgcaatagtagcaaggacatccatcacctgaggtgtctgattgtgctttagccagggtggacatagcttaaatcataaactaagattaaagtccagagaagtggaaagctgatgctgcctcctgctgagatagcgtttgtcctccctaaccacacagcatcatctcaccggctcgtgggacttgacgtgaattctgtgggttaatgcaccaggcttactagtgtccattttcatccaagatccttactctctaacgttcttggtcctattgaagcatttcagtatctaagcatactgcaatgttaatacccaagagaaaagccattacgtacgtattctggtcacacgatcggtgtggcaccgttttatttgttactgttgttgttttattttgttgtttctgttttttaaataaactatcacaccctc

SEQ ID NO: 3254 - protein, 663 aa, Mus musculus
QSLLRAEPSCTEGESGAGSGPVRCPPGFPSAFGGGILTAGALGPARRAGLGTMALRARALYDFKSENPGEISLREHEVLSLCSEQDIEGWLEGINSRGDRGLFPASYVQVIRAPEPGPPADGGPGAPARYANVPPGGFEPLPAAPPAAFPPLLQPQDGSFQPPGAGFPYGGGALQPSPQQLYGGYQASLGSDDDWDDEWDDSSTVADEPGALGSGAYPDLDGSSSAGGGAAGRYRLSTRSDLSLGSRGVSAPPAHQASGAKSSATVSRNLNRFSTFVKSGGEAFVLGEASGFVKDGDKLCVVLGPYGPEWQENPYPFQCTIDDPTKQTKFKGMKSYISYKLVPTHTQVPVHRRYKHFDWLYARLAEKFPVISVPHLPEKQATGRFEEDFISKRRKGLIWWMNHMASHPVLAQCDVFQHFLTCPSSTDEKAWKQGKRKAEKDEMVGANFFLTLSTPPAAALDLQEVESKIDGFKCFTKKMDDSALQLNHTANEFARKQVTGFKKEYQKVGQSFRGLSQAFELDQQAFSVQQAIAFTGDAYDAIGELFAEQPRQDLDPVMDLLALYQGHLANFPDIIHVQKGALTKVKESRRHVEEGKMEVQKADGIQDRCNTISFATLAEIHHFHQIRVRDFKSQMQHFLQQQIIFFQKVTQKLEEALHKYDSV

SEQ ID NO: 3255 - DNA, 109294 bp, Homo sapiens
ccaggagggcaaatcttgccattagatacatgttggctggcgcacataatgtttttaatactacttttttatacacaaacagaatttctggcttcttaggaatatcaagctatatgacaacacaaggtccatattcctgcataaaaccataggggcaggggttcagtccaagtgtcccctttaaatggggcaagtgctcctcagttcaccaaaggcccccacctccctaccactccctacccctccaccaggcccacacattagttacctgtcaataaaaagagttgaactctgtaacatatttgaagagatttattttgcgccaaatatgagtgaccatggcccatgacacagccctcaggagggcctgaaaacatgtgtccaaggtggttggggcacagcttggttttacacattttagagaggcatgagacatcaaccacacacatttaagaaatacattggtttgttccagaaaggcaggacaactcaaagccgaggcttccaggctatggtgaatttaaacattttctgattgacaattggttgagtttatctaaagacctgggattgatagaaagggaatgttcaggttaagataaagactgtggagaccaaagttcttttgaaatcttatagtggctgccctaagagatgatagatgacaaatatttcctattcagatcttagtctcttcaggattgggaggatctgcaataaaaagatctagctatgttaagagattctttacagatccaaactttcccccacaaagaacagctttgcaggacaatttcaaaatacggcaaagaaacatgttttggggtaaaatattttgattttcttccttgtctcaaaatgttatgatgccagagtcagtttggaaagtaagtcatgatatatagagttaaaacccatctgatgtgaatttatgatttgtaggttatgactccccagaccccttaggtaggaatttgggcaagataaaaaatcaagagtttagtccttatatccaatgagggcatttgaactaatgtaatggcttctgtttgttgttttgttttgttttgttttgctttgttttgttttgagtcagggtgttgctctgttgtccaggaaagtgcagtggcacaaacatggctcactgcagccttgacctcccaggctcgggcgatcctcccacctcagcctactaagtagctgggactacaggtgggtgccactacacctggtggatttttaaaaattttttgtagagatggggtgtcattatgatacccaggctggtctcaaactcctcagcctctgattctctcaccttggtctcccaaagtgctgggattacaggcatgagccactgtgcccaggcaatggcttctttaaaatgctatttatctctcctatttaagtgcccctctctatatttaaatagtagtcctgctggtacccacctcatgcaacttagattactggatttgtatagttttaccctttaaaaatctattttgtaacttgctatactctcctagaatactatgcggattaagttcttaatgtgataaatattctattatatacatattcatttctcttccaagtgatttccttgtcttagggacccattagttacttgctattcaatgggtatcaatatattgtgaaaattaatctttagtaaattttcatttaggttttgtttgattgtttattcttttaggtttgattgctgatttacttctctgaattttagattcttctgtagtttctgacctccaggcaaaggtggatgaatggagttctgatatattagtgagataaagggctcaatagaattcatccaagagacacagctgctccagggagagccaccatcattagcaataaggaaagtaagagtacaaggctcctttgctagaacaactgggtgcttctttctttttttttttccctcttctcttcctgacctccatattctaactttacaagtgatttttttttcttttccaaagtaaaggatgagaacagaagattctttctacttccatatccaggaactgaaactcactatatttatccccaaacacctccttccattcttctcccagattggctaatgtccacatttatatgcttaatgtttcctatagctactacacatttgatcacttccaacatgaaacattggaacaaccctgaatatcactgccataaagatagccacagagattggttactgcttggtgtttgccttatttgaacacagtttgaacacttagcagtctgagtggttgcagtatggcttctgggattggccaaaactcagctgttgttacaggtgcatacaactaagttaggttttcaattttgtctgattattaagctaggttacagttcatccacaaggactcaaatatagaagtacagagtcctggctgggtgcgggtggctcatgcctgtaatcctagcactttgggatgcccaggcgggcggatcatgaggtctggagtttgagaccagcctggccaacatagtgaaactccgtctctactaaaaatacaaaaattagccaggcatggtggtgcgtgcctgtagtcccagctactcgggaggctgaggcagtagaattgcttgaacctgggaggtggaggttgcagtgagctgagatcatgccactgcactccagcttgggcaacagagtgagatttcgtctcaaaaaaaaaaaaaagaaaagaaaaagaaagaaagaaaagaaagaaaaaataaaaaataaaagaaatacggagtccttctcaggccatatttagttagctttaatgctgcatacaccttaaccataccacatagcatatggtttccatgtcagtttcacccaccagctccttaagggataaagcaggtatcttctttagattttggtgcctacttgtttgatgaaaggaaagagggaaggaaggaagggagggagggagggagggatgctgacagacattctgagagcagtgtctagatatcccgagggccgtggcagagagggatgtgaattacccatggtgatgcccccaaggtgatggctctttggcccagaagatgtgtacagggcaaactcttacgcctacagggacagtgaaggaaggtagtcttaggtataaggcaccaaaaagtagtggggactgtggtgaacagacagagaggaaatgctctgtctaaagggaacaagctaataattgctatgcagaaatgctggccctgtgtggccagaccttctgattggatttttttttcttttttgagatggactctcattctgttacccaggctggagtgcagtggcatgatctcagctcactgaagcctctgtctcccgggttcaagtgattctcctacctcagcctccccagtaactgggactacaggtgtgtgccacacacctggctaatttttgtatttttagtggagactgggtttcactatgttggccaggctggtcttgaactcctgacctcaagtgatctgcacctcagcctcccaaagtgctgggattacaggcatgagccatcgtgcctgacctggattcttctttttttttttttctttgagatggagtctcgctctgtcgtccaggctggagtgcagtggctcagtctcagctcactgcaagctccgcctcccgggtttatgccattctcctgcctcagcctccctagtatctgggactacaggcgcccacccccacaccccgctaatttttgtatttttagtagagatggggtttcaccgtgttagccaggatggtctcaatctcctgacctcgtgatacgcccgcctcagcctcccaaagtgcagggattccaggcgtgagccaccacgcccagccctggcctggattcttttttgactgtttttaaaaaaaattggatcattattttaatcagttaatactgattgtattttttcccccaaagaagtcagaatcaatattttagaatgagaaatctcctacattttaaatattggtcacattaaacattaggctagattctggtcttggtttgacaatttgtggtttctggtacaagacattgaggaatgttgatttgtaaaactataaaaatgtgagccagtgcagtggttcatgcttgtaatcgtaacactttgggaggccaaggcaggtggattgcttgagaccaggagttagagaccagcctgggcaacatgtcgaaaccctgtctctacaaaaaatacaaaaattagctgggcacagtggcgtgtgcctatagtcccagctactggggaggctgaggtgggaggactgcttaagcctgggaggtcgaggctgcagtgagccatgttcatgccactgcactccagttcctggcttgggctacaaagtgagaccctgtctccaaaaaacaaaacaaaacaaaatgggacagttgcagagcaaatggcgaaatatatctacaagaacacactcatcaatcaaaagctgagttaatttagttaaatacacattggagaaaagaggaaaatgtattaagggaagtgtcaggtaataaatattgaatcaggtccttgatttgattttgaagcagaaatgagctatgtatgaaggaggtccagtaataaaaacaatgggagatttcttcaataggggtgaataattttgtaggtacttatgcattctcagctataaatacccctgtagaagcagctaacatcattaaatccaaatatgaaaatttatccatgctaagtattcactacaagaaccaattgcacaagttggggacctgattttaataattggactatatttttatattaaaattacttttcatcttgagcactgtaaaataccatacaaacttattacttcattaagtcctgatattacccaatgaagtagattatttgtattcccacatttgctaagaaattaaggtttggaaaagtttcattcattcatttgacaaatatttaatttagtatgcagtagtgaacaaagcaaaccaaacctcctgccttcatggagtttcaactccaggtgaaaccaagtaaacagacacagtaaatagccttcctttcagacgcagcactgtttttgaattcaggcttgccttccttccttctttccttccttccttcccttccttccttccttccttccttccttccttccttccttccttcccttccttccttccttccttctttctttctttttcttttcttctttttttctttgaggctggagtgcagtggcatcatctcagctcactgcaacctctgactcccaggttcaagcaatcctcatgcctcaacctctcaagtagctgggattacaggtgttcaccaccatgcctggctaatttttttatttttaatttttatttatttgtttgtttatttgtttattttttgagacagagtcttgttctgttgcctaggctggagtgcagtggcatgatcttggctcactgtaacctccacctcctgggttcaagcgatcctcgtgcctcagcctcctgagtagctgggactacaggtgtgtgccaccatgcatggctaatttttttgtatttttagtagaggcagggttttgccatgttggccaggctgttctcgaactcttgacctcaagtgattcactcaccttggcctcccaaagtgctgggagtgcaggcttgagccaggctttctattaagcctagctacaaaccttctagtaaatggctgttgctcttcattttactttatttataatatataaaatatataaagtataaaacaatattacatatacgtgtgtgcatatgtgtgtgtacacacatatacacacgcatgtgtgtgtacacatatatacacgcatatgtataaaatgtatacctatataatttttatttatatataaatttatatataatatatatttatatattatatataaatttatatataatatatattatatataatatataaacttttatattatataaatttatataatatataaatatataatatataaatatatatgatatatataaatttatataatatataaatatatatgatatatataaatatatatgatatatataaatttatataatatataaatatatatgatatatataaatttatataatatataaatatatatgatatatataaatatatatgatatatataaatttatataatatataaatatatatgatatatataaatttatataatatataaatatatatgatatatataaatttatataatatataaatatatatgatatataaatttatataatatataaatatatgatatatataaatttatatattatataaatatatatgatatatataaatttatataatatataaatatatatgatatatataaatttatataatatataaatatatatatatcatatgtataaatttatatattatataaatatatatgatatatataaatttatatattatatagaaattttaatatagtatatataaatttttatatattatatataaaatatatataatatataatatataaataataaaaaattgtatatataaatttttatatacataaaacatatatatgtaggtgtgagccactgtgctgggcctggatgctgtttaataatagtagtagttttgaggcgccagcagagtgcagacctgtgacacagtgaaccgaagttctcaggacagctgagtagctgctgggtcattcctcagtcacctgacctcagcagacgaccctctctgcagttggctgtcctgatctgggatagtggggatggcaatatctgctccatgcatggatgagttggtgtgaaaatacggcaggaaataacacaggaaaggtgtaagtgcatctaaaatcatatgtacatatttgtgtaatgcttgatgcattacatgagtgttttcaagtaaaatatagtgttaattttaataatgacccactctgtaatagtgaaatttctaacaatctgaaaatttgcagtggtgttctgggtggttgtgttacctttaacgttgttgatttaaagaggagtgttacttagctgccttagaaacagttacagctgggtggcagagggcaccaggcaagctgacccagacacaataagagctactggagagagctgacttcatctagggaggatgtaagtggacattctttcattcatctaacaaatactaactggttgcctaacatgtctgttttgttcattgctatatcctcagtgctcagaaaacctcattgccctgaaaaggtttatgttgtaataggggaggccgttaatgtatagacgtgtttatcttaggtcatagttgctacaaagaaaagtgagactgtgggatggacaggggatgggagggagggagggagattatattagcataattagtaccagctgcctcagcaatctctgaaatttcagtggcttagtcggacaaaggatttttctctcacaaagtatgattggggtcggtgactcagggacccaggctccctctgtcttccggtatctccaaggaaggagaagaaaggagggatggaaagccccatggttctgaccgaatgaagcgatgatgtggcatggtggatctcccggggaagagggctccagggagagagaaaagcgaaggcaaaaacttcagcaagaaacgtgcttgacttgtcccaaaaatagcaaagcaaccactgtggcttctttcagtggaaaagggggctggaaagatagccaagggccaggctatctaaggcctctcaggccaagggaggaagtaagaaaatgcaattgtttggggtcatttagtgtcccctaaaaactttacagaagcatatgggtggttataatgattgtgtaaactaaactgtgaataatatgctccattttctagagaaatctttacaaaatgtgttactgtatctatttccctgagtgaacagttataggttgttaatactggagcacaattttctacatatctaagaccctctagaggtaggggttttcctgccactagtggccatagggccaaacatcatgacagcctgtcctcatccttctggaagcctgatgcgcggcaagcacagaggcctcccactggactcctacaaagtaagcacctgcagacgcccatgccccagtgctacaaacaaccttggacacccaataattcctcaaccaccatttctacagagtagctcaaccagtctgtaaaaaatcatcaccttaaactcctggaattttcacacctgaaataagcccaaagttactgtacttaactctaatctaaaaagtaactactaaacgaacagaaggggcgaaactaaatttatttatcttacatattctaggttagcttttcagaagtaaaatgagtcatattctagaggtttagttaatgtggacttcatgtttctgaccacatgaaatgttggcattgaaattcaatgatccctgttgcttactgtgagaatagtcaaaacccagaattttcagctaaaaatgtaatttagaatatgcttactgaattgaattaaggttttgcattaggataaacactgtgggagtgattctggtatagtgggtttgtgtttttgtgcaagatgcttacaataccacagcccttagaataattgtacactcttctggcccgtttcccaggtttccttgaaaagggtcagaggacaggctgaaattaatgacacatgaatgcagaacctcaattagaagtgtcttcaaaggaataattaggctagacttaataagaggggattaagagaagaaaaagctttgggcaaattatacactgaaggaaaggaagataggaaacaaggcaacgatagattggagctgattatttcaggaagtgatttttgttctatttatcttaaaaataatataaatatagtgagacatagagacaacagatggatggatggtcactgacctcttactaggagtggcaatgtgaacattgggacgcttcctggtgcatgtaccctgcaattgttagtttagtacccctattccctttgtgaaagaggccagggattttgcttcccccaaataacagtaacagcagcaaaagcagcaacaaacccttcaaatctgcttaccctgccagatattgtttcactttcctcatctgtaaaatagggattactttatgatggaatccccacaacaacccccggaggtaggtacgatataagtgccttgttccaggtcatacagctaggtagtgtcagaacacagattgaaattcagaagcctggctccgaagtttgagctctcattcaccgcactacatatatctatgggaggataggcgacacatgcatgtaataaatgtgtgagcatttattgtactggaaactctccagctcctccctctctacatgatcctttgcttctaattttgtcaatcacagcaccttccctggcccttactttgttcttgccaatctcctctccttgagcagaagagggaagggagcctgctctgtaggtgaacagctcctccgcagaggcatcctgttttcttagtgcaatcactaattcgcattgcaaaatgctttattacatgactgggttaagccattctaggagcattcactgagcgctcagagtgggaacgtttatcaggcatgcaaatgctaacttactttctagagaatgtttaacttaaaagcctaaagaaatctcagataattcacttcggagtagaaacctccttcagccgcgctcactacggcgcccggcttcgcggcaccggccactagagggcagtggccgccgcaaagccgacgcgggcggtgggctcggcggctcggccatcgcttgctctcgcctggcaaggggctctcggccgtggattagcgcagctggagacgtgggaggccgcgggccccgcccccgaccggcggcggctgcggcggcccagcgcggcagtcggcgctgcgaagtggaggcgctgcgagcggagccgcgcggagggcgcgaccggctggtccgggcagcgtgggtttgccgccttcggggctccagtccgcgcgccagggctcgagcagtaccgcgggcccctcaggtgggcctcggctcgggacgccgggagtcgggaccgccagtcggggcgccgggaccatggcgctgcgcgcccgggcgctgtacgacttcaggtcggagaacccaggagagatctcgctgcgagagcacgaggtgctgagcctgtgcagcgagcaggacatcgagggctggctcgagggggtcaacagccgcggcgaccgcggcctcttcccggcctcctatgtgcaggtgatccgcgcccccgagcctggcccggcgggagacggcggcccgggcgccccggcccgctacgccaatgtgccccccgggggcttcgagcccctgcctgtcgcgccccccgcctccttcaagccgccgcctgacgccttccaggcgctgctgcagccacagcaggcgccgcctccgagcaccttccagccgcccggcgcgggcttcccgtacggcgggggcgccctgcagccgtcgcctcagcagctctacggcggctaccaggccagccaaggcagcgatgatgactgggacgacgagtgggacgacagctccacggtggcggacgagccgggcgctctgggcagcggagcatacccggacctcgacggctcgtcttcggcgggtgtgggcgcagccggccgctaccgcctgtccacgcgctccgacctgtccctgggctcccgcggcggctcggtccccccgcagcaccacccgtcggggcccaagagctcggccaccgtgagccgcaacctcaatcgcttctccaccttcgtcaagtccggcggggaggccttcgtgctgggggaggcgtcaggcttcgtgaaggacggggacaagctgtgcgtggtgctggggccctatggccccgagtggcaggagaacccctacccgttccagtgcaccatcgacgaccccaccaagcagaccaagttcaagggcatgaagagctacatctcctacaagctggtgcccacgcacacgcaggtgccggtgcatcggcgctacaagcacttcgactggctgtacgcgcgcctggcggagaagttcccggtcatctccgtgccccacctgcccgagaagcaggccaccggccgcttcgaggaggacttcatctctaagcgcaggaagggcctgatctggtggatgaaccacatggccagccacccagtgctggcgcagtgcgacgtcttccagcacttcctgacgtgccccagcagcaccgacgagaaagcctggaagcagggcaagaggaaggccgagaaggacgagatggtgggcgccaacttcttcctgacccttagcacgccccccgccgctgcccttgacctgcaggaggtggagagcaagatagacggcttcaagtgcttcaccaagaagatggacgacagcgcgctgcagctcaaccacacggccaacgagttcgcgcgcaagcaggtgaccggcttcaaaaaggagtatcagaaggtgggccagtccttccgcggcctcagccaggcctttgagctggaccagcaggccttctcggtgggcctgaaccaggctatcgccttcaccggagatgcctatgacgccattggcgagctcttcgcggagcagcccaggcaggacctggatcccgtcatggacctattagcgctgtatcaggggcatctggctaacttcccggacatcatccacgttcagaaaggtaaagcctggcccttagagcaggtgatatggagtgtattgtgcaggctgaaaggggcgactttgacagcagtaccactgtgggtttcagaatcatattctacaggtgaggaagcgagcagagacgtggacgcctgggtcttttccctagagtgtaagttggattgctcgacaggcagcttcctcctcgagtatcttgcattagggaatgagtactctttctcgaaggttcaaagagtacctttgatgacagtgctatcattttagagtttgaatagttgagtaatgagctgctcaaatctgtaatcttgagacgagggtagaattagaaggggacctaaaccatgttaggtatctgtttgaacactgcactgtcacttagtggtgagtttcaaaaagtgaggaaataatggagaagaacggatgtctgtaaatagaaatctgctttcacccttccacacctctcaatctctgctttggtagaggaattaagatcaattctctgagtttaagaacttcctgcaaagaattcttgcctgcaacctttacgaagtgaagtaatttcaggaaaagcgtactcattttgagtttgaaatctattaatgtactgaaattgagaacgttgtttaggaaaattgtttagggaaactacatagaatgaatataatctgagtattggatctgagagcagcgttgctggtatcccagtgagttagctgtccaactatcagagttcatgagttattaatagttgttagtgtctctgacctttgctaaagcaccagaatttgcaaattaaaaaaatatatagcagtagtgcttgtcttaacatttcttactaatgtgcattctcatataatgccttgattgagagaatggggaggtgtgggagttagggaggcagtcttgcctgtgaaagtccagtgtaggggcggctgggcagggaaacctactcctgagcagggaaacctactgtccctgtttcctcagcgggtctggcctttactggtgaagtgctcactgcctttctggtgggccagtccgtttatgagcaaccctgatctctggcatgtcttttcttgtattgaactgaagtttgcctcccttgattgtctttctgttccctgggaccgccttcagacatttggagacagcagtctcgcttccttcctctctgcttctctccttccccttccaaatgcgtgactggtcttctgactcctatgggggaaggggcttgctgggagaatgatcaaacgttttcagtcttgttgctgccgctgaaagggagtaccctggacatcagtactaattttagtagacagtagtaactttcttggcaatttgcgatttgtaaatgcagtctaatattgaattcgttttttgtgcaatcatattgctgttggcctgtattaaacctgtatttacattacctatgcctttttttaaaacataaattgttatgaatctttgacttttttgactggtgttggtggaactgcctttgtgagcctttaatggagggatttagcatttaaattccattgtgttacatcattctggacctatgctggctgcccttttacacatttctgtgagtttgtgcaaattactggtgaacagttgaaaggatggaaccaagtacagacacttggacatgtgtgctgggccgctggtgtctgtctactttaggttggcatcagttcattcactgtcaatcacaccatgcactcaggctttgtcaaatggcctgcttttgaaattatatattagaaaaggtatggtgtgtgttctaatatctattttgagtttacagcaatggtctacttagtctattaaaccatctggttatggccagggtcacgcctgtaatcccagcattttgggaggtcgaggcaggaggattgccttaaggccaggagttcgagaccagcctgggcaacatagggagactcccttgtctacaaaaaataaagaagttagcgtggcatggtggctcatacctatagtcctagctactagggaggctgaggctggaggattgcttgaggctaggagttaatttgaggttgcagtgaggcataattgaaccattgccctccagcttgggtgacagagcaagaccctgtgtccaaaacaaaaaatatatagcttatttacttctttatttattttgtagagacaggtgtcttgctatgttgcccaggcttgtctctaactcttgggctcaagcaatccttccagctcagcctcccgaagtgctgggattacaagcgtgaaccaccatgcccggcctagtttatcttttttaaattatagaactggatttgtctctagtcacttgggatttgaaaaacttccttcattaaaaccagtatcattttatgtggcttaacagattcaagagcactaaacataatctctaggaactttggaaagaacagcagttgatattcagtatagtttgtttctgctgtaaccttggtgtgtaatgtacagtgaacctgtgtccctggatgacacatctttagaaaatactaccatttaaagtgacagtgtgcgatacataaggctaaaagcatttgcctataaccagtgtttatcaaggatgctagtgtaggccatttttaggagtatagatgagacaaacatcataagccaggataaaagctttctgagcgtattcaggacttgtggttgtaaagagcatctcaattccgtcacctccccaaccccaactgttacacacttgaaatatggctaatgtgactaaggaactgaatattggtcaacagaaatgatagaacttttccatcagtgctgaaagttctattggacagtgctgtgttaaactgctggctgcagtttaactatcaaccccatcgtaagtttctccagcaaattattatattttaatatagtttcctgatagctttatttttacttggtcatctcattgcacctcctccttcccatataggcttaattaataaaaactgggaagggggaagcaagtcctgctagattcttctttgctgaatttcccaagcactcaacctgagtgacatttcagtagcgtgagcatctcttgcagtgtgcctttatgtcccattcagaaaacacattggttacgggatggatgtctgaggccatcctggtgagaacccagctgcaaaatgagggtggaaaactcaaatactcttaaatgttggtgggctgaaattttcctgactatactaaatactgaacccattctttaaactaataatggttttagtgtacatactttctgcagaagtgaagaaagcgatatacttccttcagccaaaagagaattctggaattttgattttttttcatcaacggatggagtctaactatttaggttaatggagttgagcgaagaaagacggtagtttgctgtagtctgcggtacattagatgggaattcagaatctattggaattttatttgtgttttgctttgacctaataggagtcctttaagttctttgttcataggtagctcatcaatccctgactaggcagtgtgcagatgtttgtcactgacatgtaacccctgtggtcttgattttttttttcttaagtgatagcattttatcttctccctccttatcatgcctgtctgcagtatacctttatagtgttgatgttgaggagtttgggtagtactgaggaatatattttattattagtttcttggcatattcagttttgtttccaaagatatgatcaatctctaatatttaataaagctaaatctaggtggcagcaagttgaggtttaaaagatttaggtttacctcttgcgactattgctaaaaggaagactgtaaaagattatgagaaatactggtttcatccttgtttaggaatttggactaaataaaaatggctagagggagttcctttaagtgaaatgtctttcttctagagaaaaggtgtaaaatagtgttaaattgatttgtcgatttgggctgtgtgaagcagggaggcaggactagataagtaaataggcagtcctgttttctgtactcttaaatatacagactctacttcatcgctctctaaatgttccagatggagccttttttcaataaaagccccaggacctcaggaatggtataccagtagtgggcctgtcagtcttgctgggtagaatttcaccattgtgcttccttttaccactagtagagttggcctgatgtccttcagacattaattaaagatagctggagtcccagcagggcacacaaggtaaggctgggccacacggagacccttccctgtctgctccccattctcctgtagctaaaaatagccctgaaagggtggtgccaggaatacagagaaaagctctaagaagttggggctgtttgcaaattcatccttatttttgaaacctctgggctagaaattgaggctgttcattctttttgttttcactccatctttagttgaacccatttctcctctcccctgcatttacccccagctgttctctaaaaagacctcatgtctctaaaaagagaacaggtctggggcttaccctttgccccagtttgtgttttcttagtgaaaataaggtgaccgttggtgctttcgaaatacacgactcagttccttggttaaaatataaatgtgactgcccaaggacagtcttgggcacgaaactgggtgtgggcaccgctcataccacaccgtcaggggtttctcagacttcttttttgagccacatagccttcagagtcatgccgaccacagtgggaccgaagggaggcagaggacctgcactcccaccctcctcccagtaactcagggagcctatgaggtttccttgttcagcaatgttgtcctgtctggccatcttaggacttctaagcataatgccagaacccaaacaagtgagaagttctgtgattcacttacaaacacttcccttgaactatttaatatgttccttctctttgggctgaataaaaaactattattgtattaccccatgtatttttaaatcaaagtttaaatatcaagttagatttaatttgccatatatttttgaagctctgtatcattaactaaaggattataaagtggcagagtaatgctgagctctgtttgacaagattatatccggaaggcagacgtgtatcatgtctcatatttatacaacacagactagaatctggccgctctgccggtgtctgcaggagggctgggtaggcctctggtcttaagtgagttatttgactagctacagagacaggtcagccagcctcggcagttccttgtgccaggattctgagagcctggtggatgggccagtctgccccaggagttgcaccaaggggtgggactgagctgggtctgctgaggaagctgtgccagtgaaggggcagcatgccaagccaagaagccgtgggtgcagagcctcatcgcagtgggagctggcctgtcgggaccagcatgggctctggagggccagtgtgtgggcatggaggagttttggacaagctattttaacctgcgtaacgctcacttatctttggccaagtgggggcacttcctcacgaggtcagcatgagaattaaatgttatagttcatagtagctagtcactaaatgtttatttttgaaaaatagatgggtgaatttaaaaggagatgacaaccaggcatggtggcacatggctttaataccagctacttgagaggctgagggaggagaatcacttgagcccaagagttcaaatccagccagagcaacacagtgagaccttgtctctttaaaaaaaaaaaaaaaattaagggcgctctcctttgaaggacaattccagtaatcttatcatccctcctggcaacctattgccaccagaattgtaggcaaaagtacaaaagctcaaggagtcttcagtctagcaattaaatatctgctttaatcagttcgccctgtattgcacaccggaagtaatggcaactgggataaatgtagatgttgtttggagtcaatcgtttgttgttgttcacattgaagagtgtatgtaaactgtctcctcctggctcccctctaacccaaatcacgtgttctggtgcagatcacttaatgtttctgagcttcagtttcctcatctgtaaaagtgaggttcattatttcctaggtactattttgttagttgacttttttaaaaaaataagagtagtcttaagtatccaggaaacttttagacattgtttcaggctgattttaatagtgttctctgtctacttatgtgactgttttacgggagcatgaaaagcccttatcagttgatgtgaaagaacatttatgcacgtttagttcagatcagcaatcacgcattgcaggcttacctcactaggaacttcgaatgtaaaagtgattaatacctggcctgctgctgcctggtgagggttcccgggtgttctgaagctgtggtatggtagacagctggagcgacttctctctgacccaaattaataggactaccaaagagataaattatgacagttttttaaagatggagtcttgctctgtcacctaggctgcagtgcagtgatgcgatctcggctcactgcaacctctgcctcgcgagttcaaatgattctcctgcctcagccgcccgagtaactgggattacaggcatgtgccaccatgcttggctaacttttttattttttttagtagagacggggtttcactatattggccaggctggtcttgaactcctgacctcaagcaatctacccaccttggccttccaaagtgctgggattacaggtgtgagccaccgtgcccagcctctgatattgatcttatagcttgattaaactttaatttgaatgagttttagttcacttgtcatttctgtaccttttcttatgacttatctgtcactgtgatttgactttcctcttctgctaaataaattgttatttagcaggtaaggggacagtgaaggaaggggagataaaatcattagatttattcataggaccctctaaaagataaactagattttattcaacaaatacgtatgtacccatcatcgtccaggcactattcaagatgctagtgttgcatcagtggccaaaacaaagatccccacccttgtggagcttgcagtctagcagggtggagacactcaatgaaaaacaaacacaggaggtaagttttgatgtatgttggagtttggtatgtgctaggagaaaacagtagagcagggaaagagggcatgggaggcaggatgaagtactagtaagagtgctcaaagtaggtctcattgagaaagtgagatttaagcagagacctgaatcactctggagtcaggagagtcgtccaagcaggtatctcgggggagagcttttcaggcagagggtttagctaaagtaaggccctggggtggacatgtgccaggcaggttgaggaacagcaaggccaggtggttgaagttaagaggatcctaggagatgaggtcatggaaagtcagatttgcaaggctttgcaggtcactgttaggacttggaatgaaagcccgagtcagatggaagcaattacaggattttgagccaaggtatgacatccaactggacatattaacagacttagtccagagcaatgagaatagaatggcgtgtggcagtcaaaggtggatggaagcagggagctagtaggaaatactccagtaatccaggtgagagatgctggtggcctggaccagagtggagacaacagaggtggtggtcggggagccgggggggggggtccccctccagctatattttggaggtagaatcaacaggttttcctgagagatgggattgtgaaggatgtgacatgcaagagaaaggggagtcatcaagggtgactgtaattttggcctgtttggcctggcctacaataagaattgtcagaacaggggtggggagcagcaatcaggaattgagttttctccttttaggtagatcaggctcatgcattctgctccatgtctccccaccccaacacaagcactttctagcttcaggtctagtccccttccttggagtatcccccttggattgtagtccttttgtgaataattgtctgtgcggtgctcagttattagtgtgtgggttatgtttttatgttcctgtgttgtatagctgttaactactgttttatacatgcatagcaagtacttaatgaatgcttgctgaattaatgaagtaggcactcagtagctacttggttgatcttgaaatagatttataagatgtttttgtttttccatttatatgatgatggataacagtctaaagtgtacaggaaataaagatagaatctagatgtattttatggatgaagtcattaacatgtgagtgattcaaaagtcttagagttttgtgtttatgaaatgactttacataattcattggggaggggaggggaagtttgaaaatgcttaaagtgccagagaattaatattgtatacctcatgatttcactttatattgattcttggtgtttaaacttacgcatgcatacacgcacatacacacacacacacacacacacacattttcctcattagtaagttttagttataacatgtttactggggtctcgtttgcttaattcagagcacaagatccagagaatacattcaccttgttgcttgacttggatacacacggagcactgagctcatgtgtagagcagtaggtacttgccctcatggaaggcccactcagttccttgagagaggtagaatgtgtgcacagaggactgaaataaaaggtagatttaacttagtactgcgaataagacagtgcatgggagtccaggtgatagagaggaattgtcagtttgtgttagaggcttgagtgggcagcatttgaattccccctttgaaacatggtcacagtgtgacttttggaggagtgtaggtggaaagcgcactcctgatcttgaaatgctttaggataggtttgataagcatacagtaattgataagcaaggtacccggtgctcaggtcagtgaagggaactgaagtgaggagctgtcactgtaccgtatgacacacagtcgtggacatgcaccatgatgtgaagtaggacagaaggaggagtaattatgggcagtggataggaaggttcagaggtggcttctgccagtctcagtctaagaagagttttgaaaacaagtggaagtttgccaagccggcagagtcggggaagggcattctgggccgaaccatatgggatccgtcttggctgcctctcagaaccagccgctgaggggatacagcagaaaatggggccccaccctggatgtgaatcggaatgtctgtgctgcctagacattggtgttctttgaaaagctcctcacatgcttttgatgtgctgctgggtttacagctgctgttggaggtgatagcggaaacacggaagatcaaatggggtgccgacatggccaggcctgcacttaagatggacaggtcctggtggcaggtgtagaacgtggttgggggttaagtgaaatggagagtaattcagtaattcagacaagacgtgataacatcttattgggggcagtgtccgtggcggtgggaggagaacacagaaggggctgcttgcctgcagagtggggtaagggatagggagaagtacaaaatggcctgcagattagagtctctgggtcaccaatagagatgcctggagatggcctggagcggggtctgcagactacagcccacgggccagattcacccaggcgcctgtttgttacagtgcttgagctaagaatggtttttgtatttttaaatgattctgtgtttaatggttgtataagtccctacataataacctcaattttccctcttgacctgcaaagcctaaaatgcttactgtctggcccttaaagaaaatgtttgctgacccttgacttggatgacaagcaggttaggggagtgggtgtggctactctttattgagtacttactacgtgataggcagtattccaagcattttatatatgtcctttttttttttccactagaaaattcagaagcgatacattgtcttaattctatgcaggagtgggtatgacagcagtgtggttgttggcatgggctaaaaccagatgggtttgagttcctgccagcttcactgtgtaaccttgggccacacacttcttaacctctgtttcctcatgtgtaacatggagtaactatgttattaatacaatagctgataatgctgaaaaatatttttcagcattaattatcagctattgtattagtttcctgtggctgctgtaacaaattcctacaaactgggtgacttacaacaacagaaatgggttctcttagagttctagagacgagaagtctggaaggacagtgtggcagtgccatgctcccttcagaggctctaggagagacccctcccttgcctctccagcttctggtggttgccagcagcccttggttttctttgctctgcagctgtatcacctcagtctgtgcctccctcctcacgtggcattgtccctgtgtgtctgtctctgtgccttctcttaaggacacccgttgtcctagatttagggcacaccctaacctagaatgaccttaccttaactaattacatattcagagaccctgtttccaaaaaaggtcacagtcaaaggttccatgtagattttagggggacactattgaacacagcgcagtttttaactcccccaaagtggtgtcatctcatttggtggctgtgaaaactgaggctcagggaagttaagtgatttccaggctcacagagctaatgaggagagctaggattcgagtgcattatttgccttaagttgagactggtatttcttacgctacaatatataacatgcttgttagaaaattgacttattctacaggcagtcagcagccactaaaggtttcaaaccaaagagtgacgtttaatcataatcaaaatagctatcatgttttgaagacttcctgagtgccaggcatggtgctttgtgttttatattcattatatctatttaagcttcagaggagcttaaaaaagtatttacctcaaaaaagctgaggtaaatactcttcttatacccattttgcagacaggagctgaaccacagaaattttttttttttttttttttttttttgagacagtttcgcccttgttgcccaggctggagtgcagtggcgtgatctcggctcaccataacctccacctcctgggttcaagcgattctcctgcctcggcctcctgagtagctgggattataggtgcctgccaccacacccagctaattttttgtatttttagtagagacgaggtttcatcatgttggccaggcttgtctcaaactcctgacctcaggtgatctacccgtctcggcctcccaaagtgctggaattacaggtgtgagtcaccctgcccatccaaaccacagaaatttaaactgcgagttcctggaagcatccttcactggtgcaccctggctccctgaggcagggcttttggaagttactcctgttggttgggcagagatgaggaggctcttagagtactccaggggaagagttggctttggaaaggaacaggtgaactcgagacacctgccaggtatcatggcaggacctggtgaggcgctggctctcctgaggaatctagtgttaccttagaggttttaagtttgggtggtagaaagtagtgaagccagtgatagaagaggtaggcagactgagaagaggagcaggactaaaaggaaagacaaggaatggggctgaagggagtcttagaaaatcctttttcttttattgtgtttttattgtgtttagttatgttgacatttgcgattttcaccaaagccacgtgttgtctacagcaagacatttttaactaaatgctgatagatgttagtgtggataatctgtaaattttcacgttttatgatttgtatttcacatatattttaaaacttgatacaattttagatgctttgttctgtctttagttggttatttatgatttcatacaaggatgtccggatgtggtcagagtaaagactcacagccaccggacacctgggccctgccagtgcgaggcagcgggaaaaccacaggagtgaggcgtgtccttacatttaaaacagctgagttaggaattatctccacagcctcgtgatcgtgaagggatgtgaagcagcactcaggataacgaagagtgcttgtgctgctcaccagtcggtaccaccgtggcatacatggcaattgggacaatggagtttacaatttcagacaaaaactggaaaattacttgaaaacgagaaatgcattatttgcagatattctgctaactccagcatgaaccacagtgcactcagatagggtcccataagtgccctggctctgcgtgtgtgctctatcttgccttgccttggcttctctcgtaaagagcaggggccactttactctcttcctggccccatctagagggacttctgtttagatttattttagcagcttctatttagatttattttggcttgggtctccctttatctttctagaaaaaaagaaaataaggttttacctttcattaaaggtactttcccaagttcactctttggtacagatatgcttgttgtatgtcacgtgtcgaaagtgttggcagcttgcaaacatatctattgttgctttttttttttctttttttttttttgtagagaccagtatgcgtgcacatgcctcaggtaattaaagaactgggcactgcagacctgaggcccctatttgtgttctctgaatttgaaccattatatgggttttacttttacaaagttagttttttaaaagtttcattgtatggtcagcattatcaaggatagtatgtctaccttattttattaagattctgtgggtatcagatctttaagaaaagaaacaatacatggttttctttcttactctcaaattttaaagtcttcatctatatttgcttggctacaggcaaatcaacattgccaccatacccaaaaacacttctcaaataaagacactgtgttttcagaattctcctgaaactatcaccctagtaattttatcacgtttaatattcattatgggctggaacacaagaacctttatgtatataaaattaccagcaagaaacagttttaccaaataaaccacaagaggtacaatcatgtgatttctctcttcatttttggaatgaggtaaactgtatgactatatatgcatagtaactaaaataatcatcttttaaggtatttatacgcaagtgaatatttgtattcaaactgaatgtcattctgcctttagacattaggtgattgctgaatgaagctataagaactacttaattagaatattataacaatgcttttacctgaaacagactaatgatattttcaggatgaaatcaagcttagaggcctgaattctttaagtgattttttttccatcaagtgaccaggtttttttctttttgcagttgactatgcttgtcttgatcctcttccctccttttcaaaatggttcaaaagttctctttgtcatttattatatttatgaattaaaaagtgaattttaaattacctttgaattttgatagttattagctttagggaccttcattagtccattcagaaaattgctttccctgacttgagttcagtattaattttgtaccctccagggtttattaatgtggtctaaacctggaacccacttagtatgaatccatgcaggaatagtatttagggtctggaggtggtttgtgggttgctcatccctatgttggtggcataggctcctaggaggcgttgggtactggtgtagtgtgctgtgctttgaggccgatctatggggctttgcgatcgccatgggtagggtatccccccttgggccacatacaagggaattgcctgagttgggcagacccaggttcacatgcagctggacactgagtaaaattatttagtttctctgagtttcactttctgcctctgaaaatggtggcaatgattacttttatttcacggttaaagagaagaaaatgagacatgcgaagtgcagagcacaggtgtgcacagtgcaggcgcttctctgtgatgatcaagtggctggacggctgccctagttctctattttaagtggatgctggcctttgctttttgagacattttgctcaaaacaatatgaaaaagtaaatattagagcagagagggggaagggtaatcaacaagtaggtggagaccaacagggaggaaggaaaggggaggggaagaagttaatggggagttagtagggaaggccagggtgtggatcccagcaatgagaggataagaacccaacaggccacgctgaccaaattagcattttctttcagcatgttacgtgtgccagggaatgaagaaaaacaggccgagtccagtcttgagcgacttctaagcagctgtccctgctgcccttcagcctgtctcctgttctttcccgtacaccatggcttctgtttcctggggaagggcccctggaagacagaaatcgagttaatgtttttggcacattcatgatttcaaaattaaataaggtgctttcttttttcttttttttttttttaagggagaaaatgtagcctttggattcctgttgcttagtgactgggccttttgtataattagtcttagaagagacaaaacatactgagaataagagattggattgaggaaaggaaggcaaagttcaggtacaaggactggatggggttggactgggagctcttggagccatggcaagccctgtggggacctgagtttgggggcaggcagaaagagggaaaacggtaaggaggccagacagcttctttaaagggagggcagggccttgcctggttaaaatggctgaggcagtacagtgtatgagggcttttttttctttctttctttttttttccccctgtctcactttgatgggtcagaagtttccaggaaagttctggttaaaatgcctgaggcagtacagcgtatgaggatttgcttttttgttttgttttttttttccctctgtctcactttgatgggtcagaaatttccaggaaagttgttctccctgcaaatgagaagcagaggaacatggaacagagaagtttagtgcagtgcaagtacatctgctagtgtgctggttgagtttcagcttgcagtgtgttcttaatatgtgctcatgggctacatgactcgagagattcactactctcatactgtcattctagaaaaaaattggcattgaaatcctaagtgttagcgtttactgatggaaatagtttaatgatatgctgtgtaaatactgtgatgcttttgaacatggtgctgatttctaattcataatttataaatgatttttaaaaatttgagccttttaaggtaatattaatgaaccttgtcacatgattaaattcttttgttttcattgttttatattcattgcaaacatgagtaacataattcctctaaaattgagaatatatgtattataaacaaagacatagttatttcttgctttggtcttttcagcctgagcatcctttagaactgcgagatggcttacattggttagatacaaagaaaaaaggtaggaggggatagaagtgaatttaggacattcgatttctctggagctaggactggtgatggagaagtggggcaaagtacctttctctgagcttgggaaattgcactgatatgaaaatgagccctgttgggaattttccaggtacagaatcagcgtgggaatctaggaggttttgttaataacaaatcctaaagcaaagtaaaaatattggtttaattttccttttaactctcaaaacatagaaaggaaaggacccttttcaacaatgtagtagggtcaagtctccatctcaggcctcaatacactaatccactcaatctgtgcccacaaagagggtaataggtctcctgaatgaggatgccctgcttggaagggagaatgggacgtgccagggctggcaggcatgtggaggtggggtctttgccatgaattagctgtgggactttgaacaagtagctcaccctcttgtttgtagaatggagagacttgtataaaaactcttctaagacctttttagctttattaaaaacaaaaatttgagagccagctctgcccttcttacctgggaggtagctctgccttgccttccccagagggcatctccaggactggagtgtgggaaggtgcccttgggctcctgcctctcatttaggaattagacctcagggttattagttcctgagtgcactttctgtcctgtggaagaattcgagtaatccaccaaactaattcagtaattaagttgaactctcaaccaaaacttcactctcaacaggtaaacctagagcttactctaggatccttcctgcctccttcacagagatcccctgaagaagaaatagctgcagtgtgttggaggctcagcctaggcggcactctgggctccttttgcctgttcggtatcactgtattgggatgtggttgaaatcgattgcctcactttaaataattatttttcctgtacttcaaattcattttttttttattatactttaagttctagggtacatgtgcacagcgtgcaggtttgttacatatgtatacatgcgccatgttggtgtgctgcacccattaactagtcatttacattacgtatatctcctaatgctatccctcccccctcccccaaccccacgacaggccccggtgtgtgatgttccccttcctgtgtccaagtgttctcattgttcaattccacctatgagtgagaacacgcagtgtttggttttctgtccttgcagtagtttgctcagaatgatggtttccagcttcatccatgtccctacaaaggacgtgaactcatcattttttatggctgcatagtattccatggtgtatgtgtgccacattttcttaatccagtctatcattgatggtcatttgggttggttccaagtctttgctgttgtgaacagtgccgcaataaacatacgtgtgtatgtgtcttcatagtagcatgatttataatcctttggatatatacccagtaatgggatggctgggtcaaatggtatttctagttctagatccttgaggaattgccacactgtcttccacaatagttgaactagtttacagtcctaccaacagtgtaaaagtgttcctatttctccacatcctctccagcacctgttgtttcctgattttctaatgattgccattgtaactggtgtgagatgatatctcattgtggttttgatttgcatttctctgatggccagtgatgatgaacatttcttcatgtgtctgtcagctgcataaatgtcttcttttgagatgtatttttcaggctgggcgctgcagcttatgcttataatcccagcagtttgggaggctgaggcgggcggatcacttgagctcaggagttggagaccggcctggacaacatggtgaaaccttgtctctacagtttaaattaaataaagagagagagagagaagaaaatttcttttcagttgtgtaacttggagaggctgcactacttcatgtatgaatagtgttttcttctgaattggaaacggtactacttaattgttaggttttttaaagagtatattcacactggtctgtattgtcagccgctttttaaatctctatttaatgtgcacctgcactttcttttcataataaaatcgtaatatgctcatgctattccagatgcagctaactaatgaagcagtttcagtttacagtgacattgtcgttggaaaatgtttttccctctgattatacctgtttattattttctttcatcttaaagctgttcccctaactatgagtactgtgggatcttttgtttgttctaacagtgatgtttttgaccttaaacttcattatataattgctcccccattctttcatttccgtcttctgttttgaaagcagagtggtggcaatatgatgtttatgaggggagggggctggcaagggggcatgttcctcctaaattagccacttaaaaagcagagctttcaatgctattgcctgttttcatattgattccatcataaaaaatgtgtagtccttgtgttatttagattctgggcaacatttttagttttcatttacactcctcgggtttggttaaaaaacaatgcagtacagccgtgagaatgctttaaaaatgctgtcatactttgttacagctctgcagctggttgtattgtacctctgcagttgtttcttaggcagctacaaattacttaatttctaaagctatcctagaagtagcaagtctatgatgatctaactctgctccagtagtttccgcttccaacatgctagagctgaaaattttgctctctgcctttcttgtgatatttaaaattttgaatatgaagataattgtgaagcctgaaaatatgtacacataattcccagtttgagcagtgtcagatcaactgtaagaacccaatcatttgtaacaaaacccagattctacttctaataataatactatttcactcacatctagccaacacttgtaatattgtttctattggaaaaatatgtttccactttcttttctagtgaactcagagcttaggagctcagtgggcagaggcgggtagagggaagcttcctgggaaccccagaaagtggttctgcgtgttagtccccaagtgttaaacactcatgctctctgtctgtggatcacttgagctgtttaaaagatgtcatatttttttttctgtttacttctagtcagaactagtcaattgacttccataattagcttaccgttttcatagggaggaaagcactgatacctttactgtttgttaaaaggtgtacagaaaaaactaattggaaagttgtgagatgaattttttaaaaaacaaattactttcttgggaaaagatgtatatattttaaaactttgcaaagtattttataagagtcaactttttttatttggcttcagatgttggaagacccttggcattgtcattctgaacattaacagccattcgcttcaattcaggatataatcaggaactctcgatttttaatttgttttaagtatattactatcaacttgttttattgctaatcatcttttaactttcttttgaaggtggatctgggaaaaaatcaatttagttacatttcagttaaaggaagttatttttgttttttaaacttgttctacatttgtgggtacaattttatggagacataatcttccttgattacacgtagctctccttactctttaaatttgtacatttaaagtatgctatttaataccttcattgaccattttatatagtttttattttttaattttttagacagggtctcactttattacgcaggctggagtgcagtggtgcgatcatagctcattgcagcctggaattcctggactctcccgcctcagcctcctgagtagctgggagtacaggtgtgcgtcaccacacctggctaacagtttctcttctaaatagttgtagtgcttgctttgaagacagttatgcattcagatcccatctcagcctcctcctgggttacctggatgactgtcaggctcaaagatgttgagtaacttcctcaatttccttgtagtaaaactaggagtaatgtctgttgtaaagttgtagtgaagattagaaacagtagatggaaagtgcctagcatatgttattactatttctagcagctaccatttactgttcagatattctattccctgccctccaccctgccaccatccatagtgcagtgctgggcatgtagcaggccctctgagcattttccgttgtcacattggtcacgttatcttggagaaagccatattcaactcccatgcagaattgtgcttcatggacctatttcactttgcgtcagggtagtgtgcctgccctgacggtgctttgtggtgtgtctcctgtttgaatctccctgttctatcagtgtgctctatacatgccagcctttccataaatgttcacattaaaattctcaccctggagcccaaccttttggggacttttaaaaatagcaacattttgtgttattcacttaataaattcatacttgggaaaaaatgagtctttgggtttttttgttttgttttgttttgttgttttcttgttttttgtttgttttgttttgttttgttttcttgagatggagtttcgctcttgttgcccgggctggagtgcaatggtgcgatttcggctcactgcaacctccgcctcccgggttgaagtgattctcctgcctcagcctcccgggtacttgggattacaggcgcccaccaccacacctggctaaaaatgagtcccaaattcttcttggctcctctagtatgtatgcttaggaagcttgaagatattacatgctggcagatcctggggcctcaaagagatgttaatacttattgctgtatctgagactttggaaaatgtatgctgatttaataagttgtaaaaactttagacttgttctttttttttttcttctttgagatagggttttactctgtcacctagcaggctggaggtgcagtgctgtgatcacggctcattgcagcctcaacctcctggactcagatgatcctccctcctcagcctcctgagtagctgagactatagaaatgcactgccatgactggctaattttttgtatttttcatagggatggggtttcaccatgttgcccaggctggtctcaaactcctgacctcaacccatccccctgcctcagcctcccaaattgccgggattttaggcataagccaccgtggcaagccctggacttgttgatttttaaattggttgttacggatgcacatctgtaattctatataacacagtgcagtttgtcaaaatatggtgaactaatttggagtttgacaagctgcaacttagttgacaatcacccaattcaaggccaggtttcagagcttctctatactggactctgttctctatgatgaaaagctgggctctagtaattagagcaagtaatacttgcagaatattaccagtgcaggcaacaactgttaagacaggtcaggatctgagcagggaaggatcctgcgtactggtccttagcatttgaacatgggactgtggcttcctccagtaccttggattgaaatcagatgaaaatatagtcaaatcacttgagatttttctcttttaatttcctattctctttatcattataaaacatgtattttatcgctacacattctcagtctttctgaatttttttttcctttagttttacctgttacactttcctggtcttttcttttttttctctctctctttttttgagacagagttttgctcttgttgcccaggctggagtacggtggcgcaatctcggcgcaatgcaacctctgccttccggcttcaagcgattctcctgccccaacctcccgagtagctgggattacaggtgcccgccaccacgcccggctaatttttgtatttttagtagagacagggtttcaccatattggccaggctggtctcgatctcctgacctcaggtgatccacccacctcagcttcccaaagtcttaggattacaggcgtgagccaccgcgcccggccctcctggtcttttcaacttcaatttctgtatatgaaatgtgaaacctgtacaaatataacaaagataaatgttttgcaataaattattattaattttttatgttggggagatgtctttctcttcaagcaggcaaatgttagtgctttgctgatactgtcagccacagtagaaatgtttaaagggccctattttcagagtgatggcttcttagtagaactgggacaggggtcttcctctgtctagcagagtgcatttctctgccatgggttaggtggaagtggtgtgggtggggcatgtgtgctctgtgcacctgcagtacatgtgttcttgtttcaggactttgctgcttttcacttaaaggtctcatttagaataaatcaatgaaaataaatgtgtacatatgtgcacacctacacgtacatatatatggatgaaatttgctgttggtgctttttcatttctcaggtctttgaactatgccaaaaaagcatactgctttacgtttaagggttttgtttaatattatattattctttaggagatttgaagaaatttagaaatagggcatcttcccttgtatatttcactattgggcaaaacaacatttccgaaacaaagtctctcagtttctgtacctcctcctactcaaggttcctggttccctcctcagtagtactgtgttctcagactgccaagccaggcactctagctgtttgtctctgtgttctgtcttgcctttcagtatggtttagtggaatgagtgctaggcacagtcgggaaatctgaattcttaagctggctttgttcaagtgatttgagctttattactactcattcctaagaactcaggaatagcctatttcctacccctaaacatcctcaaacttttgtgtctttgtatgactgtgctttcgggggagggcctgcgttcgtatggcacctgccggagtggtcaatccttcacccccacccctgcaacaccctctgttgatacttctaggcatgagattatggaaccgctggcatcattcctaagtcatcattagggcagagttaacactcaccgatccttatagtcccaaaaaaggggcaaattcttattaaagcccttgtactccaggtgtgggtctcccgatgcaacgtgaagtcagaatcagacatgtgttcgcaattcaccccttcaccaggcactttctgtgtgctgagcacttcagctaggtgtttactctggatgacaagataatgggctaggccagccctcatgagggtgacctccaattgtagactggcaacattgccaagcaccctccatgactgtgacatgattccaaaacacaacctgtgttggtactaacttgtttcagagactggttctagagtctgaattatttagtgagactttctgaggaagtgggtttggatcctttatgggatgtttttataaacagtataattctcttaatatatgtggaaataatgatgtcacaccttttgagcctgtgaaaactgcagtttcttgttgtgtctttttaaggacatttccttgcagtttattatcagttatgtatagcatctctacttggaagagatgggatactacagattcttggtcaatgtaacaaacactagtttttgaagagaaattttaacaaagggagtgttttcagaaactttaccagattccttctttttttaaaatgagtaattatggtcctcactttaaatttcaaaggtattgaaaatagtttgggcaactatttataatgcccaagattctgtttaatatgtagttatgttcttgggatatgtggatatataggtttttaattaattgttatttttaactacaggagctcttaccaaagtcaaggagagtaggcgacacgtggaggaagggaagatggaggtgcagaaggctgacggcattcaggatcgctgtaacactatttcttttgccactttggctgaaattcaccacttccatcaaattcgagtgagagactttaaatcacagatgcagcatttcttacaacaacaaataatatttttccaaaaagttacccagaagttggaagaagctcttcacaaatatgatagtgtttaatgactggacgttggattatggactttttcagttcaaggataatttctacagcagaataaaaactgctgtcaaagagctattgccagctatcagtggtggtacaaggacggttttgtgttcatctgaaacccagctgaatttataattatgtaggaaataaacagttaatatggttatataatagaaacagtaccacacattgtaactaaattatactatgtatgcctacactaccattgtaacttttggaataatgattatactatttgccttattgctttttgaagtatgggtattttagtgcatactttgtagacctcaaaacccatgaagggtctcaaagaagctggctggatacaagcctgctgtggatgcctttttactctcatagattgggattacctaaattcaacctattctctgtttacaaactccaactagagcagctatgcgaccttgtgcctttagactcttggtttttcatttctccccgtcccttccccacctttttaaagtaagccacagcttttctgattgaaagagtgaaaggccagtgcatataatgacaaactgatgataaccttatattggcagtagggggtggggggggcggtggggtgggacgatcagctgtcatcaatttgcacagcaagtattatctcctgataagatgctggtgaatgcaggggagtgagattcattgctcatctttggatatgaagtctgttagggaagaaacagtgccactattcccttagatgcaacagtagcatagcctcttcacccaggcgtcccaaaagcttggcgtgaagatttcagcaaacatgtcttacaacatgaggaggaggagtctaaatcagtcaggggataaaagtatcgaatcattgacaacacacacttggctttagttcttaggagggttttgtttttgtttttgtttttaggttgaagattttcttttaatattcagttttttgaaaaaaaatggatctacactgttaactgattgagactccactgtgattcacttgtttacttaaaaacttttcagggatgtctgtaaatttcagtgttaatatgtcatgaaaagtggtgtggattgatctaaggagggaccagaaataatttttgctattccaaatactgaaggaaaaagataattgatttatactatgttttaaaaaaaaaaaaggtattgatgagccccccccccccaggacatttaaccttaaaatttattttaaatgtattcttttattattataagggaaatacagatggctgataaataccaaaaagattcaaaagcagcttaatttaaaaagcacaaagagattctggcttacagtgccccaatctcaatgtttttatagttgctgagctaactaatgtgattattgagtttacagatttaaaaattgtcactgttagagtatctactgtttttatgaagtcaaacttatgctgcctcagaaatccctgggtactgaaatggtaacatggaagtgaagaggtcactttgaaatattggtgagtcacaaagattaaagaaaaggatcagtttgcagatactcagaaaaggttattgaaataattactgaacagcacattttctctctaaaaagtagtttcatatgggttgtatttttaagatcagattatcattttgatatttggtcaaaattttgtaccttaggttacttagagccagatttaacatcatgaacattatgtggctttgtctttactacagatatgtggaactgtaaccaaatatgttgtctctaaaacttgttgattgcaaaatacagttctataaacaaaacccatatgtatatataaatgttaattttgcggaagtctggaaattataactatagcatttaagtttgagtctgtattggacaaataagcaccatgcttttcaaatgatttaaaaattacttttatttgcctctttattttgatggtggttggattttttttttttaatagtaaaatcactaaacttgtgcaatggtagcatggaaattatctgaggtatattgtatgattgtactttagccagggtggacatagcttaaattataaaaactaaagatgaaagtacaaggaagtataagttatacttatgtaagtataaattcatgctgcctacttctaagagaaatttcattcttcataaccacataacattataatgccactgattcatacgggatttacattaattctatgggggaggacactagaattattagtgttcattttcatctaagatctttattctctaacgttcttggtcctattgaaacattgcagtatgcaaaactactgcaatgttaaacccaagagaaaagccattatcatgtgtatgctggtcatcatgatcagtgtggtacaatttttaaaaataaactatcatgcccttcatgccattatttgtctttatttctatgatttataatcctgatatgtgatgtgtttgtaacacagggtgtgcacttgagcctggttttactgtttttattagacagagttgtttatatgctgtaactgtaacgcagcgagactggttctacagccatgtgtcgtaatcttgttccccgtccaagctgttgtatctgaaggtacccagtttgcacccaggatgagggaacgcattcaaaagtgaaatgtaaagccagtgcacgaatattatagtaattgagattttcccaggcttcactgatacagttgttttgcatttattcacaataatacagcagattcttaaatgccgatttttaattgtcttaaattttgctgctgttctcataattaaggacttgaaaaatgttttagtctgtcaagtatgtaaagtttgtgtaaaaacttttaaatgtcattcttaagttcattgccatagccattttccatttatgtcttcattttccaaaaatcaaatgccatgtctgatacctttaagtccataagcattcaattttctcatttccaccttcatctttggttaacagaataagtaaaacagggtattatttatttgtagtctagaaatgttgaatattgttttatttccttcaaaatgttatgattagtgcagatcagccatgtttatctttttaaaaaataaacaggttgctttatttcttagcttcaatggaatataattattttttctccactcatcaaggaggcatttatttaatgtgaagaattacacagaaaaatagaagagcatgttctgtcttgagcttcatctgtagttaccatagaaattattcatcaaacactgtagctaatttgattaatttaaaaccatcatcattcagatagtcccatggagtatctgcttccattagtgacatcaggaattaagcacatagcagtaagttgtgagtgagaggttttgaaataatagctcccatgagtccaatacctgagacagaagcaggtgcttaagtaaagtacttgacatactgtctgttggttgccataaataggcgaactccaacacacataagccaaaatataatggctacgggacctggcatatcttgcaaggggccaaagtcccatttggcaaagcttgccctctttgtggggctttgtagtcttgtatctgcttatctttacagatttgttttacatatatgttttttctcctggccttcctttcttagcatcttgtaatgtctagaatggcctagccatcttttacttcacaaatatacttggaccagtgatggacatctggacaaatcacctacggtttggggaggctgtgagaaggagagctacacttaaaagtatgcaagagaagaaaggacctttatctggttatcctcacaatgaacctatgaggaagataatatctctagtttatagatgagttaaagagatcagtgaagtctaatttcttttgaccaagatcacacaaactaaatgatggagctgagattcaaattgggatctggctcaagcctattatttttaaactagattacactgaatgtgatttctctgcttttcagaaatccctaacatcttcccaagtctccactcctggaatgatagagattccatcattctttgggcactgggcacaaaagtacaaagggaacttcccagaatctgctgtttgcacccatttctgctgggaaaggtgagagtctgtgctgctatgtctggtctctcaacagaaggtctgactgcagtcttacgtagactgggaagcatgccagatgttaccttccagtattgttatgaagagtgagagaaagggtccaaaactgactgtttccccttctctccaactttcacctccatgcagtgccaatagaagcacattccagttgccataacaatggccttggcagaaccacaagtcaaaaatttgaactccagttggtcagagtcagggttactcatgagtaccacttggccacaggtgggactcaggtgagagcaacagaatttgctgagtaataagctctggagagtttgaagagtggtggggtagacttctaggcagcgtatagagggatgctgctgtgctagggctccatgggcaggaaaccagaaaaacccagcagtggaagccaggcctctgaggtgggggaagttaatctgggattggctcatggctatagcctttccagggatcacaagtcctccctacttggccctgatcccaggatgtctcaatcctaacatccctgtgtcagagcttctcaaactgcctgcctgtcttaaaggccatttcagcttcattgagtgacttgtaccagaagcatgccaaaggcaagaccaattgtccatgtgaagccacctgccaagggagcttaaaaacaaggtgtgtggtattttgttgctgtgtgtcccatcagcctaccctggaattgatctctaagtctgaagtggccagatgcatcagaccttatttttgcagtggtttaaattttctctcactccaggaaatggctctcaggatggaattgctgagttgttgagcttctctgcaagctgacccagcatatcagtgagaaaggcagcaatttggagccagagacctgggtcagatcctagttgctccactctctgacctcaggcaactcactaacccagctctgaccctcagtttcctcaattgtatgattgactgacttagattgtattgaattattgagagtattagataaaccaccatgtgaagccttaaccattttgcaatactccctccatgacagacatgggagatgataacaattttagaagtagatacttaataaatgttctattcctgaacatcatgtgaccatgggctagtcacttaacgtgagtcagttttcttatctataatggggtatgcagtcatccctcagtatctgcagggcattggttccaggacaccctcaatcccaccccactccctgcagataacaaaatctgtagatgctcaagtcatagaatggcataatattttcatataacctatgcacgttctcctgtatacttcagatcatctctttattccttgccatgcctaatacaatgtcagggctatgtcaatagttgttacactgttatatttttatttgtatttttttgtattgttatttcttattgtttgaggtggaatattttcaatcgtccattggttggatccacagatgtggaacccacagatactgagggccaactatagaatcccctttgtggacatattgtgagaaatgaatggcaggtggaaagccctgagcccaaggcattgacaggagggatagagtaaagaccctctgtggttatgtgagaaaggaagagctgcagtatttaaataataagaacattgtgtcacctgtactatggaaaattaaggagttcacccttgggtcccaggtaggcagaggttcctgctttagccctggtaacttcaccttctgcccactttgcccacctgggtcacaggaccaaaccccattccagcttcttgtcttgcagagccctggcacagcatccttcttactctgcctggaaacctacttctccactgcttctcagacccaccagcacctcctgttagggtggggagaggctcagctctccagagatggccctttgcagcaaggcaaaggagcccttggtctccaaaagctaagtgctaatatgtttaagaatttgtcccgtagctctaactaggaagatctgaaaaagacagctcagaacttgtctttattcaccaaattaatagtggttttattgaattcttttcacatcctgaaaatatgtacttgggacctaggacagagagaggcagcctactctgtgttcacgtcccaaccctggcctcgtgttacatacagacattgtaagatgatggtcaatgtgtcactctgggaagttgaatttagtgcctctgagtggcttttggggcagccatgccctgaatcaaaatattagtgtagaccaagtttgattaggcaacttgtttgttccacttttgttcaacccagcagttttaaaagaatgcagagtcttagttcaaaatggttccctttgcttgaaaaatcttaaaaacattggagtgcagttcaggatttaccaaattaaggttcagcttaaagctgatggtgcttctgttggtgtttgttcagaatctgtatttttagtcactttttaaaaaattacttggctcctgtttgtggacccttgtaagccaactgagttacccagatgctaactacatattcacatatggctataacctcctgagagtgtcaggtccataagtctgtgttctctgtatgaaacaaaggacctatggggaaagtggaacctgtaattccagagaaaaggagctttcttcacaaatgttgctttttagtggctcctatcccagaatcaatggaaagaaaattggaccttttaggtattcatgctgacaggtggtctcataacaaatttctcagctatccaaaggatgaaaaactgtaggtatctatcatttttaaaaaaaacaagatgaggaagctcttcatataccaatacagaattttcctaagaaaattaaatgaaaaaaagaggcagagaaatatttgtacgctaccctttgagcaaaacaaagcgaatgtgtttgcttatatatgcggtagatgattattattatttttagatggagtcttggtctgtcgcccaggctggagtgcagtggtgcgatcttagcttactgcaatctccgcctcccgggttcaagtgattctcatgccttcagcctcccgagtacctgggattacgggtgcccgccaccatgcctggctaatttttgtatttttagtagagacggggtttcaccatgttggccaggctggtctcgaactcctgacctcaggtgatccacctgcgtcggcctcccaaagtgctgggattacaggtgtgagtcactgcgcctggcctatgtgtagattatttatgaaagtaaatgcagcaacttggtagcaaggcaacattgtttgctttcaggaatgggaatggggggcaggagagaaacttactgtattccctattatctcttttgaatataaacgattgaatgtatttcctattttaaaaataacgaaatgaatgttaaatttgacaaggggactagcaaaaaaaaaaaagaaaaaaaaagatgtcaaaaggtgggtggagctgcagctctgtgccaaccccttcgagacctggaagtgaattgtacaaggcacaggaagaactatcttgtttggacagtggactcaatgatcaagtcaatgttcattgtgttactttgcaaaaattcaacagcattgggaagcggactgctaagagaatgtgtaatgtaggcagtaaagacaaatgtcactggaccatagtctgttgttttatatggtaccgggtattcttttgtcttctgaaccaaaaatccttctcctcctcccttccctgtgaagccttccatgaaactctaatcccagtgtcttgtcccttctctgcactccgatcacttttgtgatggcattttgcaactaattacgtaagatcctgggctaacatcatttctttttcttaccacatcgagtgtttattttgctctaggaatgatactgccgttacgttcattctttgatctacggaactctcctacaaaaccattttacaaagaaggaaacaggcttatagatattccataatggtcacataaagcggcagagctgggaattgaatgcagtcacctgactccacagcttgcgatcttaattcttttccaatttacttgagactaccaggcaaacatacaagccctgattaagtggtgatgtggtggtctcctggaggacaaggcctatcctatcctacactttctctggggtccctggagcacaccgggcccagagcagtaaatacagcagaactgtggttttagaaacagagacctttgtgatcctctgtgtgtgcacaatcctaaattgccctctatgaaagaaagaaaatagtgatatgctagccctcagtgttggcatcaccagcaccagcagtcagccttcttaggaaggcagcttttcacaaagacctctgtgctagtttcaggagaatggaggagttggctccaggaggagagagcagccacagtgctggctttgttccgctgtgggtgccgcgtctgtccaccagcctgcggaattcaaatctgtgcctccgcgacgtgacccattaccacgcatcacacccttctgagacattcgtgagcggctggctggtgttttgactgtcacatctgcgtctgccaagttgctgccatttgttctccttaaacacatctagcagagttcaaaagaggctcaggctgattcctcatgaagaaagctggcctcagagggggtggcccaaggggtctaaagaggctaagaccaaggaattcaccaccatcagagcctttggattctgaagcccttaataagatgaaaaagtaataaatcatcttgctggctcttttactctttcaatacaaaaactttcaatgagaccagacttcggaccagcatattctgtcctgtggacagaccctgtgggaaaccaaatcatcgtcatctaaaggttgctgtgagaaaggtagtcaccccagtgccagcacacattggagtcattttgcttgaaaagcttgatgatgccatcggcacggtggagacatcctggacgctgggaccgatagagtccttcattctgcagatatttattgaatgcttgttgtgcttcgggcactgttgtaggcactaggaatatagcagtgaacaaagccaacaaaaatttactttctagctagtaggtgaggcaataataatgaaatagattagtgaactagatgatatgtagaaggtggtaagtgctatggggaaaaaactaagggaggaggagggagggagtatgaggagtgaggagaatttgttattttaattgaggtggtcagaaaaggcctccgaacctgaagacttgaaggactgagagtgaagtatgtggaagaccttgggaggaacattccagagcttccacagttggtgcaaaggccccgaggcaggagcacagccggggacagtatggctggagtgggagaagggtgggaggggatgggggtgcagactggtgaggaggagatgcacccagaggtgagtggggaaggtccagatcttagagggtcctacgggctgctctgaggactttggctttttctctgaatgagatgtggggctcccaggggcgttgagcaggaaagaacatgatctgcctcgtgtgacaagggcactttgggcaaaggcagaagcagagaccacattggaggcttcgtgataaacgagacatggtggcccacaccaagacactggcagtggaggctggggacctggtggccaccatgtccccagtatagagcttggcaagcacagcaacaggtcggggagctgatggccaccatgtccccagtcttggcaagcacagcaacaggtccctcctctgtattctgtgcgtccacagcagacagccacctgcttttgatcaataatttccagtttaattaacaatcatcttggtgtgatgcaagggacattctccttagagtgactcttattatctattaagtactattttatgagttagctctcagataataattttatttatagattcttggggccacctcactgctgtcccgagatgtaacagattgactgaggtcagacgcagaaaactgccttctaagtttctgggtgcacacatctgtatgtcagcagtagattagcagccatcctggttatggcctgagaaccttgtctctctcagtgcaattacatctgcctggttcccataggggctgcctctgattagctctagcatctccaacgtgggggttgaggcccagtggttgcctctccatgcactctggggaccttataactgcccagtcagggtgctgctacatgacatttgcaaactgaatcagcaaactttagcacactgttcacaattcttttggattccttcccatgccctaatgtgcaaacactggattcgctgttctgcatggctgggcctccgtggagctcccatgctctgcctgctcaccagggctctgctgctcttttaccaccagattgcccttggcaaggcttgtattgaacctttcttctgcttccatttgttcatctattgctaccattgtttgtcttctaaacaaatatctgcaaatgagctgataaaactttaaagaattctttcctccatctctcctacttttggtaatggtatttttggaccctggctttaccttagcatcacctggggagctttaaaaatattacagtgcctggaccccactttagacccattgaatcagaacgtgaaggggggctttggcttcactatgttttaaaagctccccagatgattctgatgtacaatttcactttcttgctacaagtagacataaacagggcctagctccgcaggctgttcaggcttctcgttcaccaactcaaaggttcatctctaaatgaggccttagagagtcacagagagtcagtgaaggggctgaaacatgaaaacgttcattatatgaattaaattctctgttcggttaccagaacacatggcctgtaatgaactatgaattaatgtagttttagtccataatccattttgaatagcacaatatttcattgtattttgtgtgtatgtgttaaaagcaatgatgtgttaattttaagtgattataataaaatgttttccattctttaatgcatcatgcctttaaaaaaccagaagtcatcccaggctgcatgggaagggcaagactttctgaggagcagccatggcctggggaaaataatatcgagcagggatttccagattatatcggggtcttcctttttctagtcctgagactctgggcagattccttaagccctcctccaaaaggaagattttatgattcatttatcgtcaaggtaggaaaactgaggttcagagaacttcagaaagataattgtgtcaaagtcctttgcacagtttgctggctttctcatgccaccccagccatacagccatacacccacactggaaatcacgccagccagccctttgtaaactgtttcctccgctggttcagccttccaagtcttctttgtctggctgaatcctactcctcctttgggacggggttcaggcattacctgctactggcagctgtccctgtcccatcttcccaccctgtcttggttaggtgtcctctgttgtacccggggtacccgatgctttctgctaccttgacatttgttgcacttggtataattctcctgccttccttattcctccttctctagtcagttggcttcttttctctccattttccagtgttcagcatagtacccggcatacctttcttttttttttttttgagatggggatctcattatgttgcccaggctggtctcaaactcctgtcctcaggtgatcctcaaccctcagccttccaaattgctgggattatagatgcacatcatggcacctggctaatgcctggcatatctatagatttactgtaagaatgaaattgaggccaggtgtggtggttcatgcctgtaatcccagcgctttgggaagccaaggtgggcatatcacttgaggccaggaattcaaggccaacacagtgaaaccctgtttctaccaaacaatacaaaaattagccgggcattgtggcacatgcccgtagtcccagctactgaggaggctgaggcaggagaatcagttgaacccagaaggcggaggttgcagtgagccaagagtgtaccactgcactccaacctgggcgacagagtgagaccttgtctcaaaaaaaaaaaaaagaaaaaagaataaagaaaaaaagattgggtaaaagtattaaaaagtattttaaaagtattaaagcctcagtgttgtgttacatttgctatacatttataagcagggtgatttattaactgaggtttccttgctataatttccctcctttctagtctaaactgcttggtcagccctcaccaaaagcagaaagagagggtaccaccagcagctctttggtgaaagcctaaaatcttcaacatccatagtactaacacaatattttatcagcctcttattagtgggtgtttaggttgcttctaattttttattatgaatgatgctgcaatgaacatccttagtcattatgttagttccctattgtttttataacaattcaccacaaactcagtggcttaaaacaacacagatttattaccttgcagttctggaggtcagaaatccaaaagagacttctgagctaaaaatcaaggcatcggccgggctgcattcctctgtggagactctgcgggagaatccatttccctgccctttctagccaccttcattccttggctcatggctcccctccatctttaaagtcagcaaagtctcatggaatctttcccacattgaatcactctgacacaaaacattcttgtccacatttaaagcactcttgggattacattgggtccacctggtataatgtaggagactcttatattaaggtcagctgattagcaatcttaattccatatggcaacattaattttctcttgccatgaacatagcctattcacagattcttgggttctgggcattagaatatggacatctttgggtggggctggggagggggttggtatgcagcttactgcagtcccatctttgaacacttgcatgcttatctgtgtaggatgactagaaatgaacttgcaggattggggggtatgcacaaaaaacttcaactgcccttgtaaagtctagatttccaccagcacagtgtggcaggccttattttcatcactgtgacccatcttgaatattttaatgttttaaatctggcatgtccatttacattaagaagctgataggacactgaattgtccatgatccaaaagccaattgtgtttgcctttcaaaggacacaagcagcatttttcatctgctttatctttcaaactgtgttttgcttaggttaatatttaaataatttggcgtttctttgaggaccatcagttgatcagcaaagatacagcacagaatcaatggcaaggaaaatgccttatgatgaacattttcttgctagcaattcataaaatagtattctaatacaccgattaacttaataattagttcattagtatttatcatacacccaatgcatgtcaggcaccacctgacctccagaaatttacaaagcagtaaaaggaataagacacaagtgcagaatgcatggcaggggatttgagagttgactgtatttgcataaaatccatccattgcaacttatgtgattgtaacttgttacaatgaatcacctttattttggaaaacttcatgtttttagctaaatagttggataatcatacaatatggcaacatagcatgcggttgccaaaacttttgtttgggtgcaacaatttctcaagcctgaaagaggaatctaaaagatcgatgatctgaaataagccaaccacaaaaagacaaatgttgtttgattccacttatatgaggtgcctacagtagtcaaattcatagagacagaaaatataatggtggttgccccaggctggagggaagggagaatgggagttgttaaaatgttacagattttcagagtttcagttttgtaagatgacaaaaattcaattgtacaacatgaatgtacttaatattgctgacttgtgcacttagaaatgattgagatgataaattttatgttgtgtataatttataaaaaatttgaaaaaatagttatcttctaagcagtcatgggagaaagttactgcaaacatttattgagtgccaactgtgttggacgctcccatgtattgtcttttttttaaatgtatttttatttgttttttaaaatagagacagaacctcaccatgttgcccgggctggtctcaaactccctgggctcaggcaatcctcctgccttggcctcccaaagtgctgggattataggtgtgagccacagtgctgtgccctgggtattgtttagtcctcccaacaactctatgaggcagatataattgacctattttgcaggtaaaaaagactctgtaacttgcccagagtcacacaaactgggatttgagcccaacttgtctttctcctgtgtcctggtacataagtaagatccatgggattttcactgtaaacatcaccctaaatattttttaaagtagaaatacccatattagaaatgactcaagggcacaattacttagctagaatataaaattcctggaaacatttactggcttctccagataaagtttatcttactaaataattaggacttttattttttcctccttccctccctctctccattccatcattcttttctcattctttctttcaagattagagtaatatctaaatcacagtcacgtagagcagtacaacccatgttgaggtaacttattaaattagcccctgaccatacattactattcagagggctgggaaagatctgtaagggattggacaaaggaaatgctccacctgttcctcctctgacttgggcccttgatgatatcatataaaaagtcatttcctgcttggtccttatctctaatgctgactaaattaatagtcttacttcctttacttgtgtgtatggaatttgggaataaaagtaaaatcacttcctactgggttttatacttaggctccttaaagttcatgtacttgggcaatttttccttatttggggactacaggttgttcgatgtaaaaaaggaacaaattataacacatgccatgccgaaattcagtgagagtcatggtttacctggtacccatgttctaatgaatgtatttccaacctgtaaacttgctgaagatttggaataagtaaaaccaaaatcatactagtatggaggttttaaaactaacttaaaagagtgactgtatattcacaattgctaccaaaaaaaaaaatacctaggaatacagctaactagggaggtgaaagagctctacaaggagaactgttaaacactgaaaagaaatcagagatgatgcaaacaaatggaaaaacattccatgctcatggataggaggaatcaacatcattaaaatggccatagtgcccaaagcaatttgtagattcaatgctattcctattaaactatcaatgacattcttcacagaactagataaaactattttaaaattcatatggaaccaaaaacaagcccaaagagccaaggcaattctaaccaaaaagaagaaagctggaggcatcatgctacccaacttcaaattacactacagggctacagtaaggaaaacagcatagtactgctacaaaaacaaatatatagaccaatggaatagaatagagaacccagacataaggctgtacacctacaaccatctgattagcaacaaagctgacaaaaacaagcaatggggaaaagactccctattcaataaatggtgctgggataactggctagccacatgcagattgaaactggacgccttccttacatcatataatcaactcaagatggactaaagacttaaatgtaaaacccaaaactctaaaaaccctggaagacaacctaggcaataccattctggacacaggaatgaggaaagatttcatgacagacaccaaaagcaattgcaagagaagcaaaaattgacaaatggggtctaattaaactaaagagcttctgtacagcaaaagaatcaacagagtgaacagacagcctacagaaagggagaaaatatttgcaaactatataactgacaaaggtctaatatccagcatctataaggaacttaaacaaatttacaagaaaaaaaataaccccatgaaaaagtgggcaaaggacatgaacaagacacttcaaaagaagacatacatgcagccaacaagcatatgaaaaaaagctcatcatcactgatcactagagaaatgcaaatcaaaaccacaatgagaactaatttacactctcagtgggaatgtaaattagttcagccattgtgaaagacagtgtggcgattcctcaaagacctaaaaacagaaataccatttgacccagcaatcccattatggggtacatacccaaaggaatgtaagtcattctatcataaagatacatgcacgcatatgttcactgcagcactattcacaataacaaagacatggaatcaacttcaatgcccatcagtggtggactggataaagaaaatgttgtacatacacaccgtagaatactatgcagccataaaaaatgacatcatgtcctttgcaggaacatggatggagctggaggccattatccttagcaaacgaatataggaacagaaaaccaaagaccacatgttctcacttgtaagtgggagctaaatgatgagaacatacagacacatagaggagaacaacacacactggggcctattgaagggtggagggtgggaggagggagaggatcaggaaaaataactaatgggtactaggcttaatacctgagtgatgaaatagtctgtacaacaaacccccatgacacaagtttacctatatgtaaatacctgcacatgtacccctgaacttaaaatgaaagctaaattaaagataaaaataaaagaaaagagtggctatcattataaactaaatcactttgtgtggcactttgaaagatgtcccatgcagtgtgggaccctgaaaagagcactggacttatattcctattttggcagcagaatccagcacggccaaggggaggccatggcaccaggtgacaatcatgtctgcgaaagtgcttggaaccatcaagcagatccttcaggcttccagccctacaaggagagagagtggcacccaaatccatgttcctcttgagggaaccaggctggtaattgagtagccaccaccaaaggggtgacatctaagatgttacatttgatcagttataaatgtctatatttacatagctctatggtcaaatcaatagtcaaacgtctattctgtgtccatttgtttatttgtttgagatggagttttgttctgattgcccaggctggagggcaatgtcatgatctcggctcaccgccacctctgcctcctgggtttaagcgattctcctgcctcagcctcccaagtagctgggattacaggcctgcaccaccacgcctggctaattttgtatttttagtaagacggggtttctccatgttggtcaggctggtctcgaactcctgacctcaggtgatccacccgcctcagcctcccaaagtgctgggattacaggcatgaggcactgcacccggcctccttttatttttttaaatttttatttcgacagggtctcacactgtcacctagtctggggtgcagtggcttactgcagcctcaacctcctgagctcaagaggtcctttcacctcagcctcccaagtaactgggattagaggcacacaccggcacgcccagctaattttttttttttttttgtagagacagggtttctccatgttagccaggctggtctaaaactcctggcctcaagtgatcctctctccttggcctcccaaagtgctgggattacaggcatgaacaaccacacctggcttgcccccttttattatcataaatgctcctcttcatctcccaaaacatttggggtgccattttattcattcatttctagatgctgacatatacattatgtgtacaacagactaacagtgatgtttgttatgtagaaataatggccttgagaatgaacatatgcagggccttttgactctacttttaaatagagcttgtatgtctttattattcctcttatcaacaggaagcagatatacaatggcagaacctgatgcaaggcaacagtattaaagtttgatattttttcatcagactatgattattttactttctgaggaagattaacatccagcttggatttttctataatgaggtttttttctgatgataaaattaatatatgataagtaatacttgatatgtgtagtgaagtattctaataacattcactaccacttattgagacattttacttaatgggattccctgctaagtgcacagccttcgttagctctttcaaacctcagacagctctttgcgggcgggcacaaaatcactccctgttactgatgaaggtgtttggacaccaagaggaggtgacttgccagagggccatggtagggggaggttgtgctggatttaagtcttcagaaccttttcttaatgacgatggattctgggtttcttctaaaaatgttaaaaatatgaaggcagaaaaatgtggtggttagatttaaatattccttataccatataagtatgagaaaggaatggtaagaaaagggaccatctcatctccgtcacctttttaatgcacagttatgcaccaaataacaatgttttggccaacagcaggccccatgtaggttggtggtccataagactgtaatggagcccacaaattcctatagcttagtgacatcatagccatggtaatgcagcacaacgcgtttctcctgtgtttacggtgatgctggtgtaaacaaacctcctgcactgcctgtcgtgtgaagggataacacaactacgtacagtacctagtacttgatcatcttaataaatgactatgtttaccggtttatgtatttactgtactatacgttttatggttattttagagtatacgccttctacttatgaaaagaaagttaactgtaaaacagcttcatgcaggtccttcaggaggtatccagaagaaggcattgttatcacaggagatgacagctccatgcgtgtcgttgtccctgaggaccttccagtggggcaagatgtggaggtggaagacagggatattgatgatcctgaccctgtgtaggccaggctaatgtgtgtttgtgtcttagtttttaataaaacagtttaaaaagtaaatacataaaaattttaaacatagaaaaaagcatatagaataagaatattaaaaaagaaaataattttggacagttacacaatctgtgttttaagcttagtcttattacaagattcaaaaagctaaaaaaagtttaaataaagtaaaaaagttacagtaagctaaggttagtttattactgaggaaagaaaaaaatgttaaaataagtttagtgtagtctaagagtccagtgtttataaagtctaccatggtgtacagtaatgtcctaggtctttacattcactcactattcactcactgactcacccagaccagcttccagtcctacaagctctgttcatggtaagtgccctatatgggtgtaccattttttatcttttatactgtctttttacactaccttttctatgtttagatatacaaataccattgtgttacagttgcctacagtattcagtacagtaacatgctgcacaggtttgtagcctaggagcaataggctgcaccatatagcctaggtgtgcagtagactattctgtcatagtttgtgtaagtgcacgctgtgatggtcacacaatgatgaaatcacataatgatgcatttctcagaatgtgttcctgttgtgaaatgacacatgactgtatgttttcagtctagtggccccacctgatgctccacctttctgatccaggtacaggtagttgtgactctggcagtctgatctgacctctaaagaggcccctggagaacccacttctacagttttctccatgattttgtatggatctgattctttacatttccccttctatttgaaatagcttgagtggagctcttttctgcagctgaaccctaatataacatatatattatttatatataggaatatgttgtgtataattatgtaatatatgtatataatttttataattgaagtcagataaaggtttatacatttctttttcaacttaacatttccttgtaaacattttgcaaattttaaaatcaaggctgagcacggtggctcatgcctgtaatcccagcactctgggaagctgaggcaggaggatcacctgacgtcaggagttcaagacagcgtggccatctctactaaaaattcaaaaaaattagccaggcgtgatggcgggcgcctgtagtcccagctacttgggagactgaggcaggagaatagcttgaacctgtgaggcggaggttgcagtgagccgagaccgcaccgttgcactccagcctgggcaaaaagaatgaaactccatctcaaaataaataaataaataaataaataacaaaataaaataataaagggtttattgattccataatatttctccaaataaatacagcctaatttattttctatttccttataattgaacacttagattctttccatatttttacttgcataaatgactacttctttgactaagtttatcagttttcaattactgctgtaacagattagtatacacttggtggcttaaaacagcataaatgtattattttgtagttttggagtccagaggtccaaaataggtctcactgggctaaaatcaagatgttgttaggctgggcgcagtggctcacgcctgtaatcccagcactttgggaggctgagatgggtggatcacctgaggtcaggagttcaaggccaccctggccaacatgctgaaaccccatctctactaaaaatacaaaaagttagctgggtgcggtggtacgtgcctgtagtcccagctacttgggaggctgaggcaggagaattgcttgaacctgggaggcagaggttgcagtgagccaagtttgcgccactgctctccagcctaggcaacagagagactccgtctcaaaaaacaaacaaacaaaaacaaacaaacaaacaaacaaaaaaagatgttgttggtccgaattcatgtgggagggtctagggtaaaattcgttttcttcccttttccatcttcttgaggctgctcatgtcccttggctcatggctgccttccatcttcacagccagtgatggctgagtccttctcacatggcattactctgacactgattcctatgccattttttcacctgtaaggacccaatttgggtctacctggataatccaggataatctcatttcaaaggcaccagatcagcaacttctatttcatgcaacataatttcccctagccatataacataaaatgttcacaggttcctggaattaggacgtgggagcccatttgggggaccattattctgcctcccactcacagtaattctgcttctaggagtccatcccgtagaaagaatcaagcctataatcccagcactttgggaggccaaggcaggagaattgcttgaggccaggagtttgagaccagcctggtcaacatagtgagatcctgtctctacgaaagaaaaaaaaaatactgggtgcagtggcatgcacctatagtcccagttactggggaggttgaggtgggaggaccacttaaacccaggtcattgaggctgccgtgagccatgattgtaccactgcactccagcctgggtgacagagtgagaccttgtcttaaaaaaaaaagtacagtaaatattttctttataaatacaggtattcatgatattgttctgcaatctactttttaaaaagaatatcattttgtgtaaataaaactttatgtacctgtttaaaaggggcctagaaggtcatatttctaactgttatcagtagggacttgaatttgtcagcagtggaatgagaaggttggaaagctggggatggatagggcgaggggtaaatttgtactttcaactttatacaattcaactttgtttgacattttgctcatcaaatgagctgcgtgtttattacaaaaattaaccaatgaacatgttcccatttagagaaaagaacccactgactttttctgggccatatgtggagatgcagaagggtgcctgttgcctgagaaaagcctggcagactgtcttttgagggtgctcatcatagtccttctcaacccgcatcaatcagctgtgtccacgtccttcagccttgtgagtcagaaacctggatatggtcttattaaccaaactcaggtggtccaatggctacaatcagaacaaataaataatagccacagagactgaaatggtttgctctgccctagaattctctttcaccaggctaatcttcagaaagatgaggttaagagcacagactttgatgtccaatataaacagcctgagttcaaatcctgaccgtcagttactatggtatagaatggacaagttgttgaacctctctgaatctcagttttctcaacaagaaaggtaggatattaaaatatctcctaagatgttgtgtggagtaaatgagatgatgaacttaaagcatttaatgattaaatgccagccagtacagggcatctcgccactgcttctacttcagcctgtgtggacaaagtatatgcagctggctggatgcaatagacattggagcccttgtcacagaagcttagatttttcccctaacaaagagacctcatgatatagtgacttatggaagtttatttcttcttcatgtagcttcagggactcctctgctccacacagtcacttgggaatccaaggttccttccacctgtcccatgttcatgtatatgtgcattgttttaagggttaggccagaagtgggaaattgcctctcaccttccattggcaacctaggcatatggccacacctaactgtagggatgcctgaaaacagaggcattaccccaggtcccccagctagggactcattactgtggaggaaggaaagaactggtgttggtggacagctatgcttctccagcacaattggtctcaccaacaggactggaaatagtctaagttcattacgactccccatcccgacttcagagaaagtctcaccattgggccttatggccagaaatcactgaagttcattggctgggcctcacctttcctgtcagcccttaagtggatttggccaaattttgcttctctagtactcttcttttctaggatttgagaatgtacccttccccacccccactctccttgggctcatcaaatttgtgttattacaatcaaattttgctagcttgggagcaaaggtgactttgtcattaaggttaaatatagccatttagagcagagacatggatgtgtgtatgtgtgtgtgtatgtgtgtgtgtgtgtgcgtgtgtgtgtggagatgggaggatgatgtccccagtatgtcatggtcctcaggaattgtgtgtgaggacaaaggtaaatgagtgacagtgagctttttctggcccaggaaaggttggtgagaggtggagcgtgaaggatcctatgcaagctgtatccacaggaaaggccaatcagaagaggacctgctgcacccaagatggggattgtgggggacaaaaggaagaaggagacctgaaacaggctgtgggtattgtagaaattctaaagttggaagtttggggcctgggaatcgaagatgtttcattttgtccttacaaaaacatcagggcgatgtggcaggaagaacaagaggagggagctggaaggaaatgcatgattttcactgcatgccttactccccttatacaatccagaaccacctaagtcattaacttgaagcacccaagtgtctgctgatgagcagtttggttacaaggcaagatgacaagtttaacagaagtggccatgggatgtaagtacagtgatggtgccctggaggatactcggaaggcacctcacctcgacccagcattgcccagagcaccctgtcacctgctgcttgcttagtctctggggactccctccaccttcagagcccactggtgctgatcgtgcctggggttcctgatttggaatgttctgtaggactgagaagttgctgctgaaagggaaagcattggtttctgggtttgggaacttctatccagtttaatgagtgtcttcttcactgatgcactacttgcttctaaaatttccttataaaccatgcatatcatgcttaactcacccttggctctattcaaacacttttgtgtgtgtgtgtgcaagtcacaaggtctgttcttttcagttatggcctcgcttctccccactttcccttggtttctaaagtctgaccattcaagagggcaaagacctcatttgtcatgccaagatttgtgtttgtgctcttggcagaatgtgttgctaacctttgaatactatgtctctgaaggaaaaggatgtgctttagtgacacactttatggtaggaacttcgctagcagtggtagaaacaacattggcagtccacctgcccaaatctatggtttggacacacactcctttgccaagctatagggatgcatagatgttctgctccctgccaggcaaggatgcaacggcaccctggtccccacattccaggccctcaatgggaacccctacttgactcattgctctttccaccatctcccttccccagactgctgcaaaaccactgccttcccccatttccaaaggaaggggtggttgttcgagctctggcctggccacccaaagacagtgccaaagaaagtgcccgaacctccttttcagtcacgctgcttccatgtgactcaactctaaagagactagactcagccctctgagccctagtgggcttatttagctaaaatgagctttaattgaagaatcatttgtgtgttgattatggttgcaggacagagaggcctcaactacttttgcttttaggagtgctttagttcttgcaactggaagcacaaccactatatttcagtggtactttttttttttttttttttttttttttgagacagggtcttgctctgtctcccaggctggagtgcagtggcacgatcttggctcactgcaaggtccacctcctgggttcaagccattctcctacctcagcttcctgagtagctgagattacaggtgcacatcactacacccagctaatttttgcatttttagtagagacatggttttgccatgtttgccaggctggtctcaaactcctgacctcaggtgatctacccaccttagcctcccaaagtgctgggattacaggcatgagccaccgcgcccaaccacattttttttttccaaataaaaattgctttagttttttcctgattatttaagtaatatgagcttattgtaaagaattcagaaactagaggaaggtataaagaagagcgttaatcaccattcacagtttcaggtcaaaccttctatgctttccctgtgcatgcaaatacatttatactttttgcaaaaagttgagtgcactattcatgatgttttgtaagcctttgatccattatctattgccacacaaaaccaacctaaaatgtagagctatcagatagcaaccattttattatatcacatgaattttgtggttgagaagttcgacagggcacagtggctttcctttgccccacgaagtctgtgacctcatctgggaaaactcaaatggccagggatgactggagcatctaggatctggaaatttctgaagacttatttcttcactttcatggctggcacctgggttgagtaaattggaattctgagctcactgggtttgttgactggagtacctgcatgtaatatctccatgtggcttggacttacaacatggtggcctcaggacagttggacttcttatatggtggctcaaggctctaagagtgagtgttctacctagtgaataaggtagaagttgggtagccttaggcttggaagacatatagtgtcacttctcttactacattggtccaagcagtaggaagcccacccagattcatggggagggggcaagatcccactctctaagagaggagtaccaaaggactttcaactgtgttttaaaactctgacaaccttttatttttttatatatataacatggacagtgtactgggttgagttgtgtcccctgcagaaatgtgtccaagtcctaacactcagtacgtgtaaacgtgactttacttaaaaacagggcctttgccaatgaaaacaacttaagatgagggtatactggaatagggtgggccctaatctaatgactggtgtccttataagaagagggaaatttggacacagatgcactgggagagcaccaagtgatgaggaaggtgaacattagagtcacacatctacaaggcaagagacactaaggattgctggcaacaccagaaggtaggcagagccaaggaggaccctcccttagagccttcagaggaagcgtgcccctgctgactgcttaattttagacttttagcctccaaaactataacagtatgtatatctgttgttttcagctgccttaagtttgtggcaagtactttgttaaggcagccccaggaggcaaacacggttttccatatttgcctaggtctgcaccatcatttcataagtgcacagtatccattgaatgcttaacatcatgtatttaatcaatcttaaataggcctaagacacgtaacccaataattagcatgagcttatattctatgcaattaagtacatggctcataatctctctcatagacttcctttgtttcctccacagagcctagcacagttatggagttagcttcagcaaagatcaagtaacttgtcaccaccagccagagtatcagaacatacaaagactgatcccctatagctcctaagcattaaattaaaggattccaaatattaaggatattaaggattttaagagagtcttggctcttctggaaacctggttggttaggtaacaaagaacagttaaaaacttcagtctgaaagagcgattcagtaaggctttaagtatttttaaatgaaagtgattatagtacaaaaaggttaaaatccattgttctttacagatgtaatgcttccagttctccagccacaaaagaagtattgaacactcaagcctcttgccaagtgttaagaaatgagtcagaaatgtaatgctggcagacgaccatggaaacatactctatgccttataggccttgcaccccttggtccctttctgctgtccctttatgatttctggattggaggaggcctcctgtgttttttttttctcaagttcagttttctgttttctttccttggccccatttgtgacttcctctacgcagaagggcagacatgggcacatggggaaaggagccagggcacccctcccagtctctcgggaggggaaaggagcagcaggcgaggctgtccactctgtaaattacgaggctgcaagccttccaggcttgttgggtttttttcttctatagtccatgaatcttctaaaaaagtccccgtaggaagaataaagcctgttctaattctaagacgcttggcagtgcttttgccattttcaagggatctttacctgctctggacacaactgtctagagactatttggattgtggtaagaattgttctctgaagtcttcgttccaatttcattacagagatcccaagaaaactgtgctccacgaataggggctcattgaggactgacggattggaatgacttgagatcttcacattttccaaatacttgggaggtggtgtccttgggaaacgcccttgcaagaatttccccttttctcttggtgtgaatggaaaggtatttcctacctggatggagaattctttctgccactccctgagctgggttctgtgcctggaagggcagggcttttccctggactcatgattatgtatggtctcagcaggctggaggtactccatgaagactgcatgtgtgttagggtgtctgaaggtgcaggggtttcgggggagactgtgtgtgctgcacaatggccatttctgttcccctgtaaatgatagtgaattttttgtggcaccccctaccatgtatcagttctatgatcaaccagaaaacaaacctggctggagggaaggatactgttgcaatcactgttagtgcttccccaagatcttgttattagaactctgatttttttattttttaaattggtggggccacctgctcagccctagatgattgatttactcatggtgccagcctccttttcacctagaggtgaccacatgactgttctggccattgagaactaagtggagttttcctggggtctgggaaaaggcttgtactttgtctaatataaatggaatatgaggctagcaaagctctatccttttctgtcttttaactgcttggaacatagacttgacgtctggagctataagcagccattttgtgacagcagggataaaatggccaagggaatggtctgtaaacaagcatgaataaagagctgagagagtcccaccatcactggctctgaggtcatggggcacccgaatcaatggcaattaactgcctaactccttacttcttgctgtttaagttactcttgactcataatcaccacacagtcaaatgcacacttctcaaattttataccaaattttataccaaagtatgccaaatactagaggtgtagtgacctgcagcctcgggcatagctcaaattgatattctaccagcaagaaatggcctcatattttatctgagacacatatataaatgttgcgttctatttcataatatgttgatgcttatgttaatttattaaaatatttaaattgccataaaaatatttaaaacactttctcctccaaattgtgtgtgtgtgtgtgtgtgtgtgtgtgtgtgtgtatatatatatatatatatatattttttttttttttttttttttttttctgagacagagtatcacttcgtcacccaagctggagtgcagtggtatgatctcggctcactgcaacctccgcctcctgggttcaagcaattcttctgcctcagcctgtcagtggcgtttgaaccacagcgactccattttgagtaagggctaggaaaatgaggctgggacttgctgggctgattcccagaaatagcctcccgatgtttatggttaagggaatagattaataatgtttgctaaacacacccagacttgggagagtcctaatatcctgatatcttgagagcaaaggcattccaaatttcactttaaagataataatatcgattcttgcaaaatatagtaattaagaaaattaatcctttatcacaaacccttgtagcagagcacatcttcccatatatacaagcattgtaactagggcagacgcgttcctccttactttcaggaacatcctactcggtctatggagtagctgtcctttcactacttttctctcttaataaaacttgcttttactttgcacttcagactcaccctgaattctttcttgcgcgagatccaagaactctcccttgagatctggattgggacccctttcctgtaacaagcctctggagtagctgggattacagtcgtgagccactgcacccggcctcaaattgcatgttctgggaagaggcagtttgctttttcctggggctttgagtatcccctgatgcattgcccatcctctcaggggtacaaataccatgatttgagaaatcagaatacaagaagtagcagagatgaagataaagaggtaggtagagctgggatcatgagggctgtggggtgtcaggctaagggatttggattaaattcctttagaaatgggacaccccacagaagacacatcaggaagattctgaaaagccacacttcaggaagagtagtgtggcagtaggcctgggactgagcaagactagacacaggaaaagcaggtaagagatattgtagtgcatctggtagactcagtgcagctgtaagtgacaggcaaaatagcagcttaaacaaaatagatttttattatttacttaagagttaaggagtagctcggaagtcagcagtccagtgcaggaaaggtggcccatatccacttagcattatcctgttaccaatggctacacagcagaccacccacattcagaagctgaaagcaattgcaatcattttcccatgaatctacaatgtaggcagggcacagtgggagcaactcatctctgctccctatggcatcagcttaagtggcccaaaggctgctgagaactcgaccagacaactggtgtgtggaattacctacaggcttgactacttgcacacctgatggtgaatgctggctgtcacctgggacctcacaaggctgtgattggaaatatgtctgggcagctgctccatgaggctgccctacttcctcacagcatagtggctgggcgctaagaggagaatctcaagaagtaggaagcagaagctgcccatttcttaacacttagatcccggagtgggcaaagcatcacatttggccaagtaatcacagtgcctatattcaggggttggcaaagaccccagctcccaaaggtaggaccactgaacatgcatgtcattagtcagaaccagtgtcagaatcactattattggcaagggaggctagaaaatgtaacctttactctggagggggattctatgcccagttaaaaatgagacatttattactatggaaaaaaggagaaaatggttattagggacagttagcagtctttgctgctgacagcaaaccacaagtgacttgaacacaggaactcgggtggcacgtatggtaatggaaaggaagggggtgtgagagatgctaaggaacgagaaccagcaggctctgagatgacttgggctgccatgtttggggatgtgtgtaggggcgggtaagggtgtacatgtatgaagggctggaaccaccagggctgtctagagactaccagcgagatgcagagccaacaacttgcatttccaaggttagtctgataccagatgaaatttttagacattcatcaagactaagatgaccaagaattacccttccagagctctaggccagattccaaagcatcttgatcttaagtacagcagatcctagttttcaaaacctgccacagcagtgtttttggtccaatctactcttgttgcaccttgccacttcctgtcaaccttctgactgtgtgaggaatagaatgtggaggaacagatgctacatgacttctgagactgggtcagaaaggtgttctggcttccacttggctctggttgtacagggacatgtgccttgggagtcctgacgtatcttgggaggagtccagctaccccaaagccaccacgccggagagaaagagatgcccaaggagccccagcgtttgagtcttcctagtgaaggagttaagaacatgccaccccaaaatatgccagttcagaataagaattattttgagctgaaggcagttgagaaacaacagatgtgcctccccactgcttttttttttttttttttttttgagacacagtcttgctctgtcacccaggctaaagtgcagtggcatgatctcagctcactgcaacctctgcctcctggttcaagtgattctcctgcctcagcctcccgagtagctgagattacaggtgctcaccaccacgcctggctaacttttgtatttttagtagagacgactactcttggtcaggctggtctcaaactcctgacctcgtgatctgcccgcctcggcctcccaaagtgttgggattacaggcatgagcaaccacatcctgcagacccccctttttttaaacctaaagcaggacatacaattttccatgagaaagatactagccccaccccaccataccaggagagaacacccttctcaccaaagcctggaaatcaacaaatctgtacagataagcttactaaagaaacccttgtctgccattagttttacatccttcacccccatgtaacccctagtggcttcccctcagtttcctgccactagtccagaccctttgtcttcttatttcttcataaacttatcatttctttgtctaaaaggcatacaagcattctactttggccatttctctgagtctctacactcttttgaagacagtaagtatacacatgcaaaaattatcaaaacatatatgctttgctcctattaatctatcttatgtcagtttattagatcgacccaaggatcccacaggggtagaggagagcttattctctccccagccatagccacggtgccagacatctgagtgagtgagccttcatgtgtgattccagccctcagcttttgagtcttccagctgaggccccagacaagccatccctggagccgtatgtgtaattcctgacccacggaatccatgagcataataaatggttcttttatgccactaagttttgggtgacaagttatacaaccacagtaatgagagtagcaaggaacccaaggctatggtacgtggcaggtctccccaaggcttagagacctatggatgcagtggtttggatccttttcagcagagcaaccaatgggaatgaagcacctggggagttttatgcatcttaatcccaatctgaagtacatagttgggttgatcgcagggcatctccacccactgtgacccacagcctttgccctaacggcactggtggggactaaggacagaatgtcttactctgaatcttcatggtgtcaacgtttcttatgtgcacccctcccttcctcattctcctgtcctcacccactttattacagtagcagtgtgaacttcaaggcatggctgaatgttacaaggatcattcccagcctcctgaagaggacacagaaaccttgaaggcctggcgtttatttggcataaagcaagtagctgtgtttgtttgtttgtttgtttgtttgtttgcttgcttgcttgtttgtcttttggaacagagtctcactctgttgcccagcctggagtgcagtggcaccatctcagctcactgcagcctctgcctcccaggttccagtcattctcctgcctcagcctcccgagtagctgggattacgggcgcccaccaccacgcccagctaatttttgtatttttagtagagatgggtttcaccatgttggccaggctggtctccaactcctgacctcaggtgatccacccaccttggcatcccaaagtgctgggattacaggcgtgagccaccgtgcccggccataagtagctgtgggttgttctaagtgaggactggattttgagctgaagttcaaactttcaaaactctaattccatcagtttttagccatgacaccttggcaagtcatttatcctctctcaaagcatttactatcaatgaaatgggagatgagaaaacccatgtcacaggaatatgtcataggagtatggaggatgaggaacatagatgtttcataaatacatatcaaaatatcacctctggcccactccccgcccccctcccctcctcccacctcaactgctccagcagctattaggagaaaatatcagaagggatgaattctggaaagtacaaattaaagccaggtcaggggagactgagcagaatcctaggtctacggcttttgcttttggtaagggcttactttaattgaggagaaaattgaagcccagagagagtttacgcaacttgcccacagtcacatagctggtttatggcagagcgaggattagtttgtcagtctctgtgctcttccagccacatgaagatgaacaatgtaactcaggaagagggacgctagaggctaaagcagatgtagggaaggggtggggtccagcatacgctgaggtttggccttccccaggcatgtgcaaacagagagtggctgaagctctggaaaggacaccaggaaagccaccagagttcctcacagttgtttccttccacccagttctgggttgtgtgtgcagaaatggaggaagtggctataacaccacatggcggtggtgggaatgcccaagaatcgggagggtccacagtgtgaagaagtaaactaagtcagatccaagcctgactcaaagcaagaagaattctgcagatctgcaagttaggttgctcattattacacaaaaatgcccagtttgctcccagactggccaggccccacctccttctcatctgcaattatagctcttcaaggtggggggcttgtcctatagctgtggaagattccaggcaaatcaatgcactatctctggatgtcaggtgagctccatgaacacaactcttcagccttggcccattaatcagatctgatgacttaatttactttgaaaatgaacgtgccacttacaacgtgatccatcacaaacatttctacttcccaaatcccaggggaattacctctggcgaacagagaagaattaaaccttttgctaaacaaaggcattctccctttgtgtgaccagagacaggagatagaatctgaatgtgcttttaccatcttctgtgctggagatgccaactgttttcccccgtccccaacacacctgcccctcacagcccttcagcagaggccctgtggccttagtggctctgcctccaaggaagcctggggtcagcccatgacgagtccagctacgtacttgggaataggcaggcaccatcagttaattaaaggtcatgaagacagaggagcagaagctgcctttgtggggagctgaacttctctcctgacagcccagaatcaattagttgtacagcagcagtgagaggtccccctgccccagggagagatggtgacagagagacaataggtgagctggtttcacatgctttcttgttgtctgcatgaggccagctgtacctcctgctctggtcttgcgagatgaccccggatccttaggataaacttcccttcacttctgtgagcctaagggatttctatctcttacaaccacttttcttgattaagatacacactggactcaatcctaggtggtggggagatgcaggaatgtagaacaacaaggagctgcttcatccttttgaaataacctcccatgtattttgttccctcatacttacacctacacttattggatagtttaagcactgaagtattggctaattagtcaaagtttgttcatctttcctaactaggctgaaaacaccctgatgtcaagaaccatcccataggctgggtgtggtagcgtatgcctgcaatcccaacactttgggaggctgaggtggcaggatcacttgagcccaggagtttctagaccagcctgggcaacatggcgaaacccagtctctacaaaaaaatacaaaaagttagctggacatagtagcacacacctatagttatagctactaaggaggctgaggcaggaggattgcttgagcctaggaggtcaaggctgcagtgagccaagattgcaccactgccctctagcctgggtgagagagccagaccctgttaaaaaaaaaaagaaaaaaaagtaataatgagaaccacatcatatatattttctgtaacccctaacagtgccagatatattttagccaataattatattaacttttttggttaaatggaaaaggatgtaaatatagaatcatgagccaacatgttgatttaataaatgcaaatttcatttatgacctccttcatccatctatttacagagtcactggttcacttgcagttggagagaagctagaacagttcgagctttttgtactcacccaaatgtaaggggatgtgagagtctagtaaacaggaatacagagagaagtacacatgtgaggcttttaggagtaaagtcaacagcattcagtgactagaattatcatagattggaaagagaagctcatcaaggatgggaacaaattttagaaggttcccaagaggttaggcatagcaaggtccacaggagggtggggctggccttaggaatattgcaaagtgcattttcctccttctcaagttctcaagaaactttttctcttgaaaaataaacaatagtttctaaatataggagttgaaccaaaaatatatatttttcttgggtacaatatatgcaatgtatgtttttgcatttgtctgttgtacccaatagttgcctatctgtaattttttttttaagtactgacacatttaatatgtccatacagtctggcttaggttacactggctgaagtgcattagagggtgtgtgtgtgcatgtgtgtgtgtgtcagaaagagagagagagagacagagagagagaaagagcaagagagagagctcctagttaagcacttcctgatatggactttcaaattcgtcaataaaataaaaagcatttactacagctggccttaacaaatactagtctctgtcatttcctctcactaagtttaggtttacaatggtgttttatttatgcttttgtatgattgccacagttagcagaatgccttgaaaagtatgttcttagggtactttttaaaaagcatgaaatttattaactaagaatgaggttttctttctcttgctctctcatttttttgtgctttcttttaaaattttatggttcacttttattattttaaggttcctaacagccaagaagttctagccctaagttactttattcattcagtagctaggtgagacatgtatcttctatttagctaaagactgggaatatattttctggagtgtgctaagatttcaagccaagttttgtatcatctccaggactccttgcaagtgtgtaaaactagatttgtctgcaaatgactagtgcagaaaaagaaaaatggatcctccttttcattttctcctgaaaatattcatcaaacctatatagtaagtacccatctgtccaagacaatctctgagaagaataaaacacaatctctgaaggcaaggaactcataaacagaggcattcctgccaggatgaaaacagtatgtttcttgggtaaattaaaaaattaatgttacatgtcatagtagtagacagcttagaaattttgacctttgcttcggggaaactttgctcatgaatactgagtgtcagaagtggggtcaggggttcttcagagaagggcaatacggtgggcttcatggaggaggtaggactcaaaaaggatgctgaggaagcattggcattagaagagcagagagaaagggcaaaggctgacccctggtcgcaaggaagcagagggccagttaaagagccctccctgtaggagatgagattggagaggtccacttggccaggttgtgctgcacctttgaattctgtgactgcagtctactttgatcctcttccatgtcctctctgtgtcaaggggtaacatgaacagatcctgaataaatatagttgcatgccaagttatatttgggaagattcatgtggttccactgtgtgggaaagatgagagagagcaagaaactagaggcaacaagttaggaagcaattgtctaggaaaacaatggaattttaggaatttagatgggattgctattgctctggggttttagattccagaactacacaagcagaaatgagggtttttaaaatatgactcccccggcaaaaaggaaaatgaccacatctaggtttcacttgggagggaatgaggatagacgtctggcgttcccaccagacttctccctgggctcagctctctctgtgggtctacccctgcctgctcccacgtttcccctcccttcttcccttgttctgggcactgcagctttgtgtttaccatcattcaacagtcagcaaagaaatacttccctttagcgaatgtagcaaagactaacaaggcttgctggaaactgattagttctggggtttcttgtccagatagagcctccctcaaatcatcctctttatcaaagtcctccacgtgggtggtgctggttttattgaacctaatctctgttcagtgaattgttgcaatgtagcaagcaaaacatctgattgtcaatgccagtttagatctgaagttgctaagccctctgtgttaggggacaaacccagaatcagagacacctgcacccctccccagctgagatttgctcaccagactgagcttgggggattcacttcagccctttgcagagtttcatctggaatatgagtgccaagaaagccactgtgttcaagttgtccatgagaattcgcctctataccctggcaaggcctgggaacagaacagatcctccctagaaacgagaagtggagaactttggagaaaaactaacttcatgggtaaaactctgttttcctttgaaggattctggtcattttgttagaaattaagagagaaaaacagattacggttggctagtataggcccctggcaccaggcatcttgttcctttttcctctattatatttcttgaaatatctcagatggtagcagatgcctgtatcctaaactgaaattatttgtctctgggccagaatactcttaggaaatcataagacatcccatgagcattgactagaaaagctcatgatgcaatgttagatactttcagttgtaacatgttttttaatgttgtgtttatatctttttctttcctaaatgtagaatctgtttgggctgggtgtggtggctcatgcctgtaaccccagcactttgggaggctgaggtatgaggatagcttgagcctaggagttcaagaccagcctgggcaacatagtgcaccaagacctccgttctactaaaaaaaaccaaaaaacaaaacaacaacaacaaaaaaaacattaaccaggcatgctggtgtgcacttgtaatctcagctacttgggaggctgagactgaaggatcacttgagctcaagaattcaaggctgcagtgagctacggcaacagagtaagaccctgtctcaaagagaaaaataaattagaatctgttcggaattgaaaaaaaaagaaaagttaaacacataacttaccatcattgactttaaaagaagcaaaccaaccatgatagctggttctggggagaaggttagtaagtgtgttaaatcaaatcccacccattcttgggtgtttggtttaggttgcttattctttataaaaccttccctgagtcagtatagcccatagtcacctcttctctgggctactgtaaaagtgacagtactatacaatttagtccttcattggaaatgtccttgtattattcaccattgtatgtgctgttcctgtttccccaaccagatggtaagatatgttagaaagcaaggatcctactagactctgtatgtttgtttgtttaagattgggtcttaagctatgtttctcaggctggtcttgaactccttggatcaagcaaccctcccacctcagcctcctaaagtgctgggattacaggtgtgagccactgtgcctggccttgctagacttcttatttcctaaaagcaagcttccttctgagaacatagtatttgacaaacacctactgaatgaaaacattgagcatggaagttgggctcatttcagatctggctctgggtcttcccttcactacaagaagagctcaggctcagtgtgacccaggccttgctatttggagaagctgtgtcatgataaagtcagtcacttgttattgacagccacgagtggcagtggacattctggttaagaacaaaggccttggggtcagcaaacctgggcccagattttacttttcccacctattagtcgtgtggcattggacaagttattttaccaatgcttagcttccttatgtataaaatgaagatcaaaatagtacctaccacttagcatgttttggagaaataaaataagatatgtagaaccatatgccccacttccccagctgggtatgtaagtaatgtaattttcccagattaggaaattcataatcctgtcccttctttgtggacccccttccagggtccagcctggatacccagaagtgcttatttggtctcaagggtcagtcctagatcttctcaccctgccgggtgttccaggctccccagatgccctctgctgtaatgacattgctgccagagcctgatggtgctgctacacctgctgcagcttggcgagccacagcagagcccttgacactgactgccttgcagtggctcctcaggccaggagggaggctgtttctgggttgccagtgtgtagctcttttttttttttttttttttttgagacggagtcttgctgtgttgcccaggctggagtgcagtggcacaatctcagctcattgtaacctccgcttcctgggttcaagcaattattctgcctcagcctctcaagtagctgggactacaggcatgtgccagcacatctggttaattttttatattttagtagagatgggtttcaccatgttgcaggctggtctcaaactcctgagctcaggcagtccgcgtgcctcagcctccaaaagtgctagggttacaggtgtgagccactgcgtccaggcaccagtgtgtagctttttaatagaacttcccatggctgcttgggtttactttgggttaaaagcaataataaattcatatattacccccaatgtgcttatggagactaatggggaggacacttcagctaaaagtgtgatctggcctaaggtaaaaacgtttcaatcaggtatttgcataggtggagtgtggccttgttgttcgaaaagattaataatgacaagccaggtgtctatgcactgaaggcctatgggagatggttctgaatacaaaaaaatatgaacaacaacaacaaccatttgtctctatcttgcttaaatgcaggtaggggaataattatagattacatggcatttaggcacaatgtttattttccttaagattggggtttgtgtgtgtattgcaatccttgaccaccagaagaatgaggaggcatagctttgcctcacacagatggctggtcttggaagaagaccaaacctggagtaccaagacctcttccgagctgtcctgtggaaatgcctcagtgttatcctagactgaatctcctggacagacaggccatgctggttggccaacacacgtattttaactatgtggccgacgtgtttgccactcactctgtggttaaaatgtaaacagaaggtcaaaaggtaggatcacaggccaggcatgatggctcacgcctgtaatcccagcactttgggaggctgaggcaggaggatcatttgagtccaggagtttgagaccagccagggcaacatagcaagatcccatctctacaataaatttttaagtcagccaggcctagtggcatgcacctgtagtccccactactcaggaggctgaggtgggaagattgcttgagcttgggagttcaaggctgcagtgagttgttaccatgctcctgcactccagcctgggtgacagagtgagactctgtcccaaaaagaaaaaaaaaaaaaaaacagagtaatatcacaatgtacatatcccgacaaactccctgctttctgcttacgaggaggaattggcaacacagaatcatgcagcaggaagaatccatggttatacttataaagcagccttttgaattgggtgggtggggtgggttgagagtcacagaggcctggttccagcctgctggtcttctgtcacactgacttctgcgatcttgaatgaagggacatgggacttcccctgagttagatgaccagtgtgactgatttgctgggcccagcttgtgtggattggtaggatggagtcagagtgagagcaaattgtacagtaaggtggtgactgtagcaggaggataaaaaaagagccctggctgatgaagcgccttccaacagaggtggcttaaatactccttccccggccgggcgcggtggctcacgcctgtaatcccagcactttgggaggccgaggcgggcggatcacgaggtcaggagatcgagaccatcctggctaacatggtgaaaccccgtctctactaaaaatacaaaaaaaaatagctgtacatggtggcgggtgcctgtagtcccagctactaggaaggctgaggcaggagaatggcatgaacctgggaggcggagcttgcagtgagctgagatcgtgccactgcactccagcctgggcgacggagcgagactccgtctcaaaaaaaaaaaaaaaaatactccttccccagcaacactgtcagtaacacacagctgtatatttccacaggccaagggaagtctaacccctatggaaagaaggtgggtttttcctaaaggtaaaccttcctaagggaaaaatggagaagaatggccctcaagacaggaagcagaattagggattgggtgtgaattatgtaaattttgttttcctttaccttggactctggaaatggcccaatttagtgccaggttttaagtttttctcctgtgtattatatcctctagccaccaagtccttcactagcaactatttacatctgcagcctggcgtgatgatgccgtggggaaatgagggacagagcagagctggccatgggggctatattagtccattttctgctgctataagagaatactgcagagtaggtaatttaaaaagaaaaaaaaatgttgatttgactcatggttctagaggctggaaagtccaagaacatggcactggcatctggcaagggtcaccccatgacagaggggcagaaggaatatgagcgtgcaagacacggattaaatcaagctgaactcattgtttaatgaaaaccccacttctgtgataactaacccattaataacagcattaatccattcatgagcgcggagcccttatggcctaatcacttcttaaaggtcctacctcttaatactatcacaatggcaattgaatttcaacatgagttttagaggagacattcagaccatacatagtaggatcatagcttgctccatgtcaccctgctatgaagccagcagcaaagtcagggcaagccaaggatggaaggagcccatgatacagaggagagtggcctgactcatgaacaggcatttgtatataaatatagatatgtctcacaaatacagcagaggaaggaacccttgctggagaaagaggtgagcactctgtaaggttaatgggaatttatttccttttttttttttttcctgagcagcccctcttttagggaggaagtctattactccaaactcctgatggcagagttaaagcctcacaggtctgaacagatattcccctgggatattcagcttttggggaacagccagctcaacagtgaacctctaatctcatggcaaattatttaaatctgagaatccattcaagtcttattttgagtaccctagtccatccaatatcttttaataattttgtatctcaaaaaaagaagggaattgtccttacgtaaaagttggtatgtaaacaaaaggttataaacaggttggtatgtaaacaagtggttttctgtaaacaagtggttatttatatcctattaagtactatatacatcaacagtatataaataatagtccctggccaaggcaaagacataatctattgcgtcttctgctggaaaagagaattgctcttaccagaataaaggactgtgctccaaaggtgaattaatgttttcatctctatagactaaaaacttgtcaataacttccaaaagcaaaaaactccttaatgtcctttctctccgtggtgcccaattacttgcacctgcacacggcatgcactcattgttggtgctgccagtgttccaatcccttctactgaaccctgcaatgctctcagagcctgctgctcttctttagttcacttggcagttaatatgatgttgaaaacaccaccattcattaagagtggaggggtacagcaccattgctttcaattcagatggtctgtggtagagactacaagtggtcacctatttccattctttcacttttgtgcacagcaccaaaatccccaatattttttaaggcacgtggccatcaaggatacagtgtgactgtctgtgcttcccttgcagttagatgtgggcataagatgacatcctggacaatggattgtgaacgaatgtgatgaggccatctgccaggttgtgtccatgaggggaaggtgtacaccccttttgccctttctcctttcatagaaggaggacaagttgcggaagaagccaatcttctagggaatccaagcaacccaatcaaggaaatctggatttctgacaccagtactcagtggcagaagttcccaaacactctcgtttcatagtatagtgtcgccataattttttcatattgactctaggccaaaagaatgcctaaaaattctgtttctaggcagttgtatctaagcaatttgctatgtcctaacaacttagaagtcatttgaaaaaaaaataattcaaatacattgaaagaaaaaatactgttatttctattctttttttttttttttttttgagacggagtctctcactttcacccaggctggagtgcagtggcgtgatctcagctcactgcaagctctgcctcccaggttcacaccattctcctgcctcagcctcccgagcagctgggaccacaggcacccaccaccacgcctaactaattttttgtatttttagtagagatggggtttcaccatgttagccaggatggtctcgatctcctgacctcatgatccacccacctcagcctcccaaagtgctgggattacaggcgtgagccaccgcacccagctcttatttctgttcttaaataaccacaatcacttactagtgggatgcgtgcacctgttgagcactgtacaccttctcaaaccttgggatcacattgggtaacagtactgtcatttacttgcattttatcagaccagccactgaaaacccagctttgcaaaggtatgatatcatcaaagagaatgtaacaagatctgaggtttgaactctgaactacctcaagctagtaatatgacaaatgtcaaggtatcactgaattttctttgaataagaaaaatttaccatggtatcctgtggtgcctgggtgcatagtttgggaaccatgtctgtggagcaactatactagctctggactgtttatataagagaaaaataaacttctattgtctttaaaccactatgatttcagagctttaagagcacactaatcttatcttatagaaggttgaaactattaagacaaaagtgaaaatatgactaggcagtttaacctgaaagttgcacatatacattgacacccccaaccccctgccctgcggtcaccttctgttcccccaggccagtcctctaagttgcatcccttttcctctcatttctttccttctgcctagtaatttgttccatttcactagctgccggctctcagggcagctgccctccatgatccctgtggcctttcccttccagagacccctgtgtctctgcccaagctgtgccttgttgaaggagctatatttgcttgtgtggcaaaccctgaggcacgagggccagcttttctcccctcaccacacatatgccttcttaacttaagggaaaaaattccattccccttcagggaacattaaagaagtggggtaaaaagcaaagttttggttgcacgataggttgagtcctctaaaccacttaagaggtatatttcaaaatgaagaaagaatttgaagtacaaagaattagtcaggtatgaaaatcatttaaccttcggcaagcacctaaagccaaactctatgggggtgcccaacaggccgtgagcttggaagagaagtcgtttccttcccaaagctgacctttgaaagtgaagatgctgctctaatattacttctactggccagagggggaaatgcccagtcattggattctgcaaaactagaggaaatcagggccctgtgatattgattctcttctaactcctacagagaagttttctctccacgtctttgtttgagacagagtcttgctctctcaactaagctggaatgcagtggcgagatcattctcccacctcagcctcccgagtagctgggactacaggcacacacaaccatgaccagctaatttttaaaattctttgtggagatgtgcatttactatgttgctcaggctggtctcaaactcctagcctcaagccatcctcctgtctggacctcccacagtgctggtattataggcgtgagccactgcacccagccctctccaagtcttaaggcaaactgtagccactttcctcttgaggtaaagtagacatggcctcttccagttgacttcttccaatatgtttcagtagttagaaattcaaatgagatagcaatccattccctctgatgctggctagtaaggccaaaaggagtatttccaatgctgtcagatgtgtcagcttctgtgaggagttgagtccagcagagggtgtttgatttatgtagttctagagggggggcatttctagtaactgaaatagttgagaatcctactctgaatcacttccctaagccccttttgttttagtgccattctttgttaaagcctaagtcagattattggtttcttttgagcagaaactgcaacagataaggcctgtctccctaagccagatccatgtgatcattgcttttgatctgacagctactggcaggagtgtagctagtgcaggtgatgtggatttcgccctggtcagtgaccccctacttatacctgactagctctccccaaccccaaccccaatctttggtctttattccaaaaatgcaaacctatttagatatccaactaagcagacattaaatgggaaggaaaatacatttttgaaaaaaagtatgatgacatgtttcaaacccaagcccttttttctcagacagtcccctgcttcggcatcctgtccacacggctagtgtgtaatccgttgcttgcttactggtctcccttcctccctagatcctgagctccatgagggcaggaagcatggcatggttatctcccgcctgacgctcgccacttggtgcatgatgagtaaatgttcatttgatatgaattctcccctcactggcatggcttagtgaaagctaaagaaacagagtaaagtaagtgaagttcagctcatcctccccatcccccctcacttctccttttttcttccttcccctgatgtcctcatctctctccctgtctcagaagcactgtcagcttccataaattacaggaataaacacctaaaggtaccactcttgaccacattctgagatttgacccagaccttgcttttttgttttttgggtttttttttgttttgttttgtttttttgagacacgcttttgttctgtcagccaggctagagtgcagtggtgtgatcatagttcattacagcctcaacctcctgggttcaagcaatcttcccacctcagcccccagagtagctgggactacaggcctgctgtacatctcctggctaatttttaaattgtattattactttttgtagcaatggggtcttgctatattgcccaggctggtctcgaactccttggcccaaacaatcctcctgccttggcctcccaaagtgctgggattacaggtgtgagccaccatgctcagcctgtcttggacctttggctgcaaagtgctgagcacagagccatgcaagggaaggtgggcaggaaagcttgcaccatttgttggtggcactgtgagcactcaaaatgatgtccccctttgactactgtggtagatgtcactaatgttctcctttacctcctagtagaaagagaaatatcttttctgccctttcgaagttaggtgtaaccatgtgacttgcattggcataagaattaagagcttccacactttgccccagtcacagttgtcagagcagtgcatacaaatgtgtttttagacagaggtgccacaagagcaaagaatcctggatcattgagctgtcacctgaggagagtcaccctgacccccaatgagctttgcatgtgcaagaaataaatatttgttgttttaagccactacgagttttggagattgtttgttgctaacaaatatcttggcctatcctggctgatataactaccttctgtactttgcttactctgtccatatttcaattgtttattaatcataaggtgccctgtgaaagcaaaagtcaggctagtggctcttatggtctttaacaaatgtgatggcaacatatcactttcaaaattgttcaaaaggcttcacttgggaaatgtgccagaggggagctattgcttttcttcatctgcccctttactataccctcgcctcccacttccttcccacacatggtgacctgggacacttcatgtgagatctgccgaatttggcctccacaactccagaatcaaccttcccttcttttcttcatctcacctgagctgcctccacctcacgacactcttctcagatgggtgttacagaggtgccaggaattcttctagaagtaactaactcctagcacttgtgaaatcaaagcccatggacaacaaattgctctccatttgtggacacatggcttccctgaatgtgcaagacagatctaattctcaatggttgcctggcactggttagctctggacccacggacactttcactggtaaaattactgagatgatgatcatgaagcttaatgaacaaaacatgactaaattaacttgtggtcagtcaacaattcaatccgaggacactgacactgtctcccacaattggcttgactgtaacagggcaatgcatgaataacatagggagactgagctttgcctttggataaatgttctacacttgccaacataggagagcagtggattttcaatgtaagatgataatgacgtgggtttgttctcatttctgcctcttgctgagtccttaccctagaaaaatcacaattctgtttttgtttttgagatggagtctcactctgtcatctaggctggagtgcagtggagcaatctcagctcactgcaacctccacctcccaggttcaagcgattctcatgcctcagcctcccaagtagctgggattataggcgtgtgccaccacaccttgctaatttttgtatttttagtagagaccgggtttcatcatgttggccaggctggtctcaaacccctgacctcatgtgatccacacgcctcagcctcccaaagtactgggattacaggcatgagccactatgcctggccccacaaatatattattgatagtcggctgctctatgaaaaaaattctaagggatctaccttcaggaatataggtaagtgaaagttgcaattttctctggaaggaattttaattgtagacattttaatttacattaaatcattaatatattttcctgtaactcactgtataagaaatctttccttcagaacctaatggggctcaaaagtaaaaataaaagtaaaaagtctttcttgactgatcctggagattggagtggggagaaactacagcaagttaagaatagagtctgggccttaataaattgacagatataccatgttcatagattggaagattgaagattgaatattgttaagacattaattatccacaaaatgatctatagatccaactcattacctgtcaaaatctcagcagtattttttgtagaaattgatgatcatgttctaaagtgtatatgaaaatacaaagaacctggaagagccaaaacaaatttgagaaagatgaacgaacttggaacacttatatgacccgatttctagacttaaagctacagtaatccacagagtgtggtgttggtgaaaggatagacatatagactactgaaaaaactattcttaacctgggcccattcatatattgctaactgattttgacagaggtgctaaggtaattccatggggaaggtatagtcctctcaacaaatggtgtagaaacaattggatatctacataggaaaaaaatgaatttcagtcttcatctattatggaaaactcaacttgaaatggatcatagacctaatgataagagttaaaactataaaacttaaagaaaagataagaaatccttgtgatcttgggtagacaaacatttcctagagaggcaacagaggcatgagctataaaacagataattgccataaaagagccataaaaataaatgataagtaaattgtttcatgttcatacaaagcaacactactcagcattaccaaggaataaactgctgatacatgcaacaatatggtaatctcaaaagcacaatactaagtgaaagatgccaaatgcaaaagattacaggctatattatttcatttgtatgaaattttagaaaaagcaaaactttagtgttagaaagcagatcagtctttgcatggagccagggcaagtgtctaactgcaaagggacataaggaaacttttggaaaatatgccttgtggtgctgattgtgtgaccatatgcatttgtcaaaactcatgagactgtacccttatgtgcagaaaagagttaacacagccaatctgaggctgctattcttagaaaggcctgcttggaaggttggctcttggatggtgtctgggaacttggatttttggagtcttctcactgttctctaacttatgagggtggtttgctgtgtctagactgtttatgcaaataatgtgctttatgctaaacatctgctttccttctggaagttctggaattttggtacacgttaggcaaaggtgcctatgtaaatagcccccagttaaaaccttgagactgagtctttaatgggctctctggggagaaaattcacccaaattgtattttaaaaatgcaatttcaacttctattttagattcaggggtattacgtgatgctaagttttggggtacgattgatcctatcacccaggtagtgagcataatactcaatagtttttaactctcacccttctccctccctctccttctagtaatccctagtgtctattgttgccatctttatgtccatgaatacccaatgtttagctccgtcttataaatgagcacatgcagtatttggttttcttttcctgcattaattcacttaggataatggcctccagatgcatctatgttgctgcaaaggacattatttcattctttatgtttgtgtagtattctgtggtgtatatatactacattttcttcatttaatccactgttgatgggcacctaggttgattccatgtctttgctattatgaatagtgctacaataaacatacaaatatatgtgtcttttttgattaaacaatttgttttcttttgggtatatacccagtaatgggattgctaggctgaatgatagctctgctttaatttaattaatttatttttattttttgagatggagtctcgctctgtcactcaggctagagtgcagtggcacaatctcagctcactgtaacctctgcctctcaggttcaagagattctcctgcctcagcctcctgagcagctgggactacaggcacgcgccaccatgcccagctaattttttgtatttttagtagagacagggtttcaccatattggccaggctggtctccaactcctgacctcatgatccacccgcctcagcctcccaaagtgctgggattataggtgtgagccaccgcgcctagcctgctttaagttctttcagaaatctccaaactactttccacagtggctaaactaatttacattcccactgacagtgtataacattcccttctctctgcagcctcaccagcacctgttgtttttttgactttttaataataaccattccaatgggacacacgttgtattggtgtcttagggctgctgtaacaaattgtcacaaactaggtggcttaaaacagatttattctctcacaattttggaggccaaaagtctaaaataaagatattggtagggctgaactcccttcagaggctttaggagagattccattccttgcctcttccaacttctggtggtttcccaggcatgtgactgcatcattcctatctctgtctccatagtcacatttcctcctccttttctctgtgcctgtctctcccctgtgtttcatttataaggaaagccttgggatccctctggccctttcctccctcccaaatctcttcttggctactaggctggccttgtggtcagagtgggtgtcaaccaccagctggaaagacctctgatctccagagtcccttgtcatttccagataatgccaacagcattgctactggagagaaccattccagagtcttggtcttccccttttaaaatgcaaatatctgtgacaaagcggataaaattatgtgtagagtataacgcttttcttatgatgtagtcctatttgaaaaaggaattgtataatataacacaaatgagcttatggtggtgtcctcccgtctgagggccagcactatagctctccccaccatctctaccaaaacagactctttgggaataatgagagcatcctgatggaggaaaaggggcctaggagaggctgaggcttttaaaaaggccttcatctacattgggcatttgttcagcattcgcctgctttgctaatttggttgctgcatgcccactttgggacaagaaggaaagcactcttctccaatacatcaactagatgattaataaatgaagaagtgaagttcatactcattgctagctctggtaccatagcagcagaggccatctgtagcagcatgttccactttaggggttagatgacctagattctatgaccttccacagccaccaactggctgttctgtacccttagcaagtcacattctgcttagatctcaattttcttatctgtccatgagacagatagcacctactctatcctctctatagatttttacagcattgcagccatcagaatgagggaacctgcagtaggaatggatgtgcccctttcccctccctttcttacattggttccctgggcagtgtgtacttgggtattggttagtatctgggactggtgaccagagaggtctctcgaccagatgcagatgagtggatcaaaaaaggatgtactgacacgaagtggcaagctggataaagagtcaaaatccagcggtgtgttatattcaagagacccatctcacatgcaagggcacacattgactcaaaataaaaggatggaagaaaatttaccaagcaaatgggaaacagcaaaaagcaggggttgcaatcctagtttctgacaaaatagactttaaatcaacaaagatcaaaagagacaaagaagggcattacatattggtaaagcggagctaactatcctaaatatatatgcacccaatacaggagcacccagattcataaaacaagttcttagagacctacaaagaaactcagactcccacacaataatagtgggagactttaacactccactgtcaatattagatagaacatcgagacagaaaattaacaaagatattcaggacttgaactcagccctgggccaagttgacctgatagatatctacacctacagatctttccaccccagaaggacagaatatacattcttcttggtaccacatgacacttactccaaaactgatcccataattagaagtaaatcactcctcagcaaatgcaaaagactgaaaccataacagtctctcagaccacagcacaatcaaattagaactcaaaagtaagaaacttattcaaaatcacacaaccacatggaactttaacagcctgctcctgaatgactccttagtaaaacatgaaattaaggtggaaattaagaagttctttgaaaccaatgaaaacaaagaaaacgtaccagaatctctgggatgcagctaaagcagtgttaagagggagatttatagcactaaatgctcacatcaaaaaactagaaagatctcaaatctacaccctagcaccacaacaaaaataactagagaacaaaaagcagacaaaccccaaagctagcagaagacaagaaataaccaagatcagagcagaactgaaggatatagagacacaaaaaaacccttcaaaaaaaatcaatggattcaggagctggttttttgaaaaaattaataagatacatagactactagctagactaataaagaagaaaaaagagaagaatcaaatagacacaataaaaaatgatagaggtatcagcacggatcccacagaaatacaactatccgagaataaacagttttatgcaaataaactaggaaatctagaagaaatggataaattcctagacacatacaccctcccaagactgaactgggaagaagttgaatccctgaatagaccaatagcaagttccaaaatcgaggcagtaataaatagcccaccaaccaaaaaaagcccagggccagatggatttacagctgaattctaccagaactcagctcctacaaagaggagctgataccatttcttctgcaattattccaaacaattgaaaaggagggactcctccctaactcattctatgaggccaggcctgataccaaaaaccgacagagataaaacaaaaaaagaaaacttcaggccaatatccctgatgaacatcaatgtaaaaattctcaataaaatactggcaaaccgaatccagcagcacatcaaggagcttatccaccatgatcaagttagctttattcctgggatgcaaggctggttcaacatacgcaaatcaataaatgtaatccatcacataaacggatctaaagacaaaaaccacatgattatctcaatagacacataaaggactttgataaaattcagcatccctttttgttaaaaaactctcaataaactaggtattgaaggaacatacctcaaacgaataggagccatttatgacaaacccacagccaatagcatactgaatggacaaaagctggaaacactccccttgaaaactggcacaagatatggatgccctctctcaccactcctattcaacttagtattggaagttctggccagggcaatcaggcaaaagaaagaaataaaggtattcaaatatgaagggaggaagtcaaaatgtctttgtctgcagatgacatgatcctatatttggaaaaccccattgtctcagcccaaaacttcttaagctgataagcaacttcagcaaagtctcagaataaaaaatcaatgtgcagaagtcataagtattcttatacaccaacaacaggcaagcagagagccaaattgtgagtgaactcccattcacagttgctacaaagagaattgtatctctgtcaggttttggtatcatgacaatgctggcctcatagaatgtgttagaaaggaatccatccttttcaattcacaattgctacaaagagagtaaaatacctaagaatacagttaacaagggaaatgaaggacctcttcaaggagaactataaacttctgctcaaggaagccagagaggacacaaactaatgaaaaaatattccgtgctcatggatagaaagaatccatatcatgaaaacggccatactacccaaaataatttatagattcaatgctattcccattaaactaccattgacattcttcacaaaattagaaaaaactattttaaaatttatatggaaccaaaaaagagcccatatagccaagtcaattctaaagaaaaagaacaaagctggaggcatcaccctaccagacttcattcaaactatactaaaaggctacaatagccaaaacagcatggtactggtacaaaaacagacacatagaccaatgaaacagaatagagaactcagaaataagatcacacatctgcaaccatctgatcttcaacaaacttgacaaaaacaagcaatggggaaaggacttcctattcaaaaaatggtgctaggaaaactggctatccatttgcagaaaattgaaactggaccacttcctcacaccttatacaaaaattaactcaagatggattaaagacttaaatgtcaaacgcaaaactataaaaactctggaagaaagtctagacaataccatacaggacagaggcatgggcaaagatttcatgataaaatcaccaaaagcaattgcaacaaaagcaaaaattgacaaatggggtctaattaaactaaagaatttctgcacagtaaaagaaactcagagtgaacaggcaacaaacagagtgggagaaaatcttcacagtctatccatccaacaaaggtctaatatccagtgtccacaaggaattcaaatttacaagaaaaaacaaacaacctcattaaaaggtgggcaaaggacatgaacagacccctctcaaaagaagaattcatgcagccaacaaacatatgaaaaaaagctcaacatcaccaatcattagagaaatgcaaatcaaaaaaccacaatgagataccgtctcatgccagtcagaatagccattattaaaaagtcaagaaacaacagatgctggcaaggttgcagagaaatagggacacttttacactgttggtgggaatgtaaattagttcaaccattatggaagatggtatggcaattcctcaaagagctagaaccagaaataccatttgacccagcaatcccattactgggtatataccaaagggaatataaatctttctgttacaaagatacatgcacacatatgttcattgcagcactattcagaatagcaaggacatggaatcaacccaaatgcccatcagtgataaactggataaagaaaatgtggtataaatataccatggaatactatgcagccatataatgaatgagataatgttctttgcagggacgtggatgaagccagaagccattatcctcagcaaactaacacaggaacagaaaaccaaaggccacatgttctcacttataactgggagctgaacaatgggatcgcatggacacagagaatggagcaacacacactgggacctgttggcggggtggggtggagggagagagagtattaggaaggatggctaatggatgttgggcttaatacctaggtgatgagttgataggtgcagtaaaccactatggcacacttttatctatgtaacaaacctgcacatcctgcacatgtactagaacatgtaccagaactaaaaatgatttaaaaagatgaactatggaaactttgttgtccatcaatcatctatccattcatctattcctccctccatccctcccgtcctccctctgtctgtccatctgtccatccatccatccatccatccatgtagtgatgtgctggaacacctcttcccaactctgtatccaataatggcttgaagttggccatgtggtagtataaatatcctgaaaatcaagttggcagccattacaaatcatggcttttttgtagatccagttgttaaacattcactagcatgccactgattctatctagtcctctcttttatgtaaccatctaaccatttatctatgcattcatgggactcatatgaattggctacccaggatgtaccaggcactctgaagccctttgtatctctactctgagcctgaatgtttgctagactctaacagtgagagagcatgaggagagtctttgttttactgcttgctttggtacatcctgggaagaatttctgtcccatgattagaccagaaactacgtgaggcctgaggcaggaagcagcctagcatgtgtggatgagccaactgcatcttccctcctgttcatattaggcagcctttgccccaggacagtgaccagcagcagcacaggaaagtggggggaggagggatggcagatgaagttccacccgaggttatcgtccccatagtccccactggtttccagttctgccttctgctcctcttgacccttctctcttactctactcagtttctcctcactgttgcatcacgtgaactggggtttacgctccttcttcctcatttctcacctgtctgcttcagtccatgaggtaacaacacatgatcgggaaaaaaattgcaaacaattttttaaagaaaaaaaagggcacattagaaaccaggaatttggagcagactttggtgtggttttaagacacgtctggagtttttcataattccctattctctgttgcactgcttgccaacttcctgaaactagtgtttcctttgacagttatcttacacaccctccttacacccaatagtcagacagtactcgctaagtaagcaaagctcctccaagaatatggccctactggaatggccatccctcaaggcagagccctggcagtgataaagtgttaggagatttttaagtacagagagatgtggaattggaggggtgattgaagctctgtaagcaaaggctgaagacctgaggctgcctatctgggaatcacacaggccgcataatatggagacagcagctgggtagaggcagctggccccaatagagagggcaggcaatggccaggaggataggtaggtgtcactgggaaaatggccatagtctagcaggcttttggagcctgcaaatgttgagattctaggagggtcttctcactgacctttgcctcaaacactgctggctgaaataaagagtgtttctaagtagcaggaactgacgggacgttagcggtggcagagatccgagttacctgaggcgaatccataggagtgtgcagcaacttcagggtggacttccctaaaagaattagactgaggggcataaggcagaaggagagactgaggcaagtgtcagagcgggagtgaaagtctattgaaaactttagaacaggaaggagaggaaagaaaggaaggaatatacaacttggaagagggccaagtgggtgacttgagaaaccaagtacacagcttgatctcttggcttggggttttatacattggcctccttccgggatcttgccttacttctccccactcctgaggtcttactgggaagctgctgatcagtttcaggtgttttctgtccattaggagactgcctttccctggcactggctgtgagcaattattactttagagaagcagttaacaactgcctgaccatcacctgatggtcacccaacactcctggtgtgtatcgagccctctcctgccctgctcatacctgacaagctacctgctgtaaccgaattgggggagaaacctcatggcaatgtttccaagtattatttgggcattctttaacttggattttccaactgcattcatcaaccaattattacacataaaatgtatcatatggtatctgcgtataatttatttcatataatgtagggttgtaaatatattattattatatggcatgaataatcagaattatcaggatcaaagttgtttggaaattatttaaaaatatatatatatatatatatttttttagagataggctatcactctgtcacccaggctggagtgcagtggcacaaccatagtacactggaggctcaaatgcctgggctcaagaaattctcccaccttggcttcccaaagtattgggacacaggcatgagccacaatgcctggcctaaagaatttttaacctaaggactgttatctgatcttttaagaaggcttgagagatttgaacttatattttatctgaacccaagactcaaatcctggttatgttttagtcaaacccagccaacatgcctgaattcccagaggaagatgatgtaatttaagagatttttcagctgtttttgcttctttcagtcttggttctggaaaatgctagagtccagaagccaaagaaaaaagaataagaaaaaaagaaagtcagagtttcctggaaggcaactgtcctggggctacactgggcatttttctttgctaactccattcttactgaaaaacgtcctccattcttactaacacataattatcaggtcaatcctactgagttcagccaagaacaccaaactacaacaaagaatggatattttcttcaactggacaaggatgtattgagtaccttctatgtgctaaatgctatggttacacaggtgaatgacagctatccttgccctcaagtggggggttttgcaatctatttaagaagaacaaagtggaaaggagaaagaacactaacaattactgaagatctacctcattctttcatctaacgaaaactttttgagtgtccattatgtgccaaatattgttcaaggtactggagattcaggaatggagaagacagatgtggtccctgctctcgtgaaggtttcatcctagtagagcagacaaacacattataaaaatgccatgctgacagtatgatggcttttcaaaaagttaaacatagaattaccttatgatccagctgacagtgtggtgtcttctcaaaaagttaaacatagaattaccatatgatctactactaggtataacacctaaagaattgaaaacagggatttaaacagatattttgggcactggcgttcatatgaacattattcactatagccaaaaggtgggaacaacccaaaggtctactggcacacgaatggataaatgaaatgtgataagtacatacaatgaaatactattgtcttaagaaagaatgacattttggtacatgttacaacataaataaaccgtgacaacattatgctaagtgaaataagccagaaacaaaaggacagatattgtgtcattccactgatatgaggtaatttgaataggcaaattcatagagacagaaggtatcatagaggttaccaggggctgggagaagcaggtaatagggtgtcactattaaatggtacagaattttagtttggcaagatgaaaaagtcctggaaatggatagtagtgatggttgtgcaacattgtaaatatgcttaatgtcaccgaattgtatactttaaaaaatggttaaaatggcaaaatttgtgatgtatattttgccacaataaacagacaaaccaaaaatgacatgctggtaaggtaagaggatgactggatattgattttagattggatgtctagggatggcctttctgaggagtgtcatccacgctgagatctgaatgtcaagaataagaaagaggtaaggcacaatcagaaggaaaagcagtccccgaatatgaaactgtaagatcaaatacctgaaggtagacacaggctggatattggaggaacagaaaggagaccctctggtcttcctctggtggaggaagtgtgaggggtggtgagtgatcaaaatgtaagatctaagatgtaagcaggagactttttccagtcagcatgagggctgacttctactggactttattctaccttaataggaactctctgggggattttaagcagttgagtaacatgagaaggaggaaatatatcctgttttgggcaattttagatggattcatagtggtaacattttacctgggacttaagtcatagacattcatggggaggaaagctagcaaaattgttccagagtagtaccagcagagactcagagttaggggtttagacttttttttaaaaaaagcaatatttaatttgaagatcttagaaaatgtaaagccacgcttatcacagtagtgtgttacgtaccaggaaccacgtgggccatagagtaatcatcttcttggagtaaattttgctcagattactgaacttttttacataattttaactaattttttagttgaaaacaatgttttttaaaaagtttaattatatgttttatttaacccaagatatccagaatagtattattttaacataatcaacataaaaattattgagattttttatgatcaattttgaaacttatttatttatttttgaggcagggtcttgcaccgtcacccaggctggagtgcagtggcactatcgcagctcactgaagcctcgaactcctgggctcaagggatcctcctgcctcagcctctcaagtagctaggactacaggcatgtgccaacacacccagctaaatctaaaaacttttttttgtagagacagggtatcactttgttgaccaggctaatcttgaacttctgggctccagcaattctcctgcctctgcctcccaaagcgtttggattatgggtgtgagctaccacgcccatcctaattttgacactttaaaaaaatgtcaccactttttaacagtcatttcttcctttcctttgaattgtggtaaaatacacacagtataaaattcaatattgaaaatcatacttttatattgcaataaataaagatgtattatgcagtgtaatgtactatttgtatagattttccaggcgtttcaggttttggatggctgcctgtggctacacaccagacatccatccattcatacatctactctcatctattgttaaggaacatttcattaaaaaagtttgtgaatgactgaattgtaaatgacatccctgtataaatggttatcagataattcttatatgaatcttcttttgctattgattcatctatcataaaaataatcagttttcaagttattaggctgcctctgaattttatcttgcctttctttgtatttccaggttagtccctctaaacatttacccaacttttggtctttatgataatgaagacatctgacctctggttggccattggattgttgaagaggacttcgggagaccaggtagttcactgggtcagttggctcaattcagaggcattcactcattcttgctcttcgtcccaccccagagtgtcctgtaatctgaatgaactctccctctctgatctaagcatttttcgatttgcaattttcatggagataattctaggtttatatgcaattttaagaaatcagacggctagatctcgtgtattcttcacccagtttctcccaatgtaacattttacaaaacattagtataatatcacaaccaggagattgacattactacaatccatccatctttttcagattttcccagctttatttgtactcacgtgtgtgtatgtgtgaaaattgcacagttccataaaatgttatcacctgtataggtttgtgtatccaccaccacagtcaagatactgacagttccaacatcacaaggatcccttattttgcccatttacaaccactcctaccttcctcacccaccccatccctataccctggcaaccattaacaaatatgtcctccagttttgaaatgtcatttcaaaaatgttatataaatggatgcatacagtatgcattcttttgagaaaggcctttgtgtggttcctgggtaataataatgagtctgactccattttctgatgtttgctagtagcttttataccccactcttctcatttcccattttgccccacatctgggcaagctgataagaaagcctgggttcttctgttggcactgagattccaaccatgtgggcccccgcctgtgtgcaggaaccctcaccccagccccactccccaacgcctaagaaaacttcaagtcagttttctttccctgctctcttacgctgtttttggacctgtttgggaagctttcccagctgtctccagaaaacctcattatgtgcgtaataaaccttttcacactctttcgatgtctatctggtgtcatcatttgaaccatagtttaggtgggaatttatcctatttctacagaatggctacaataacataattcttggatatttatccaatttgttgcctgtatagtattccatggtaggtatgcatcacaatttgtttaaccattcacctgttgaaggacatttctggcctttccactttttagctattacaaataaagctgctatgggccaggcactgtggctcatgcctgtagtctcagcactctgggaggccgaggcaggcggatcacttgatgtcgggagttcgcgaccagcctggacaacatagcaaagccccatctccacaaaaaaatacaaaaattaaccgggcgtggtggtggatgcctgtaggtccagttactcaggaggctgaggcaggagaattgcttgaacctgggaggcagagtttgcagtgagccaagatcatgccactgcactccagcctgggtgaccgagcaagactgtctcaaaacaaacaaacaaacaaacaaacaaaaataaagctgctgtaaacttcatgtgcagggttttatgtgaacataagttttcctttccctgtgattaaatgcccaggagttcaattgctaggtcatatggtacttacataattgctttttaaagaaactgccaaactattttccagagtagttgtaccattttgtgttcctatcagcaatgtttgagggatccagtttctctgcatcctcatcagcattttatatggtcactatctttttctttagcctttctgataggtgtgtggtcatattatggctttaatttggctttccctaacggctaatggtactgaacatcttttcatgtgcttatttgccatccgtatagcctctttggtgaaatgtctcttcatgtcttttgcccattttctaatatgaactgtgctttttattttttattttattgtattatttttaaagttttcttatttaaaaatagaaatgggatctcactatgttgcccaagctggtcttgaactcctgggctcaagtaatcctcccaccttggcctcccaaagtgctggaattacaggcataaggcaccacacccagccgccatgctttttaaataatggattgtgacctgtttgtgtactgacaagtacttactgggatatggagatagcctgagctgtttaaatagtgttatgaaatcagtgttgaaataaacagttgaagaaggaaggatgactggtgtgtctgtgtgggggtgtatatgtgtatgcatagttgtgtacgactgtagcaggtattaatcttagttccctatattcaagtgtgcatcactttattttctttaaatcatctgagtacccatcctcctaggctggtgggaaattcacactcagcccttggtgtctctccctgccctccaaagtgtgtaaaggtcattaggtcttattaaacactctggcacagggaagactgtcactctagtttacagctgtgggtccacactgttttccactaaagcaccagtccattgtcccaacctgtatatctcatgctgggcagctcagctgctaattccccgttcttagtgcataggactctgtgatgaggttgggagcatctaatctcccatgtttcctcacagcctctgaggtcttgacaccttctcacagtccagtagaaatttctgcaatgatggaaatgttccataactactctgtccagtatggtagccactagacatatgaggctatagagcacttaaaatgcagctagtgccaccgaggagctgaatttttaattatatttaattttaattaatttagaactttaaaaccacacatggatattaactattgaggtgggcagtacagcctagggggtactgccacattcttggttatgatttatccttctcttttggctttctaacacctgaagaaaatctctcttcctttcttgttgtccccaaaacacatcttatctctccttggggacgtcatccgcaatctctatgatggtattcattttctatttatttacttatttatttataatatcttatttttagagtcagagtcttgctatgttgctcaggctggcctccaacttctggcctcaagtgatctcccacctcagccccctaaagcttaattttcataaaaaactgaaaaagcctcaaatccttctatttgtcccaccctgcaaaagggctgagataaaaaaaatgccaaggatttggctacctccttgaaattgaaaagaaagaagtatagggaagacaaacgtgagccaatatgtcaataaattgccatgccgtggtgatatagtttggatgtttgtccctgcccaaatctcatattgaaatgtaatcccccacattggaggtggagcgtggtgggaggtggagcgtggtgggaggtgattggatcatgggagtagatttcacatgaatggtttagcatcatctgcttggtactgtccttggaatagtgagtgaattctcgtgagatctggtcatttaaaagtgtgtggcacctcccctcctctctctctctgtcttccttactcctactttcaccatgtgacatgcctgctttcccttcgccttcctccatgactgtaagcttcatgaggcttcccagaagctgagcagatgccagcaccatgcttcctgtataacctgcagaaccgtgagcaaatgaaacctcttttctttataaattacccagtctcaggtatttccttatagcaatgcaagaacagactaacacacacagtaatacagtatgacttaggtaggtatctgaatgatgtgacaccacccttgtgtcacatctgtcaagagcttcagtctaatgtgtgtatagcactccgtggtttaccaaacctcacaccactgaacatgtcgctacattgctccgactttacacacaaaggaatggaggttgggagcagttagcagaagcttaagcaagtgatttctgtaactatggtgagacttgaatccacccctacacagcatcctgggctggccactctgcagggcagatggagagtgatttacaagcagagttttccgctcagccaagattggagattcagatgcttcccctcttggccatattttcttttgcaaataatcaggcaaataacctgatcaggcaaataaccaaagagattatttgcataatgttattgctttggtgtgttatttgttggagtgtgttaaataaccacgaatgtttattagtcagctcttcctctgccagcagaagaatgtggtccctgagatactttcacatcctgttgtggtgttgaagtaattaggagggtgtaacagggagggggttaacccttgttgcagccctggctgaggggaacatatagatacaagctcgttaagagcacagtcagttagtagcctgacattagtccttgagaagttacccttaatcagacatccaaatttccctaacattgtctgattctttaggaaaatacagaatcatctattggctacgtttacaaatgttttggttgatttctatggtcaccctctaccctaatccagaacagaacagactgaatatttaaggatcatcctatgtaaattcagttcattcaacctctgctttttaaaaatctcctccttatgggtgtttgccccataatctttgcttactttccaggtgctgagcttgacctgctgaggagtctgtcagtctcaggctgctgctagtcccttgataagatagacgcatttccctgagagatatattttaaacatatcacttccttctggtttttaagatcattctgctgtctcttgaacatcttcaaggtagccctaagcctgctggcctcacccgccccagtaggaagcatgcccaagatggtcctttccccacccagagagagaatcaccatgccctgtctcctgaacatgactttgactctacagtcaaaaaaaaatcccttgggcctttgtttcctacttcaccctgcgggtcccagggtagtctgctctctgttgtcctccaggtccccttctagattccattctcctgctgactaatggtgtctggaatgacgttctagaaattattttcctctccaggaacaacttaaggggaggaagaagaggatgccagctaggaaatcatgtctactgattcctagtttgtctttcacttgcctggaatggtaaccccagatatttccaagaggtttcagtctatacctactttagcttattcctgaaagcataaacgccactcacataagcctttatctggtaaaagaaaggagaagtgggggtgggggctggaaatgatggggaagcaacttgactggtttgaggggggatgtttacagtgttggggtgaggcagggtgcctggagcaacacattgtgaattctggaattttcttcttcttcttcttcttctttttttttaattagagacagggtcttgttctgtactccaggctggagtgcagtagcacaatcataactcactgtaacctcaaactcctggactcaagcgatcctcccgcctcagattcccaagtagctaggactacaagtgtgcttcaccatgcctggctaatttttaaattctttaatgtagagatgatgtctcactatattgcccagactgatcttgaactcctgggatcaagcgataacttgttgttataatagttaatattattgttagtaatgagctattcctaataaggaccattcaagttattgctttggcagaggagcaattaaagagtagattctttccaattttcctcttagagggtgggaatttttttttatttttttttttgagatggagtctcactttgtcacccaggtgggagtacaatgtcgtggtcttggctcactgcaacctctgcctcccgggttcaagcggttctcttgcctcagcctccagagtagctgggactacaggtgcgtgccaccacacccggctactttttttgtgtgtatttttagtggagagagtgtttcaccatgttggccaggctggtctcgaactcctgacttcatgatctgccggtctcggcctcccaaagtgctgggattacaggcgtgagccaccgtgcctggctgagggtgggatttttaaacttggattttatcggcatacgcactggggcttacgtttgtcataaacactagaaaaaacaaaacactgtccacttaatttgaaggcaacaaggcatggtgcagctgatctgttttccaaagctgcagccataggtcccttttccttctccactgtcacccgagccatgttcctagctggtctctattacagtcttcgccaaggacaaactctgactcaggagacagtgacaggaggcaatctgtcatgtttctcagtcagtgacactctcccaaccagcatcactcaacccaccctcaccccagacactagattcccaccctagggcagctaatccagacgtaaggcatctaatcggagaccttttcccttcctccttttcattccatcccccacagcaaagctgtcatcttgtgtgttaaacattcctggccttgccaagtaactgaataatgggataagctgcttgtattgtgacaatgggttgtaacagccagagcctaggatgggagcggtgctcatgccttcaagggcaggtggataccaatgtgagatgttgggtatgccataattgggaaatactgggctgacggcaacttgggtagcagcaaaaactctgcctatagggattatcttagttcgttttatgcttctataacagaattcctgaaactacgtaatttataagaacagagatttatttcttacagttctaaagattgggacgttcaaggttgaagggctggcatctggcaagggcttctcggtgcatcatcccatgaaggaaggcagaaggtcaagagatcacgcacatgagagaaagagggaaggggctgaactcatgcttttatccggaagccactcctgcaatacaggccttaatccatccaggagggctctgcctcttcaccctcatgacctactcatctcttaaaggtctcacctctcagtgctgttgcattggggatgtttccaacacaagaactttggaggacacattcaaacccaagcaggaatttaaatttgattcaaaatgctggtggctatagtttgttgtcccagatgaaagtgtgaacttcttgttttaatcaatcagtaaaaggctaaggccctctttttttgttgtttgtttttttgagacggagttttgctcttgttgcccaggctggagtacaatggtgcgatctcggctcactgcaacctccgcctcctgggttcaagtgattctcctgcctcagcctcccgagtagctgggattataggcatgtgccaccatgccctaattttgtattttcagtagagatggggtttctccatgttggtcaggttggtctcgaactcccgacctcaggtgatctgcctgcctcggcctctcaaaagtgctgggattataggcgtgagccactgcactcttttaagaacccaagtttggtgttctgaggtgaagggctgcatgagataagaatatggttgggataattttgagcatgttcttcattagcaaaagaaatgtttctcctgaacaaaagttgccaagggcattgaagttaaaatgttttgataaagataacggaaagcagtcctgccagcccattggccatcatggttctcaaagacttagggaggagaaaaaactttggagctggaatctgcaattctgttgttggttctgggtctagaaatggaaaactaggccctgctggaaacaaaaagagcatctccctgataagaccagcaggcagataagaggggtttgtggggttttattaggctcagaagcctcagagctaaacttctagattttaaaacagtttagagtaagatttatggaacaagatcagtgattagtaatctgtaattatagtgagataaagtactacttgtataatatacatgttctttctaagaattcataagcaaggaaaaataatgagaaagatttaagggccaggtgcagtggctcatgactgtaatcccaccactttgggaggctgagacaggtaaattgcttgagctcaagagttcaagatcagcctgggcaacatggcaaaaccccatctctacaaaaaaataaagaaataaaaattagccagtcgtggtggtgtgtgcctatagtcccagatactcactctggaggctgaggtgggaggatcacttgagctcaggaggtggaagttgcagtgagccaagatcacatcagtcaagcctgggtgattaaatcttttaaaaatatttaaaagacatagacactaaaaataaaattagttgagtattctattccaggtactgtcttaagcactaacttaaactgtcgtacacactaacttaaacttcttaacaacaccctaagaaaaaggtataattattcacattttacagatgaggacattgaggatcagagagattaagaaacttgtccaactcacccaaccagtacatgactctaggaaacatactccttctgctttggtttttatggaaaaaacattatagatggaggggatgttcagggctctggagcttcagttagagaggtttgggaggaagcctgacccttgtgggatccattttggtctaacaatacgatcattcatgttccaagccaaaattgtagtaggtaaaatatttttgtctctcgacttccagatgtctaccaggtaaagagaaaattcttgagcatgatctagaaggttctgtctagttcccagctacaattctagcctgtctcctctctcacatgcctgtagtctacccaccctagactagcttctcatcctctgggcttgtgcccctactgcttccctttgctgggtgtaccccaagtctgcctcatgcattcctactctcttttaaaaatccagcttgggtcatctcctctgtaaggatgttctacccttgccccctcacttcccagtctgatagacagacttagtcactgctttcatgctctcaaaccccactgcctatttctcttagcgatatctttgcattgtatcacaatgtgtgtttcagtctgatgcatcttaagatttttaaatgcttctgaaaatacagtgcctatcttgggtatgccacctagtttgggctttaaccaaatgtttctagactctacaagagtgcacaatccttcagttaatagggtagctctggaggaaaaaaatgtgcatgatcctcagacaaagcacatgttatttgtatcttcaataacaggtgctttgccaattagcacagttcatgtcagaattgtttcttacaggtgaaattagtggcatgttgattaacatgatgaaagttagaaatgggatctgtttggtgaatataaagataagtagactagttaaaagagcttagagactctccactcttgcatgaataaaatatccagcactcttagaatgatgcctttacctggtcttgggcctagccataaactgtgggagattctggttgctcaatgctggctaaactggcagcattattctgcctctggaatcccagaaattgtcttagagaactttgcaaggaagattatatgaaccacttttttgcttgctcactaacaaatatttagttaacaagcgtctgtgtatgcagcagaatttggccagtggcttgctttgttcatgattgtgtaacatttgtggagaagaatagctagcagttctgacttaacaactcctaggttgcaatcatccacacatgacctatctggctcgggtcagttttcaacacccactcactggagtgtgtccatactgcttccctattttccaggtggttcttatctatttaataacaacttacttcttcaggagaaatagactattgcattattacattaactattcactctgattgtaaaaccacatcccaatttcaaaagtattaaaagattaaagaaatgtgcatcttggccaggcacggtggctcacacctgtaatcccatcactttgggtggctgaggcaggtggatcacctgaggtcaggagttcgagactggccaatatggtgaaaccctgtgtctactaaaaatacaaaaaattagccaggcgaagtggcaggcgcctgtaatctcagctactagggaggctgaggcacgagaatctcttgaatccaggaggccgatatggcagtaagccaagatcatgccactgcactccagcctggatgacagagcaagactccatctcaaaaaagaaaaaaaaaatgtgcatcttagaataaaagcaaacacaatgtcagatctcccttcataacttgcctgtgttttaaccaggtgctcactgcctaaactcagatgcaaggtaactgtggggtttcttttcctgtgctgggacaagccaatgggagatatttggggacagggaagtctctccagggcccctgcaatcacatcaagctggtttttatctctgagtcacagacttaactttcttcccctagttccttcgacatgaaggaggtctcttgattttgagatataaacactgaggcaatgaatgaga

SEQ ID NO: 3256 - DNA, 2488 bp, Homo sapiens
ctgcgaagtggaggcgctgcgagcggagccgcgcggagggcgcgaccggctggtccgggcagcgtgggtttgccgccttcggggctccagtccgcgcgccagggctcgagcagtaccgcgggcccctcaggtgggcctcggctcgggacgccgggagtcgggaccgccagtcggggcgccgggaccatggcgctgcgcgcccgggcgctgtacgacttcaggtcggagaacccaggagagatctcgctgcgagagcacgaggtgctgagcctgtgcagcgagcaggacatcgagggctggctcgagggggtcaacagccgcggcgaccgcggcctcttcccggcctcctatgtgcaggtgatccgcgcccccgagcctggcccggcgggagacggcggcccgggcgccccggcccgctacgccaatgtgccccccgggggcttcgagcccctgcctgtcgcgccccccgcctccttcaagccgccgcctgacgccttccaggcgctgctgcagccacagcaggcgccgcctccgagcaccttccagccgcccggcgcgggcttcccgtacggcgggggcgccctgcagccgtcgcctcagcagctctacggcggctaccaggccagccaaggcagcgatgatgactgggacgacgagtgggacgacagctccacggtggcggacgagccgggcgctctgggcagcggagcatacccggacctcgacggctcgtcttcggcgggtgtgggcgcagccggccgctaccgcctgtccacgcgctccgacctgtccctgggctcccgcggcggctcggtccccccgcagcaccacccgtcggggcccaagagctcggccaccgtgagccgcaacctcaatcgcttctccaccttcgtcaagtccggcggggaggccttcgtgctgggggaggcgtcaggcttcgtgaaggacggggacaagctgtgcgtggtgctggggccctatggccccgagtggcaggagaacccctacccgttccagtgcaccatcgacgaccccaccaagcagaccaagttcaagggcatgaagagctacatctcctacaagctggtgcccacgcacacgcaggtgccggtgcatcggcgctacaagcacttcgactggctgtacgcgcgcctggcggagaagttcccggtcatctccgtgccccacctgcccgagaagcaggccaccggccgcttcgaggaggacttcatctctaagcgcaggaagggcctgatctggtggatgaaccacatggccagccacccagtgctggcgcagtgcgacgtcttccagcacttcctgacgtgccccagcagcaccgacgagaaagcctggaagcagggcaagaggaaggccgagaaggacgagatggtgggcgccaacttcttcctgacccttagcacgccccccgccgctgcccttgacctgcaggaggtggagagcaagatagacggcttcaagtgcttcaccaagaagatggacgacagcgcgctgcagctcaaccacacggccaacgagttcgcgcgcaagcaggtgaccggcttcaaaaaggagtatcagaaggtgggccagtccttccgcggcctcagccaggcctttgagctggaccagcaggccttctcggtgggcctgaaccaggctatcgccttcaccggagatgcctatgacgccattggcgagctcttcgcggagcagcccaggcaggacctggatcccgtcatggacctattagcgctgtatcaggggcatctggctaacttcccggacatcatccacgttcagaaaggttagtccctctaaacatttacccaacttttggtctttatgataatgaagacatctgacctctggttggccattggattgttgaagaggacttcgggagaccaggtagttcactgggtcagttggctcaattcagaggcattcactcattcttgctcttcgtcccaccccagagtgtcctgtaatctgaatgaactctccctctctgatctaagcatttttcgatttgcaattttcatggagataattctaggtttatatgcaattttaagaaatcagacggctagatctcgtgtattcttcacccagtttctcccaatgtaacattttacaaaacattagtataatatcacaaccaggagattgacattactacaatccatccatctttttcagattttcccagctttatttgtactcacgtgtgtgtatgtgtgaaaattgcacagttccataaaatgttatcacctgtataggtttgtgtatccaccaccacagtcaagatactgacagttccaacatcacaaggatcccttattttgcccatttacaaccactcctaccttcctcacccaccccatccctataccctggcaaccattaacaaatatgtcctccagttttgaaatgtcatttcaaaaatgttatataaatggatgcatacagtatgcattcttttgag

SEQ ID NO: 3257 - protein, 539 aa, Homo sapiens
MALRARALYDFRSENPGEISLREHEVLSLCSEQDIEGWLEGVNSRGDRGLFPASYVQVIRAPEPGPAGDGGPGAPARYANVPPGGFEPLPVAPPASFKPPPDAFQALLQPQQAPPPSTFQPPGAGFPYGGGALQPSPQQLYGGYQASQGSDDDWDDEWDDSSTVADEPGALGSGAYPDLDGSSSAGVGAAGRYRLSTRSDLSLGSRGGSVPPQHHPSGPKSSATVSRNLNRFSTFVKSGGEAFVLGEASGFVKDGDKLCVVLGPYGPEWQENPYPFQCTIDDPTKQTKFKGMKSYISYKLVPTHTQVPVHRRYKHFDWLYARLAEKFPVISVPHLPEKQATGRFEEDFISKRRKGLIWWMNHMASHPVLAQCDVFQHFLTCPSSTDEKAWKQGKRKAEKDEMVGANFFLTLSTPPAAALDLQEVESKIDGFKCFTKKMDDSALQLNHTANEFARKQVTGFKKEYQKVGQSFRGLSQAFELDQQAFSVQQAIAFTGDAYDAIGELFAEQPRQDLDPVMDLLALYQGHLANFPDIIHVQKG

SEQ ID NO: 3258 - DNA, 2027 bp, Homo sapiens
cggctggtccgggcagcgtgggtttgccgccttcggggctccagtccgcgcgccagggctcgagcagtaccgcgggcccctcaggtgggcctcggctcgggacgccgggagtcgggaccgccagtcggggcgccgggaccatggcgctgcgcgcccgggcgctgtacgacttcaggtcggagaacccaggagagatctcgctgcgagagcacgaggtgctgagcctgtgcagcgagcaggacatcgagggctggctcgagggggtcaacagccgcggcgaccgcggcctcttcccggcctcctatgtgcaggtgatccgcgcccccgagcctggcccggcgggagacggcggcccgggcgccccggcccgctacgccaatgtgccccccgggggcttcgagcccctgcctgtcgcgccccccgcctccttcaagccgccgcctgacgccttccaggcgctgctgcagccacagcaggcgccgcctccgagcaccttccagccgcccggcgcgggcttcccgtacggcgggggcgccctgcagccgtcgcctcagcagctctacggcggctaccaggccagccaaggcagcgatgatgactgggacgacgagtgggacgacagctccacggtggcggacgagccgggcgctctgggcagcggagcatacccggacctcgacggctcgtcttcggcgggtgtgggcgcagccggccgctaccgcctgtccacgcgctccgacctgtccctgggctcccgcggcggctcggtccccccgcagcaccacccgtcggggcccaagagctcggccaccgtgagccgcaacctcaatcgcttctccaccttcgtcaagtccggcggggaggccttcgtgctgggggaggcgtcaggcttcgtgaaggacggggacaagctgtgcgtggtgctggggccctatggccccgagtggcaggagaacccctacccgttccagtgcaccatcgacgaccccaccaagcagaccaagttcaagggcatgaagagctacatctcctacaagctggtgcccacgcacacgcaggtgccggtgcatcggcgctacaagcacttcgactggctgtacgcgcgcctggcggagaagttcccggtcatctccgtgccccacctgcccgagaagcaggccaccggccgcttcgaggaggacttcatctctaagcgcaggaagggcctgatctggtggatgaaccacatggccagccacccagtgctggcgcagtgcgacgtcttccagcacttcctgacgtgccccagcagcaccgacgagaaagcctggaagcagggcaagaggaaggccgagaaggacgagatggtgggcgccaacttcttcctgacccttagcacgccccccgccgctgcccttgacctgcaggaggtggagagcaagatagacggcttcaagtgcttcaccaagaagatggacgacagcgcgctgcagctcaaccacacggccaacgagttcgcgcgcaagcaggtgaccggcttcaaaaaggagtatcagaaggtgggccagtccttccgcggcctcagccaggcctttgagctggaccagcaggccttctcggtgggcctgaaccaggctatcgccttcaccggagatgcctatgacgccattggcgagctcttcgcggagcagcccaggcaggacctggatcccgtcatggacctattagcgctgtatcaggggcatctggctaacttcccggacatcatccacgttcagaaaggtaaagcctggcccttagagcaggtgatatggagtgtattgtgcaggctgaaaggggcgactttgacagcagtaccactgtgggtttcagaatcatattctacaggtgaggaagcgagcagagacgtggacgcctgggtcttttccctagagtgtaagttggattgctcgacaggcagcttcctcctcgagtatcttgcattagggaatgagtactctttctcgaaggttcaaagagtacctttgatgacagtgctatcattttag

SEQ ID NO: 3259 - protein, 626 aa, Homo sapiens
MALRARALYDFRSENPGEISLREHEVLSLCSEQDIEGWLEGVNSRGDRGLFPASYVQVIRAPEPGPAGDGGPGAPARYANVPPGGFEPLPVAPPASFKPPPDAFQALLQPQQAPPPSTFQPPGAGFPYGGGALQPSPQQLYGGYQASQGSDDDWDDEWDDSSTVADEPGALGSGAYPDLDGSSSAGVGAAGRYRLSTRSDLSLGSRGGSVPPQHHPSGPKSSATVSRNLNRFSTFVKSGGEAFVLGEASGFVKDGDKLCVVLGPYGPEWQENPYPFQCTIDDPTKQTKFKGMKSYISYKLVPTHTQVPVHRRYKHFDWLYARLAEKFPVISVPHLPEKQATGRFEEDFISKRRKGLIWWMNHMASHPVLAQCDVFQHFLTCPSSTDEKAWKQGKRKAEKDEMVGANFFLTLSTPPAAALDLQEVESKIDGFKCFTKKMDDSALQLNHTANEFARKQVTGFKKEYQKVGQSFRGLSQAFELDQQAFSVQQAIAFTGDAYDAIGELFAEQPRQDLDPVMDLLALYQGHLANFPDIIHVQKGKAWPLEQVIWSVLCRLKGATLTAVPLWVSESYSTGEEASRDVDAWVFSLECKLDCSTGSFLLEYLALGNEYSFSKVQRVPLMTVLSF

SEQ ID NO: 3260 - DNA, 454797 bp, Mus musculus
  misc_feature (1)...(454797): n = A, C, G, or T/U
agcggctgcagatggcatccggctgcgggctccgggctcgcaattgattctcgcccttgcccacctcgggtgcacacacgcacctctcccttctcctcctcccctcgcgctcctgggtctgcgctcagctcgcgctcgccgggcggaggaagcagtcgcggcggccgaagctgagcagcagcgctcgctctccctgacctaggaagaagcgcctacccggacagccgacccttggctgcctccagcgccccccaccttttgcaccccaaggcgggggctccggggacccccctctcccaggcgctaccatgctggacccttcgtccagcgaagaggagtcagatgagatcctggaagaggagaggggcaaggatgtgctgggctcggccgcgtctggagcgcgcctgtctcccagccgcaccagcgagggctcggcaggcagcgccgggatggggggcagtggcgccggggccggggtgggcgccggcggcggtgggggtagnnnnnnnnnnnnnnnnnnnnnnnnnnnnnnnnnnnnnnnnnnnnnnnnnnnnnnnnnnnnnnnnnnnnnnnnnnnnnnnnnnnnnnnnnnnnnnnnnnnnnnnnnnnnnnnnnnnnnnnnnnnnnnnngggctgcagcccagcagccgcgccggcggcggccggccttccagccctagcccgtcggtggtgagcgagaaggagaaggaagagttggagaggctgcagaaggaggaggaagagaggaagaagaggctgcagctgtacgtgttcgtgatgcgctgcatcgcctaccccttcaacgccaagcagcccaccgacatggctcggcggcagcagaaggtaggtgcgccgcgaggccggggagcggcgccttattgtcgcccggcaagcgggcggggcgaacaataggaacccgcggcgcagctggctaggaggagctggggaaggtgaagaccgcgccctgggattaggggccccgtcttgccaccgcccagcttgactcgggagatgtccctgggatgtgacaggggcctacggcacagggctgcgcgcacgggcctccctgtggggggagccaggcgggaaagtcccgctcgctctgtgacctaagtggcgcgggaagtgacttgcagctggcagctctcacagaggccttgtctctttcggagctccctgcgctcccgagtggcggcggctgcgttgcgctctggcccgccctccggggcgtgcactaggcgggcgcaggctcctggcaggtcagggcgcgggtgtggagctctagcatcgctggactcttggggcagcgggcagccgcaggggcacgcaggggagaaaaaaaaaaaagccagcccaggaagcgagttttccagtgacttagccaagggcgccccctcccaacctggtcagctgatcgccacctagggtaacctaggggtcgtcctgcagcagcgttttcctcttgccagtagtccctccaatccttttccccttcttcatggatcccagagcaggggcgcgcctagtgggtccctgtgcctggggtcagcacttctctcataccctcctttgaccatcttctcctcccaaggtgacttcgccgccaccttctggcttcgctgaggctctccaagtcctcttgttactggattgataaaagtgcagctgcaaacagcttctcagttatagtcataaaaagctttttgtgtctgaggcagaggcaaggccatgctggctttgagctacttttgatgggggggtggggggtggggcattactatctccaacccgagaaaggacaaaagggaggtgaggtcaccaggggctgagggccagtgaggaggatcagccagaaaggggtcaggagctcagtgggagtgagtgcactcggtttagtctctgggaacaaatgaagcatttaagcttgcatgaggtcagttgaacccgggagtcatgggaggttctagctgtagcccatcaaggttgtgagactatttcttaaaatagtagtttaagaatcgttgctgccatttaaatctaaattttatgttgctcaagtaagatgttggatctttccatatttaccttgcatccttatatcgaggtagaacagattgctctgtttgttttgcttatatgtgtatacacaccacccaaccctgtcagtttattttacctactactgcatggatgccagttttattaagtcaaaaagactcatttcctgagtgagagataaaaggtgggccatactcaccaccctccacccccatccctgcaatacccctttacttttgctttccaactgtggtagggcagaaatattagagattgtcaaattttgataaaaaattttaggttaattgtggctctacatagtcagctgatctaaatttcagcttggaattgtattacttgtctttatactatggtaaattttaccttcaaaatctcatcaaggattaaattagtcaaagatgtcctagacttttgctatgaaaactgactttaatcagaatgaagcaaggctttccattagtcagtcaaaggctttgtagctttgtcctttaaatagatgagtaggtccagtggtgggagaaagaaacaagaaaatactgtaagaatccagttctgttaagttgaaagaccactgtgagaccatgtccctccgatctgactgcatatagtacctcaccccatccagaactcttatttgaagagaaagcctgtttttacatgtgacctttcaacaccagagagactccagcacagactgataactggctttctgtcaatctatttttagacactgtaaaaactattgctaaatatacatcccagcaaaacaaccccaggcctagtggctacagtgagaagaatatatatatatatatatatatatatatatatatatatatatatatatatattgaaaataaagtttccttgttgctctgacttttactgtttggcgcattctggaggaaataacattgttcctcttaaaattcaaacttttgaaactctgaaagtaatggaaaggtttgcatactcattatggtaagatttaaagccaataaataaaattggtaagctaatatcagtctggagcactatatgctccttgtgacctaagagtgagctttggacagactggaaacaagtgtattaaaaaaagacagatgaaaattcatgtagagaaaaggttagaaggatgcagaaggcaaagagagagagagagagagacctgcctatgcaaacaaaccatgagacagcgaaggggtgtactccagagtacagtgcaccttatgaagccagttttctacttcaggtatgtacaatgtgcaaagcactccatttggaccattttatcaaagtccttgctttattatttggacaggttaactaaaacaaacaaacaaacaaacaaaacaacaacaacaaaaccccaggaactataatacacagttcccacatgcagaagtaaatttcctatgatgttaattactcagcagaattatacaagtcaggaatagctgaagtaatacattgccagtaaagtctctagtttttgtctgaattcgttttctgttcttacatcatatctgctttcgttttggtggtaccaggactcaaacccagagtcttagatatgaaaagcaagtggatccagtgcttgaccgggcatcctcagcccctaagatcattttgaattcttctaagaaccctgacataattgccaagatcactctgaaactcaaagaggttgtaatagtttgcctgaagtaaaatgaaggcagacaaaagagtaggcattgagccaacgggtggtctgatactaagtcctgaattctgaataggagacactggccataaatagtctagagtatacaaacagtaggctagcacactgataacatgtcatgcatccttctgtacaaagtgatagttatcctttcctcaagaaagaggcctattccttttcacctgggcacccatcagatagtcaacatggacataaagaacacaaagtaaaagccaggcacaatagctggtgaatctgctgggcacccttctctttctgttccccccaccccactcccttttttaaacattgttcaaactgaaaggaaaaatacatttgttcaggagaacagtgaggggaggcggaggaagaagatgatgtttttttggataatgctgatagttaacactattttattggaaagaaaaaaattcttggcatacagccaatctcttcaatgtaaagaaaagactgtaacagacattttacaaaatatgttttaccatttataaatattttttgtcttctctactgagtctaaatgagacatggtggtactgggtcatttatgacccaaacaaaatctctcccaatgagactcttccaataccagttcagcaactcacatggcaatagctttctgctttttctgtttcctccccagaatgctaaagcaaatacctagagttggcatggcagagctacaccatctgtttctaagttacataggaatggtgatgggtggctacctcatgtgaaccagctacttatagacgcttccacagggaatgtgaaactaggctgtaaacaatcatgtgtaatatttagattgacaggaggacttttagttaggtagccattaatcataattcctggatcatagattctctcatgtagatatttgtgtgcttcctaaatgtatgtatgtgttcttgtgtgaatgctcacataatgatggaaaagaactggcccaaaactatgtctacttcagcacaactatttcattcaagagaactttattcctggatgaaatgtaacttaaattcaaactattcttttctatatgattcagcttgtatctttccatgaaactatggctaccattgaggcactgtttgctacagattccacctttaccatttacttgttttccttgattgatcatattttagaagctatagctttatgaaactcaagatcaagtccctgttaactcttatgctcatcagtcatatgggtgctccattcctagcgttaggcacctaggctgctctactattcaaaaatcttaatctttgctctgccaatgcatattatctgcattttaaaatataaactattctaatgcatcaagacaataagtgactgctgcctgatttccttccaacagaattatgtctttctttatcaagagaataatctgccttttgccccctgctcccaagtctgtctgctgtagtgataaggaacaatttattatacagtgtcctggcataaactacattctgaagatgcagaatagaaaaataatgggaccatcttgcctcattacacatctggaatagccttctgctttcctgcagctggactcaagaatgaaggaaattaaatctttcattcctgaagaatcatattctataaagtaatgaaagtcaaacgactcagagatcttttctctgaaaaagcaaataagtgcagaaccataggctatcacattgacacatgagagtaattgacttggggccaagaagctataaaactgaaggggagttatgaggagagttctcccttagaactaactccaaacaagcaaacagatgctcactacagtaagcaccgagtcaggctgggtggccaaaccaaaagacacaggtaccatcctgttcttgaactggaagaatttatgatttggtttggaagatagcagtcacagaaatcaaataattgagagtaggaaagagattactagagaagatgttggttacgaatgctaaagaggaaaggggtggtgtaatcatatgtgcccagactgaatttatgccgggattgttcattaccaacacataaaatcctttaagcttggaggtggaatgtttccacagtataaaataaggcactttccaaacaatgcacaatgactggagatgaatcaatttatccaactatacctattttcagatgatgtttgaagaagacagactacacaggagattgtaagctttaacttgtaacttggagccaaactacaaagttattttgtctatgaagcatgtgccctgtttttaaattagttctctgctcaagcttttttatgatcaaaaatttcaatttctaacttttcatctggttaatttcatggaaatattaggacagagtttttgcgtatttgtaaaaatcaataaaaagaagactcaactgccattgcttaaacaatagaatgcacatcacttttaacctaattgtatttgttccaagaaggaaatgatatatgtctaaatggtataatagcagcactgtgggccttgccaaatccttttcttctttatgttccttaccagatcctgactgtctgaccctagcccctgggaagcattcctgggagagaatctgacatttggaacactgtgttccctgtttctggctacagttcttgttttcttgttagaatgagattcatcatttctgcagaattagaggcttgatggtcagcactacctcattaaatttttattggtcaatccaagcctataatagaattacttttctgttcttatcagataacaaaggagggagacagttggtgattagagtctggtcattactatttgagtcttgatgaacagtaaagacagcagctaagagcttagactttgatgtttgggattatttcctgcttgtttcagctagttatagactctgtgatcttgtgcaatttatttactctatcagagattcagtgtatatatcagcaaaatagagggcagcagttgtcctgtcatcttcgggttattatgaaaagtaagaaaagtagtgaaaaagtagtgaagctcttagaacagccatctgacagttggtaagtgtaaaataagcattggttcttgcattggcaatgtttatacatacacacaaacatgtattcatacatgtgttcatatacatacatatatacatacatatatgacattatgttatttttatctgaaaggctggtgagaactaatatatgtgaagtactgtcatattagtggaatgtatttctagtttctagcatcagcaacataagcagatctagaaaatcaggtggttgtcattacagcatcttctacagactagatggagccaagcaagcaatagatctctgtcttcctttttgctcagatgcttcaataattttattcaacaaaggatcagtttatccagcttttaaaaatgtctttgaacatgcaattttttcatgactaacaccacacacacattaatggaaagacttgctaaatgcttaacagaggactctgatagagccttgagctacccaggtggtttatggtgggactcttaagagtttcttcttcttcttcttcttcttcttcttcttcttcttcttcttcttcttcttcttcttcttcttcttcttcttcttcttcttcttcttcttcttcttcttcttcttttcttcctcttcctcttcttcttcttgtcatctttcttctcccaccttctgctctccgtcacagaacaggatactttgtttcttcgaacctggatattttcaccttgatacaatagctcttttacaaatgttggtttaactttgtaggatgaaagtgttgccagtactaatgagaagtgcattaggtttgtataaagtatagattctcatccttgtatgacttatagttttacacacacacacacacacacacacacacacacacacgacttacaagaacagtcagcatacaacagacccaatagtgaagtacctcacctccacatacttttatttcactgtttaaatttctgctcagccttgtgagctggtagctatatgacctaagttacttttcatgacactgtgaccaaataaatatcttctatttgattgaggaatgatagagaaggtacacttcaagcttgtgtgctgttcagtggtacaggatagtcatagtagagtccgtggtggcttgagtctttggcagtgggagcatgagactgcttgctggcatcttggccagtcaagagccaagacttggccaaaaccaggccaggattatgacccataaggctccctatagcccaacatcatcctaaaggatccagagcccactgaaatagcatcatcattcaggaaactacatttccaacatatgaacctgagaaagatccttcacattcaaattctaacaggtagattccccatccccttcttgttttgtgaaatggagaaacatcatcaagaactgtaaaagagaagcatgttaaatgcttaacaagttttttgtgtgtgtttttttttcaattttttattagatattttctttatttacatttcaaatgttatcccaaaagtcccctataccctccccccccccccaccgccctgctcccttacccaccaactcccacttcttggccctggcattcccctgtactggggcatataaagtttgctagaccaaggggcctctcttcccattgatggccgactaggccatcttctgctacatatgcagctagagacacgagctctgggggtactgattagttcatattgcttaacaagttttttttttttttacagagggtccatattggagaacttttcacagtagcagtcataatagcattcatgcatatatgttcccccaaggtcaccaccctgtttcttactgttgtaacctttgctggaactgctgcttactatagattgtctcttccctctttcttctctgattcactcttatctctcttttaatttactctagtgtcagctcctttaggaaaccttcccaagcccttacactgggccagttcgcacacagctctgcgatctgagtccattctacctcctgtgcacagtacttacatcagtttttgtatgccactctccttcccaggcaaagccatttcactttttctcagtccttcacccaccaaacaatagaacagagtaggttcttagaaaatgttgaaagtccacagtgacagtccgcagttaaggattctggattgtagcctgggacacacaatttctttacttttatgaaagggttaaccagttactaaaggatttcaagataattatcagagaaacacactatcagttacctccacacttgctttgtttatactgagagctgacaactatgtgggtcctttgtgaagaaaagtcttttaaaaccatatgacaattatgaatttcttacaacagctgaatctagttgaacatgaatcatcattatgtatgtttaaatggccagacaggaagcttgcaagcgagtgtgtctggataggatatagattctgtgatgggatgtgtccaacttgccacctctggaaacaggaagaggaaacaacactataggactgtatagaggttgccaaagttttgggatctgtaaattctgcatgttttagcatatatgctgctaaagcaagcacaattctgtatgttttgcataggtaaatatacctcttttctctacatttagaagacttcagcattattttctctgttcttttaacataagtaagttgtctctcccagatttggttgaatttgaataagtaataactataggactcttgcacattagtatagtaataagaatgttattggtatgaaatatctataaagtgatttaattatttctgggtatggccttttctaatatctctcttgatcaaaggaaaaaatagtgttttcagttttatcattttctttttaacagctgtaagaaaggtctgaaaatttattttaatgataaagtccacagatatatgaatctgccaactgtaatcctgaaattgagagatggctgtatactggttagctttcattgtctagagtcaaatgggaaggggggacttccgttgttctctttgtgcatctctgtgtgacattatcttgactgccaattgatacaggagagcccaacccactatggttctgactgtataggaaaagtagctgagcataagctagggagcaagccttagtaagatcactgctctgttgtctgttccagtttccacctccgggttcctgccttgtcttcccttggttgtgagctataagctaatgttagccttttcctcccatggttgcttttgaggagactgtttcatcatggcaacagaaagcaaactagaacagggagtaaaatgattgtgtgtgtgtgtgtgtgtgtgtgtgtgtgtgtgtgtgttgtgcgcgctcggcgctcgtgcacatgtgcacctgcagtgcttctagtgtggaatacacataagtttgtgggtatttatacccagaagcctagatatgcacattcagaggctgtagaaggacattatttctacctcatgtccttgagatagtgtctctcactaaagtggatgcccactgcttcaactaggatggctactgggggttgtggggtagagatttatctgtctccactccccaccatgctgctggcaccaataattcccctggctttttacatgggttctcatgtttacagagtaaacactcatacccactgagccatcgtccagcagcctatgaaaaggatgcactttttaaagatgtcccaggagcacatgctaagttgcaaacccacccagggggtgtaacacttccaaaaagacaatggggttttggcaaaagcagagagtggctcaggcaattgactgtgccacttcagaaggcaaaaggaaaacagtgaaaattctcgcaaataatcatgccttctgttgcccatatagagaaacagcttttgggtgtggatggtaggcatggcgttgtttaagcaaatttgaagtgtaacttgaacatctactttggcgatctttctgacaagtgtagcaactgttgtctataaggcagtgtgtcataacatactgtgtttagaacatttcctgggggctcttccatattcaatttttgtttgttagacatcatcagacaatgttatacattgttttgagccacttctaaaaataagaaactcactgggttctgtaggcaaaacacccaaagccattttagacagcccctcacctcctgtatctactgatctgcctaagaaatttaggtgtacccatatagtaaaactagtgtaggcaagatgaggtgagtttattttattagtgtgtgtgtgtgtgtgtgcttgtgtgtatgtgtgtgcccgtgtacacatataaagactactgtggcacacgtgatgaagttagaaggtagcaatcaggggttcatactttccttccacagtgggttcctgggattgaacccctgttaacgtgcttgagtgccgagcacttttatccacaaccattccatcagccatgattttaaatgttggtcttttctccaggtccccgttcttggcctttcttgggggtgattatgtcccttacaaaatttatatagaagagcactaatctcagaacctcataatgagactttaatgaaaataacacatttgaagatgagtctctcctaattcattataactgacatccttatagagcaggatcatttggactctgagacatgcacactgagaaaatactcatagaagtggaaggcagagactagaacgatgcttctacaagcaatgaccaggacagattgtcctagaaatccagaagctagagagaggctcagaacagattccttctcccatttctgatgagccacctctactaccaccatggcccctgttctgaagacaggtttatgcttcattaaagtcctaattaatacaatcctctcctgagctatgtctcatctatagcagcatcagtactaacagtagccacccacatcacaacatttccagttctcatacctttgtctccagaacaaagcttttcccattctgacagtactgggtgtccagatgtttgcatcaacactgctcaaggtgtggctgcacactgtcgggagccagtgattggcttcttgtgacttatagtgaggctaggaacttggatcagaatgcaaattatcctacactctttcttttggtagaaggaggattgtcagtcaatttgagcaatgtattcagtcatgaggctaatgtatttggagtataaaacctttatcttgaccacagcccactgaagtcacaggtctacaaactatgtatagtcattacccttagatgtccttaaaccactcaacagtaactgtattttctcacccagatcctttgcttctgcgttttctgctcaatgagacccagctgtacattcatatatctaagctgtccaaggcagaaatgtgcatcccagctttacatctttaccagtgttcatcctcaccaccatgcacagtctattgattctgccttattaaattactcattgccttatcctctctcggactttcatagctcatggacctgctttggaccctcaagcttgaatgcatgcatggttgcatgaatcttctgccttctttttgctctgatgaaataaatctgaaaaaaaaaaagcaacttaaaggagaaagaatctattttgactcacgatttgaggtcacaaccatgatttccatgaggccataatggcaggggcctggggaagctggtcacatttcagtcaatgtcaagaggcagagaactggagaatgatgaatgccagttgtcttaggatttcattgctatgaagacacaccatggccatggcaactcttataaagtaaaacatttaattgggatgtttgcatacagttcagaggtttagttcattattaccatggtgggaggcatggcagcatccaagtagacatgatgctatagaagaagcatagagttctacatctggatcagccagcagcaggaagagaaaaatgacactggacctggcttgagcctctgaaacctcaaaatctgccgcagtgacacacttcctccaaaaagaccacacctattccaacaaagggacatgtaataatgctactccctttgagctatagaggccattttcattcaaaccaccacactggtgctcagctaggtatctccctttgctgcatcccaagatccaagcccagagtactgccttactccttcagggtaggtctttgtactttaattaatctaagcaacataaccactcacaagcatttgaaggccaatccaatctaaacagtccctcactgctgtgctccaaggcttgccttctaagtgattctagatactgactgtgaaactgacagttaattttagcatcacaccttctgacagtcctctggcctcctttcttgtctataaccctcccagcaaccagagagatctttctgaagcaaattcagacttagctagaatttttctgtagcttgctattgtatataaagactaaagcccgaagttacatacatgacgtcactccattcccatcaatcctcagctcttacagtttctgtgcatgtcagttcggcattggcccattagtctctggccatccctgaaccatccatatgttcttagccctcaaggttcttggtactcctgagtgaaaccccaccagcactatcactcctctcaggagatgatgacattcagttactacaaagaacagaagggaatctggtgtgaaggtctctggtgtgtagcctgtatagtccttgttctgtatatttgcaagccttttataattttaactgcacaaggtagtgatcagttatcttaaccttgcagagatgaggaaccaaagtagttaataaacccacctgggtcacacatttggtagacagaagagctgtgttgtaacgaaagcactataactccagtctctacatgtcactctgtttctattaacaatattagatcattgggtccatcacagctcagttttccatctttataaaatacatatatttgcagaaatcactgatttactgtgtttcagtagtaactgacagtccctacacagaacgagtgttaaacaaacaggcaatgcatgtgttcatgattgtttatggggtggccatatttatagtctatctactcatatctcattcactaaaacaaccccttgagtagacaggccatgtattagaaatccctgtttagtcaggaataaaagcatgacccagggagtccctcctggttggaaagaacttcagaggactgaagtaaacttcctgcatgaatctaggtcttcctcctctgagctgttggtcccagactcatactgatagtgccctggtcactgtagccttggaaggtcacctacttcataacagatacattaaactgtaccttagattccatgtctaactcttttgttttaaaaacttgtaatgtattgttcctcaaactagctgtataaaatggttaatgagtcatttcccaggaattaggttttgttttgtttgtttttgttttacaggaaccttgtaaatggaaacaatgtctccaatgatttggaattatgaaaatattttatgaggactaaattttaaaatgaagatgacatgtttttaggatgcagttgggggcttattgcaattgtattgtattaaataaatgtgttttatttgtgttcccagactttgtcctaattcagtatctaaaaatttcctctagccaccatataaatagtcttttgcaagattttgtgaagagagtactatgtgtttatttttattgtttttattttattttatgtatatgggttttggtctttcattgtagttagttaattagttacttagttaggtgtttttgtttgttttttgtttgtttgtttgtttttgtctgcatgcatgtatgtgtaccacatacatgcctagtgcttgagaaggtcagaaaaaggagtcagattttctggaagtatagttacagacacctgtgaactgccatgtaggatctgggaatcgaacctgggtcctctgaaagagatacagtgctcataaccgttcaaccatctctccagccccaaaggtactatccagattaatgctgactaataatgtccaaaggtcagaccatagtagtaggctctatttgaagggataaaagaggctttcagctgttcagggcctaaaacctacacagaaattctgaagacccctgagacgacagacattgtatacaatcctaacattagaaaggaaaagatgtttgcagataggggttcctcaatgtcagtccatggaggggtgggcattcacctgaagactagggaagccttaggacattgagctgagcagtagtctgaccagtagaatgttttaatcagatcaacctcttttgttaacataggttcagatgttatatatatgcatacagatgtgcatccatatgtgtgcatgtatacagaaaggtcaaaggtcaacatgggcatcttccttgagtactttccacctgattcattgtgacaggcttgctcagtacacctggggttcatagactccataggcagctggacaataagctgtaagaatccctctgtctctgaccccagtactagggtcagagatgcagtgcctggttttgaggtaggcactggggacttaaattcaagtcctcttgtttatgcagcaggcactttaggacttgtatatgactggcacaccttcccaaaccgagcagactgtgtagagaaaagacaaaagaggaatacaaatggcttcacatggaaagaaaaggtcctaagttaggtttgagtatgatgctcagcactttattgttttgtgggaaggtctgtaggaagcctcatgacattctcccctgtgtgtagaaacggtagttctagagcactttctcagagctgtggctgctccttggctttactttaccatattagcttttctttgttggtcatcctgtgtgggatgtgaatgatgcttttctgcaaagctgactaatgactaattctgcaatggaattcacaggcactttggggacaggatacattcacttccacatttgtcactgctccccaagtagaaggagccaggtgttagtaggaagattccaggaaagctctttgggcacttgctgacattaagaactaagcatccacgtctgtgtttgccaggccccagcatagcctcacaagagacagctatctcagggtcctttcagcaaactcttgctggtgtatgcaatggtgtcagcctttggaggctgattatgggatggatccccaggtatggcagtctctagctcacagtcagctattggatgggtcacatggcccccaatggaggagctagagaaagtacccaaggagctaaaggggtctgcaaccctataggtggaacaacaatatgaactaaccagtacccccagagctcgtgtctctagctgcatatgtatcagaagatggcctagtcggccatcattgggaagagaggccccttggtcttgcaaactttatatgccccagtacaggggaatgccagggccaagaagtgggagtgggtgggtaggggaatgtgtgtggggggggagggtctgggggacttttgggatagcatttgaaatgtaaatgaagaaaatacctaattaaaaaataaattaaaaaaaaaagaaataagcatcatatttccactcatctgtctcttttcccacatcctttgtaccgtcacctttcttatctcttatgttcttggtggctataacgtgtgcacctaagtagaagggttaagaaaggaatgacccagtaccagcccaggcttccaaagttccaacataatacttttgttttccattattagacatggttaagcttgacactcgttttaactaatcagaggcatgtcttcctgtccccagcagcannnnnnnnnnnnnnnnnnnnagcttttcactcagtcaatatttgattaggatttgagtccgaagcctttgttgggctttagagaaagcatcacttggattttacacatactttcagctgttagagtaaggaaactaatctatcattttcccccaaagaaacacatggctgatgcagcctaatctaaatattatgtgaagtgtttctttccttatgaattgacaagaaataaacagaaagggatcagggtcactgaaaaggaaaccaaagtggccttcaaatacactgtggggagttctgaggctctttgctaccacaaggaagagctctgtgtatttctactttgtgttttcatctgcagacttctagggaaggcttcctaattactatccattttctaatcggtaacttttggtttcctgcagttattattcaacgttatatttgttattgagtatggttttatgacctatacttttacaacagcaacaacaacaaaaacataacaccaacaacaattttttacaatatagcaacatagatatctagagaatttgacaattttgcttgacttgattcttgacaaattaacttgcttctctgaaaatcatattcctcctggcaacagtgatgtgaggagacatttgcattaatgtgaattagagtttacaattgttctgtaaccccaaacctacatcagcaggacataccataatacagtgaataaatcatatgaagcaatgtggataatttaaaattttagttaacacagtcagtcagcatagacagccctttaaaatgatgcaatgaacacactagttgtactttgaagtagtattatatccaatttattctaaagtaatattatatgttataagcattttgcttattaaaagaagaaaaatcttatcaaaccattgaatagaaaatgaaagttgattttccttctaattaacttcatagcaaatcatgttataagtgtatcataatagaaacaaaatacatgctttgcttcccgtccccagtgctgagatcatgagcacacatgagttatgtggtgacaggggtgaaccaaggcttctgtgactgatgaaccaacacactatcaactctacatctccagcaccagaaagggtgttttattggtggaaactctactttccttctgtaattgtttgagattttatataatgaaaaaacttctcaacctaaagactataaaactacacaagatttttctattttattgttaatttttcatctttgcattggagacttatctgacatttgcattgtaactgataggaacttcactactaacagatgtccacacctgctgtatagggacagcagtgaaatctttgtgactgtgtccaataatgattagctttcatttcagataggtggcagggagaggtgagatgttctggggagcaacttggttttaaaaggtttgaagaaggcatgagagagatgattaaaagtttgaggccagcctgggctgtctagggaaagtctgtctataaataaataaataaataaataaataaataaataaaactaaaatgtaaaaaaaaaacctcaacctagtcagaattattttgttttatgaagagtcaaattgtctctggttgagtactccatgctggctggtctgagtgcttctgggggattctcttgttctcctcctccaccatgctggtgtgcatgtgggtaccacctcgtcttgatttttaagtagcttctgggaatagagcccttggatttaaggctagtgcagtaagacgttttgctcactggtccttgtcctcctcactcaaccttctctcctttttttttttttttttttttttttttttgagacagggtttctctgtatagccctggctgtcctggaactcactttgtagactaggctggcctcgaactcagaaatccacctgcctttgtctcccaagtgctggaattaaaggtgtgtgccaccaccacctggcaaccctctcattttaattaagactgatgtccttatgacatcatgtccctctatccagaaatctttgtgttattctaagttgttgatgtaccttattttgcttttgcaattttaaaatctttaatgttactattaagtgtgctctcaagtgaaatgcaatatttgttagactattccctcttaaaaaactgactggcttaattaaaactctctgttccttcctcaaaacatggaatttgaggattgatggctgccccaatccatctggacacttgcacctccttcagctagatatatgcttagaataattggacttcccaggcctgtttaagctagcttttgttattgtaatgtaacacactaattacaattctataattcaatcaaatatggtataatctaatgacatgattgagaaaacaaagtctttctttgcattaacctactcaactaatttgatcacattgagaatgctattaaattgtagctgacaaaaccacagtggaattagggcacaaatagtcagattgtttggccatgtcaacattggaggggcagagataggaagtacagatttccacagttaccccagtggactggggaattctccaagacttagaaagctctactctggccacattgggatttgtggctttggtactgtaaagaatttcagagcagctaacataaccagagttggtatttaatgaagatgtttcaatatagttttaagcacaggagtaagagaaagaggggcgatcaaagtggaaacgtaagggttctttggaaagtcagttggggcaaatacatgaaggaatgtttccctgaagcagtcacaagagagaggatgttctgctaaagcaagcgtgtgaaaggacatatggtgaagaattatttgctaagaaaatgcatgtattggtctgccttacattgcacagttgaactgcatttgtgaggattctatagagagaaatgaccaaaaatgtctggtgtgctgcagtttcttgccacttctgtggacttgggctgattgatggagctatgtcagctgagacaaacacacatgctgtggtaaggcatgtgctgagtcaagacaggagctgagcaagaccagtggaaggcacgtgatgtttggagggtataaatagaacatgacagtgaaagaggctgagctaggcttgctcatagaactagctgtgcaatgcttgtgagtcttacatcttcactgattttcacttctctgagagagcacagcctagaacttttcatggggctcctcctggtccctcctgctgactgagcatgctgaggttgaggcctgactgtctgctaagtagtgccaccactgctgagtcacgtttgctatcctgactttaccaaactggactgctggtctatctgtgaagtgtttgcaagtggattgagttgcccttgtagacctatgaactgaactgctgatttccatacaacacagaatagacttgctccaaagaacctttctaaacaggttcacttcccccgtatcctttctccccactacctctggtaggtggtgggcttaaaggggggttaaagtgcttaagagccaacattaaaaataaggattggaaaattaaagttatgggtgactagaagaaaaaaccaaggtaggaacataagaatgggcttctctctgaagcatcctggaagtgagaaatatccaagtgagggaccaggctcatttaaaaacaaacaaaacaaaacaaaacaaaacaaaacaaaacaaaaacccagccaagtaaaaaacacagtagtcttagagaagattttgactaggtttgaagtttttatcatcaaaatgagggaactggagaggtggttcagtggtaaagaacactgattgttcttgcagagaggatcagttttcagaacccacgtggcagtttttaactatcaggcaaaacacacacaccacaccacacacacacacacacacacacacacacacacacacacacacacacacacacacttcttaaatttaaattcaatgctcttatttgagattctcagacttatttgaggaaaagaatgagcccaacacagggtcattccttaagctggggtcattgttacatcccacagaatctctccctacaaaggttccgttaaccctctgtcagcctctacataggcttgtgcaacaaatgttaattatgccagagttcttgctctcagctggtaaaaggctctggtctaaacaggttaggggtcccattgccgtcccttgtctctataacttccctgtcttttaaccctgttcctggacatattagctctttaaaggcttaggttttctcttctgctttaggagtgataactggaaattgttgaccatctaccaaagttatgttttaaaaggatgtgtgtgagcgagaaagcccatccataatagcaaacctgacaacagaagctgaaaagggaataatcgtaaattgtgaatgaaattaggtgcttgtcacttttgtgatatacatgtgtaactaaattttacaaagctaactttaaaaatgtcccacgattgctctagacaagaagaatgtcaccatatgtttatgcttctgttagtacagacaaaacagaaattaaatatacatatatatatatatatatatatatatatatatatatatatatatacaactctaagaagttttaatcaatacttagtgttttgggaaaaatcacttacagcaaattaaataataaattgcttatgtttactgttttaccccgattttgttggttagcaactctctttagaattaattatggcagggagcacagtgaataaatgtataaaaaattaaatcaggacaattttacatagttatagcttagaagttgttaaaaactaattggaaaatatgtctagtaaaaattgaggatcctccaagaaaggagaattggatttctgttctgacatctaaataactcctcctggctggccagatggctccacagtaaccgcactggctgccaagcatgctgacctgagtttgcttcccagaacttacatgggaggggagaaccgactctcaaaagcccttccctaacttccacatacatgcaacagaaagcagcacccatcctccacaaaaatcaataaatttcaaaaaaaaaagaaagtatattggataaacatttctctatttgcatttttgaaatgaaaataataatatgagacatccaatttctgaaaaaaatccaacacctaatatccttaactccacttaaattgcattatttgcctcttcaaggaagactttgtgcacaaaggggatgcttcagaccctgtacaaaagctacgtatctcaatagagaaggaaacaaggaaatcagaattctatatttttataactatgtaatcccagccaacaagatatgtaatcctttgtaatttgggcttttctcaatatttggtggtatttttcatctatactcacatccacacaggaaaggaacatataaacccccatatgctactaatattcttctctttggtctccatactccttggcagtggaggatatccaactcagcaggcattttccatcatcttctttatcattaataagagtgctctctcaagtcagtcattggaggatcatgcctttaatcccagcatttgggaggcagatctctgagttcaaggctagtctggtctagtaagttccagtaagtaagtatagtcaaggctatacagagaaacccaatcttgacaaaaaaaaccccacagttttctctgtctcaggtatggtgtagatcttaaaattatactctagtattagaaactcatagtaaaactcaccacactgaaagtgctggatgtccctgtcatcacatatattggatgctgactgtgacctttgtaagacaaacctggaaagcaaagtacttttataagcctgtggtttgaacagggacttcagtaattttgttctattcatttctatcaaacagattcattatcacctaacttgggatgggttaaacttgtgggttggaattgttgacattcaaatagttttacaactttccaattagacagctcaatgttatcattcatgatgcattaacattcaaatgaccttaaaaatggttagctgcatcctgagagggtcatcagcatcatgtagagtacaaactaacaccaagaggcaacaactcaacctttgtttttaattgtattatctggcatatgtagattacagcatacgtatctataatctacctatatttacaaatgtccttaaacaacaacaacgaaaatggagtctccctgcaactcatgccaaattagcccaggctggctcaaagtcatgatgctcctggctctgcctctgtagtgtgtgctaagcccaactgacctgaacatccttattctagaggagggagtctaagtactaagagcagtgcactttgggcatattcttcagtaaacctcatagagttatattctgttattaggcagtcagttctcttaaaaaacaagttgcagacagagataacagaagtagccatcataccaatgatctttctgtgtttgggctcttctctcaggaatctatccttgaagcaaagttgagcagatgggattttgtaactgcaagtaaagagacaggaacacagagtggaaaaaaagtcactggagtcagagcaagagggttggaatgccagaaggagccgtgttcacccaagagggagcagcatgaacatggtaaagagagtgacagaaaggacttgaaagtcatcaaatgtattaacactggtaaatgtataatattgaagaaaagtccccatgccacaaggacatttggtaagatgactgaaaagcttccttaccaaaatcagaggagacatctctgcttgcttatttatttatttatttatttatttatttatttatttatttgactttccttatgctatacttcatagggcatatgacatgacttagaagaagcattgacacaatttggatatctcccctttggaccttctaacaaatcagtgatgctaggcaacagagatacataccagcatcccatccagataaaatccccatactctgtgtcttctggtagtgatgctaggcaacagagatgtacattagcatcccatcaagataaaatccccacactctgtttcttctggtggagtgtaacacatggcttacttagtggacttgccaagaattggatctgactctagacactcatccagacatactcaagtatggaaaataaagtgggggggggatgagcacaccaaataccaaatgaagatagagttaggaaaagttcaaccatgggactttctttaaaatgcctggtctctttaacaatggcaacaaaaggagagactaatacatgacatagtgcccagttacatttttaaacagatttactttatttttaatcatgcagatatgtatttatatgaaggtacatgcccatgtgtgcaggtgcctgcagaggtcagaagagggcgttgtatcctctgaacacaagtgctggaaaccatttaattgtggaattgtttttattgtttgtttgccatcaataaagtctaagactgagtggggaagtggggtgaatctctaaaacaggaagatcacataaagggctgggagattaaagtgcttgctgcacaagcgtgaaaacctgagttcaagccccagcatccatataaaatctgtattgtagtgaggatctgtaatcctggcactggggagacagagacaagaaagatgaagctctgtgtgggttactggccagctggtctaaccaactcagagaagagctccaggttcagggagagatccagtatcaaaacataaggcagaaagtgatgattaacccctggttttcatacgcatgtgcacccatatggatttggacccccccccccaacacatgtacatacatataacatgtattggctagttttatgtcaacttaacataataagctaatgtcattggagaggagggagcctcaggaatatgactccataagatcagtttgtcatggcattttcttaatttatgattgatatgggagggcctagcccattgtgggtggagccatccctaggctagtggttctgagttctataagaatgcagactgaagaccgggcagtggtggtgcatgcctgtaatcccagcacttgggaggcagaggcaggtggatttctgagttcaaggccagcctggtctacagagtgaggtccaggacagccagaatggcacagagaaaccctgtcaaaaaaaaaaatgcagactgagcagaccatgagcaagccagtaagtaccagtcctctatagcctctgcatcagctcctgtctctaagtttgctgagaactcctgccctgcttgagttcctgtccagacttccttcaagattaacagtaatatggaagtgtcagtcaaataaatacattcctccccaaattactttggtcatgattttcatcatagcaacaacaacaaaaaaatcctaactaagatacaacacatagcctccaacactcaaaaagaacaggcaagacctattcctaatatttctgtgttactaccatcagagaattcagggaagagatgaaattaaaacttgggcagtcaattataaggcaaacaagcataatcaagagttacaagcagcttatcaaggaaaagttagtatttttggaatgctggaaagagtttcacttgcagacattaatcaaagagaggatgattaatgagttatgctggagagccccacatgagttaggacttttccgaaatagggcacactcaccttttgttcctttacggggttttccaggtgtgtaatggtgtcagatgtatgatgagagcaagcacttttacaaggctaatgtttagatgccattatactgcagcagcagacagtgagcagtcagtatagttggccatcgaggtacctgactttgggtggtctcatgtccttctgttgagtgatctcatgttgtcctgttcaaagctcacctccacacatcagccttttgccattgtacaactggttttcttctccctgtgcctgtaaccttctctccacaaaataaaaaatgcagagtgctgagaatcctctgtaaagacataaatgctttacactactgaggcgtctcttcacactactattagtattacttttgaatttattatgaaccagttatatttctggagatgcaaatatgaggcactagaaggaggatgtagcccagtatgtgtgtgcaaacacctgggtttgggcccagcattgtaacaagaacaagacaaaaaaaaaaaaaaagtgaggtagtatcttagttacttttaaattgcagttataaaacagtatggccaagcatacttacaaaagcatttaatgtaggggttacacatccagaggactaatattcatgactatcatggcagacacatagaggcaggcaggcaggcaggcaggcaggcagacacatgcaggcaggcaggcaggcaggcatggcacagcactagagcagtcatggagagtttctactcttatctgtaagcacaaggcagagagagctacatcggaatgggttgggctctagaacctctaaagcccactcacagtgacatacctctgtccaataaggcataccttgtccagcaagaccacagctcacaattgcagtaaaaactattacaaatcccagcctcgagcttcttccccaccttagaccatttatattcccagatgaaaaacacacagcctttatatttttaaatatgtcttaggcagcataatagctgggcagctgcgtaccctccatggttttagcatctacttcctaccagtaacccaagttatcacttattatttactatgtcctatctggactgctcttaacccaattgggcagccctctatgccatgttctcttggcccttagcccatgacagctctccttctccgtcctgtgtgttcttcttccattatggcttctttcttcttcatccctcctgctggtcccctctctcccaagtgcacgactatgtctttttctgcccagatactggccattggcatctttatttacctctcagaattaacttggcaagcttccaggatctatgtgcagattctaggtcttgagggcccacacttagcatcacaatagacagtaaaagacaaaacttcaacaccaatccttcccaagcaattgccacagctagtgaccaagtattaaatatatgagtatatgaaggtcgttttcattcaaaccatcacagatagtcaatatagaaatcagagctatttttttcttcatggccatgagtccttagtaactttgcttctgtgttcttagtcataaataaagggtaaggaatatcattttaggtttaatattgattgctaacactagttatttgaaattgctggaatgattatagcatttaggtaattaattccttttagttcacaaggactcaattgtcttctaaggaagattattcttaacagaaatacctgttaatgtcttcccagcacaggaaaacattgggcgataattttccagtagaatatagatgaaaaagtcttttcatttaccgtagcttgatactgtcactaaacctgatgatgagctgtcatttttatttcaagcatatttgtcatgggctttaaaagtagcatgttcgctactctacaggaagaagcgccctctccgtcagcagtctgggcttgggcttcagaaccttggttcatcagcacagacacgagtgtgaggaaagtggcaaagttgctgagttgtcctagcactggctgtgtgtctagagtatggtgggggttgtatcctagtcagagagtgagggccctggtgtccaactcctgaatctattccttgtgattgaccttgacaaagacaagttcagtttcctcccttagaaaataaggcaaacatctgccttgacagatttcttttgagaaatgtgttaaattagaaaacctaagcatttcactatcatattactagacctatcactgacgtgtaatggaaaccacataattattattgctaatatgattaaatgaataattgaagtgatcatgtgggaaaccaagcacacagtcttgctgaaaaattaaaaacaggaatatcttgacaagcttcacaatagactaagagaagaaaatcttcactccaaaatgattagggcagactttgaaaaagagcccttcaggtttttgcttgtttgttttcgagacagggtttctctctgtagccctgtctgtcctggaactcactctgtagaccaggctggcctcgaactcagaaatctgcctgcctctgcctcccgagtgctgggattaacggcgtgcgccacctgcccggctgccctccagattttgatcacttactacctgcatgattttgagaaactacctaccttcttagtatatcagttacctcatctggaaaaacagatgatggttcttacaagatcccagtaagaacatcttctcacactctttgactaatgtgctagtccttcatgtttttgcccaggatgcatgtaagcgaggtatgctgtggcccatgatgaatgagaggtcagatagactcttttctctataagctatcgcaaacatcaaagtttatttcaaataggagcatttacttctttgaaatagcttacgtattttctaatgtttggctttaatctgaggccatataatctgtttttggactgacgtctaaaagtgaaagttcaaggacaacactctcagtaaggtaatgattgtttcggttaacggaaatgatctctttgtttctcaaccctcatttgtaagagaggagaaccatggggataaaatgcatcagtatatttgggaaaggaaattgtagtcagcagacaggattccaaagcaccttctccctgaagtccctatgggacaaaaggaacttagccactgcacagggcttgcccttgcctgtccttgggaggacctgttctgtacctggccccatgtcacagaggagtactgggagagtgcctcaagatgatgcttgtgcaaaacactcaaacagcatgcgaatgtgccttgtgccatgccctccatgccacctggaggagaagacagtgagaaccatgtctgctgagtcccctttcatttgtgctcgtttttctcctaagacttttcatgcctaatggatttagaggatactcagaggatgtgcatgctggtggtaagaactgagaaagaggagacatgaatttgaaaatcttctttgcttcctggagattgagaacggactaaatgctctaaagtgagtgtgttttgaggtaaatgtgtataaggcactgagatgccgggcaggatacacatggagctcaagggactgactctattctgactccccacctgggtaaatgtaacagaaaggttgagctgtaatcaagataactagatacacacttagaaatcaacatagaatctaaagggatttctctcagtaccttaaataattgtcagcttttaatttaaaattagtatttcctatgagccagtcatgctgttcaggatattaagtattgatactatagtatgaaattattttcataaaaagccttagttttggtttaccaaccaacaccagcaagcttggatatttaactacattatatatttgccatttgtgttatgaaagggtgcactcttccatatgcaaagcatacagaagtgcatgcacacacacacacacacacacacacacacacactcatacactgtaaatacactctgaggggaaaagattactctgtcttccaggaaagtcctaaaaatagacatttttagaagatttagaaaaggctgattttcatttgtgtgattttgagtcaggacatgacttgcatgttaggttgtgcattgcaaagttgaattgtcttcttgttattaaatattgaggaaatgactttttaaagctgttttgactcattggccttaacagcatgtaacaatattacattgaatgtgtgtgtcctacccacaaagaactaatgtttcatagacaatttcattttctacccccaaatccatatgaatttgaaataaggggtagctgttatccccgtggaagtgaacaggaaactcgagactctgagaggttaactaagaactccgaggcctgtgctctacactaatcgcaattgtgcgagagtaattagttttctgtagcttgtgaaggttccatgtgagttatctaatttaatctttattagaagcctattctggattcactcaccgtgtcatactcaataatccaatatagtgtggcccacagtgagctcatcagccccgcttgtccctctaaactcatgctctgctcctcctactcatctcagttgatgccatcacaggcatgtcatcacccaggctggaaaccttggtggctatggttaaccatgtttccctctcgatcactagtctccacgacttcatgaatatttgtcatctgtctctataatcctttaaatatagtcatgccattgaaaagagccagttaaatataataatctccttatgtgtgttttacctatctttgcctgccccctatgcataccttatcctcctttctatcagagggtctggagcaaagaaggtattaaagatagttgatcatgaaggcaatcctctgcgacactgaatatttaagcatcagcttctattttaggatgaggtcagcccaaggcctagaaatctagtattcaagaagctccttgtacccccaaaatgacatccttgactgctatgtcccacgtatcttcctaagggctttataagcactaactcacttaattatgcagtgattttgttttcctttcaaagagattatgcaatgttctggataatcacagttagaaaaatctttacaatcatacggtgaaaagatagcacagccagaatttcaacctacaatcagtgttcttcgtctgtggactgcgttgcgtgctcagagagttcatacatttaaacaattctgcacacagcttcacagattcccaatggacatggagggatcccttgccagggagagatccctgcaaggtgattggtctgcatcccaggattcccaatgctctctggtttttgtagtgttacttggtttacactgagtccatcctgattcctgcttttgactttttcatttaccttctaaaaatccagtatcaccttttctgaacagatcacgttgttctgccagcctcagtctcacattttcaaactgccttgtcttcttatacattttttagtggggtcagaaatgtactgagtgaacaaaagcagcctcaaggctgagcctaggggagcttgtcatgtctcccctaacatgtgcagaggctgatctcctatgaagtaactaagttgttggggatttattgcttgtctcaaaaaatgacattggtttccaaaaggatgtccatttatgtagccaacccgtgtggtagcttgaacatgtctagtttggaagccgttttactaatgctttgttttatctttccttaagttggaaaaaggaaatttagcatggaccaaagctcagtgagtgacaggactgtgtgaagggatcacaggcttgtgttacactgatgaaaagctgagaagacctcaaagggataaatctttcacccaacccagctcaactaagaaatggagatacagagacccaagcttatattttattttaagtctccattctttgctctgtggtccttaaatataaacacagtttgtcccttggcaatgtccttatactctagcatgcatttattagataactcattgggaaacatgctacagggaaatccacaaggtcaaataacaacagcaaaacaaaccaacaaaacaaaacaagcactgtcaagaagtaggagcactaagtcacccaagccaagagtcagggaccatttcctaaggtttctggaagatgtagccagtatgccaaataacccagaaaataaagtctgctgagtggacttgccagctccctaaagagtagtcaaaagctgcatggtacaactggaagagactggctatatgttctcttactttttaggctatcttttgtagggctgatgcagtgcccagcaaattagaaacacttttttcccttgttttgtcctctgctgatggaccatagggactgggaagtattgaacaactgagaagcataagataaaaaagccctaccttgagaactaggtgtttatctcagatgaatcacatgcaagctgggtgagcctagggaagttgcttaacttcactgaacttcagtaaaggggtagaatggtgtcaccataacaaaggtttctataacagttaagtctctagtgctgagcacagcagaacatacctgtaagtccctgaaactcaggaaattgaggcaagagagtcatttgaaccatggactttgagactagctgggaatgtataatgagaactgtctcatataaagaattacaaattaaatatgtatcaatacctatcacaaaaataggaaaaatgtgcatatcaattattagcattactgttctcttacttgaaagagtagcttcaagtcatttggagagtaaggaatggtgtaagatttcttccttcactgtgaagtcttagctgtgacagtatttcagaaattggcactgagcatccagctccgtgttgcatgaggatgggctgaagcactagcatctggggaaatgatcaccatgacactattgaatggaaaaatgtgcagcttctttcttcctttttcaaaagaaatttctagggtttgtcacttttatgacttttcagaatcttccccacagcctttggggtgaaagtccatgccaccaaccccacccatcaactcccaaaaaagtaacctaatctgttcagacttagtcttcactcagttgattaaattttggcttcagaaatagacaactcttgctctcctttacgctcctctgagactagagtgtacttgatgctaaaagtccacatttgcatatgtgtggatgagttaactcaaccttgaaagtgccaggtcttctggatatatgcccaggagaggtattgcaggatcctccagcagtactatgtccaattttctgaggaactgccagactgatttccagagtggttgtacaagcttgcaattccaccaataatggaggagtgttcctctttctccacatcctcgccagcatctgctgtcacctgaatttttgatcttagccattctgactggtgtgaggtggaatctcagggttgttttgatttgcatttccctgatgattaaggatgctgaacatttcttcaggtgcttctcagccattcggtattcctcaggtgagaattctttgtttagctctgagccccattttttaaaggggttatttgattttctggagtccaccttcttgagttctttatatatattggatattactcccatatcgaatttaggataggtaaagatgcttttccagactgttggtggcctttttgttttattgatggtgtcttttgccttacagaagctttgcaattttatgaggtcccatttgttgattctcggtcttacagcacaagccattgctgttctattcaggaatttttcccctggtcccatatccagtaagaaggacacatgctccactatgttcatagcagacttatttataatagccagaagccagaaagaacccaggtgtccctcaacagaggaatggatacagaaaatgtggtacatttacacaatggagtactactcagctattaaaaaatgaatttatgaaattcctaggcaaacggatggacctggaggacatcatcctgggtgaaataacccaatcacaaaagaactcacatgatatgtactcactgataagtggatattagcccagaaacttagaatacccaagatataagatacaatttgcaagacacatgaaactcaagaagaacgaagaccaaattgtggacactttgccccttcttagtattgggaacaaaatacccatggaagaagttacagatacaaagtttggagctgagacgaaaggatggaccatctagagactgccacacccagggatccatcccataatcagtctccaaacgctgacccattgcatacactagcaagattttgctgaaaggaccctgatatagctgtctcttgtgaggctatgccggagcctaacaaacacagaagtggatgctcactgtcagctattggatagatcacagggccccaatggaggagctagaaaaagtacccaaggagctaaaagggtctgcaaccctataggtggagcaacaatatgaactaaccagtaccccccagagctcgtgtctctggctgcatatgtatcagaagatggcctagttggccatcagtggaaagagaggcccattggtcctgcaaactttatatgcctcagtacaggggaatgccagggccaaaaagtgggagtgggtgggtaggggaacgtgtgggggagggtatggaggaattttgggatagcattggaaatgtaaatgaagaaaatacctaattaaaataaaataataaaaaaaaaagaaagtgccaggtctgtgccacttcaacaaagggacttttcccttagctagcatcctaggggcatactggtggggtccttggaaaatcagtgcttacttttctccccatcttatcccaataatggtgttctccaccagaccttgaacttgcacagggaaccagtgcttgctgccttggcctctggtcgatatccaaaaagaaagtaaggaaaggtttcagatatatttatgattggcatagtgattatgtgccaatcagaggacaacacgtgggaatcagttccctccttccactgtaagggtcctggggatacaactcagggggtagggcttgcctttccttgctgagccatcttgaaggatgcaacaatatttcaatgtttgtttttctagttctctgttgggtctgaattagcttgatcctttcttgaggacagtagaaaagtctggctcatcacccagaccggtgattacagcagtaatttctttcatctgtggttgcacagtggatctgtccagaagcagctgaggacctggaggcataagcagcagtgcagctaaagatccccacaggcagttacatggcctgtaaggttaagacaggctagattaaccaggacttgctcaacaagcatgttgtcccagaagcaattagcaaatcttttttttttttttcttcctgagacagggtttctctgtgtagccctggctatcctggaactcattctgtagaccaggctggcctcgaactcagaaatctgcctgcctctgcctcccaagtgctgagattaacgacgtgtaccaccacgcccggctcaattagtaaatcttaaccaggcatggtgcctaagtggatgccattgtatataaataagaaaaggagagaataaagaagaaagacactattatcatttgagttttgctcccctggtaatgcaaaatgtcttgcaaaaataattgcatataaagtcatgctttctattttgtttttaactttttacaaacattgtcaagtctagattcacactaggaaacactggttcactgaaatgctgagtgtccttccactccaggagcttacaggaggatgtctaacactccctcctgctaacatgacccagctcacctttgcctcactgtgactctcctgtaccctttgtgaagctcaagcatctacgccctttcttcataagacagtcattactggcttgcataattcatgtttaccaagcatgcatgcatcaggataaagtgttgtatgctttattacatattccatataaaaagccagggatcccaattacatggtcaataatttttaaaagtacctataagaatgtgtttgaatgtcatttgaccaaaattttaccattaagaattgaatttgaaaattttaccattaagtagataaaaacaaggtcttgaaacctaaaataaattttgtcatttgcctttaattttctagatttgaaataccagtctttttttttttttcatttcttaactatcttaagttcatacaaggaacctgctatatccaccttttctgtctttatctggaggtagtagttactgggataaagtgggttgcctatctttgtttttatgcaactaaatgcatgcattaatgcatgatttacacaaaattttcaaaatttttagagaaattccaagttaaacaatgtgatgtctctgtgtcttcacactttgtagtttatgttccaagcactgtattatttctccccatcttccaagcaaataggagattgaagtccaattccacatttgagccctgatgggcgatcatgatatgacaacctcacaagagtctccgtatattgaaattagagctttatccttgagaatatggccttctcttctgaggttctcccaaaggcaaggaattaaatacatattagatgttgtcaggaagaccacataagtaggtgatgtaaagtaaatttgatcaccatgccattttctcctgtgaatacttggcaattacagactacgtccaatattacataatgtgacaaactgacgtcattgcacataagcttcatctcactctctgcaacgaatcatgactttagtgtttcagacagggaagggttggtgttgagggactttgggtggttgtaaagtagaaagggcagaggtcaaggctttggcaggtatctgactctaaagttggtaactttaaccactgtacccttgcctttgttgtagaagccagcatcgagctggcttaggaaactcagaagacctgagatctagtcctggttttctataaccagtatgtggtgggtagcagcaatcaagtctcatttctgaggctcctaatccatcagccaactacacttcaagtctgcctgtcaatagatagcccattattaatatccacttggtaagtgggcaggtagaaaccaccagtctgtcccatttatgaatatgtaagctctaagatgtcccaaagctcttgttctacaccagagggaggaccttgcccttaactcatatatctttaaagatatcctctccatgttatcggtgcctacctccatattgcccaatctcagaagtacagattttagttatatagttacttatttttgatggtactaggagtcaagcccagggtctcatgctgactatgcagtcacactactaactgagctatatcttcaatcttttgaagttctgatttctttttcaaaaaattcgtttttttaaatttacacttacaacttcttaccaatacttaagacaaagatcttagaaaataacaataataatcactagaaaaattagtaagagataatgtggacctttctacatttcttttctccatgaattgaaattcataattcatgtatttttaaaaccatattatgctatacccatgcttagatgggtaaaggctcttagttccacccaagagatgcatctgtttccctatttcctgttttctccccaccccttggaaaataatattttaacagttaaaatagtttctgcaaaagcaacctgacaccaaatttctgttgataaataaatatgttctttttacaaggtcatggcggaagaggagtaagccaggactcagccccagtttctctctgttgttgttgttgtagttgttgttgttgtttggttggtttttatgtttttgctttttgtctttgtttgtttttggtgtgtgtgtgtgtgtgtgtgtgtgtgtgcccctgtgggaatctagtagcactacagattctgctgaataacccacatggaaaaaccttgttctttcatgccatcaagaatctcatttattatataccagtgcaaatcctagatctttcatagcttttccaagataaatgcagtattaaaagtactggtagtcacagtaactgaactctcatttgttacaagtttaagaatagtagaaaattctatgctgtctgctccatgtctagacaatgtcctaagaccagacattaaaagggaattggaggaggcctggagcatagctcacgtggtaaagtaagtgtcacgcaagcatgaggacctgcctttgatttcagcagctatgtaaaaagtctggcataatgacatatgcttgtaatctcagcacaggggttcatggggctcactggacaggcaacctagcctaattggcgaatctcaggactgagtgagcaaccctgtctcaaaaaaaggaaaaagatggatagtatccgaaaaatgagacctgaggttggtctctaaccctctaacctacacacacacacacacacacacacacacacacacacacacacacacacacacactacactcagaaatacacatataggcacacctaaacacacatttacacacatatacacaatacactcataaatacacaaacacacatacacacacacacacatacacacacacaccccacaggtgaatggagtgaaaaataagacaccttgtttcttccctaattataaaaatacaaatatgttccaaatgtcccctaactacaggaagcaatactcccaaagatgaacaggaagctgttggttgttgttgttgtttagaagagtgaagggctctttattccacccaagcagagatgcatctgtagccaacatgaagcagatggcccttttctcctctgccttttagtttcggggctctgagactggtagagtttttagcactcacagtagttggcttcatccatcatgcatggcaatgcctctgcagtggcagcttgtttccttccattgcaatccatagatatgaactaagcaaagatacatgtttttacatcagaagctgatgatgagcatgtgtggagacagcattgaatagattcttcaccactttccaatctttagtcctactaggaacaagtgtacttcaagagtgaatttatgactgcaggtgagcactctactccagaggtgaaatttattttctgctatgtcctctagtgcgatgaaaccacattttatgctgtctgaggtagtggtactgtcttgtcacacaaatgttcctaagatataggtataggaaatctagactctgagctttgacattactatattacatagccttcactagtttctctgtgaggattataccagttaccgtaagggtgcttagcacaaaccagttctttaagaagcctgaatggcttgttaattcatagccttagccgcccaataggatcacttggtatagactttgaaacttatgggctgggaagatggtttagactctatggcttttttcctctcagcctcagcgggaaaaacattcatcatgaaagtatggagatgtgagtttatattccctaagcctacacaaaaagccaggcatgtataccacacttctgtaatctcaacactccaaagacatacacctaggattccaaaggaagctgaccagccaaactagccaaatgagctggctctgtattcagtgagaaagcctgtcataataaatgaaatagagagtggataaggaagatgcctgataagaactttgagtgtcctccccaaaatatagatgcacacatacatacatgcacacatgtagacagtgttgttaaaatgtgcaatttgcatacatttgtaaagatgctaaagaaagactagataatagaaatgcattatagtgtctatggtccagacttgcatgagatattcagctatgtgaacaaatgcatgtaaatttttctaaaataatgatctaattatgtctccacagaacatgtttaatctgatcttatgtctgggctaagtactgccaatcactcagtgtgataagtgcatcataggaaaggccatgagctgaagggcataatcacaagatgctctcagctgtctcccccggttcctggaaggagactgttcctgagtcgatgtctgacgtttctaattaatttacccatctctcttcactctttctcgtcctgtattaactctcctaagaaaacacacagggcaagaacaaaagcaactgctcacacattttcagtattctatctctgggtttctaggtatattcaaggcgagattgttagcagatgattgtggttaaagtggaccagaaggaagcttcgagctctgatgggaggccgggccagggggtggtgatgtgctctttatgttgaagatgattctggcttataaaaatgtcaaaacccagaaacgcaacatgggtaacttgcagcgggcttaaatgatacaaagatagttttcaaagacaagcaagaactgaatagttcagaagatctcaaaaatgaagatccatacaatgtcagatctttatctgagaaacactattgtgtgatgacgcttttgacctcctgaaatggaaactgtaatgccctgagacaggtgcactgagagagccaaacacaggacaacatagaagcagagtaaagaagccatgctcctggcagtggtacacagaagagacggaaaaaaatacttgtagagaaggagcccttgtctgctgagagcaagttgactattaggtggagtactgcaatgatgtgggaccctcctttccctctttcatgcccatccacattcttctctggactattattattattattattgaaaatagctatcagaaagtattcattgaataaaaagatcgtagaactaacagcagtttcatgaagacttgtcctattcattgctcttagccaatcttatagaagatcatctcccaagtgttcaggcccccacacaggcaggctctggacctggggttcccacgaatacccagtcatttccagtcatctgggtttcacaactttaatcatggctgaactgatagtagcaatctcagtgattcttgcagttggcttgttttgtgagtgtgagggatgggttcatatgaggccaggctagctttgatctcatgaaaaccctcatgctccagtctcactaaatctgatattacagatctgagctatgcacctagcattctaatatcatttttatgtcaagaaatgaaggtctaagatagtatcaatctggtgtatatttagatcattaaatcaaacccctaaaattttaataagccattaatttttttattaatcttgaatgcttgtataacaaacgctgtactaaagcacctctccatgagcatctaattcagttgtctatgaagatctaactctagaataaacaatgataaaatactaacatgcattcaatatagctggcaatggcagagactatgagtaaatgaaatctcaagtgagcaaggtgaaatcaaatcaaattcttaaataaaatgcagttaagtcaaagaaaaaatttccatctatcagtagaactggatctatagctgccaattttcaactccgactaaaaaatggggtttgaataagaaataagccctaagcctagtgtgcattatgggtaacttttaagagtctattagcatatagtttgatgttattaaaaacaaatagagacctagtatggctcccaaactgaaaacatatacttggagcactaaaaggttattaatattcaagagtatacaagtatattgtgtatttgtttacattttatacagatcctaataactgaggttttttgaaagaagctaaacactatggcaaagtccattatctcaatgaccaattgagcatttggccagttccttgtcagtccacacacactttacacccagtgaaactaaatgatgactaacagaatatgaaatgttttatggttgctactgtacaagctgaagcatgacactgatagggtatgaagagccaacattgccacctaagattggttctgtgactatcagagagcttagctctccacccagtcaccttctgtacacattagtgaacattcctggaaggcagaatccagttctcagataggagttaacatgttgaatgcattgtcagttaccataatgacaaggcctgtctcagtggggatgcccagttgctgccagttcctgaagcataggctactcctgagttctagctgatttatatactttctgcaaacttcacctcccttcttgcaaaatgtccttctgggtttattggattactgtgaagatcaaataaaatgagataagatgtgcatttagttcgtaagtttatcatatcaattaccctacgtagcaaaaagaagcaagcacctctgtcaccaacaatgagccgcaaagctgccatctctctccccctttaaatatactagagtctggaccatttgtgtcaaggtgttttaatccatttaggatttttgtttagccctactattaggaaacctcttagtgagagatttatatttgacaatgtcaagtaacatggtcatttatcagcatctgatttaattaacaatggcactcaaattaattattttctgattattcatagagttttagaaaaaattggactagagagtcctatagcaaatacaaacatgatagtttagggatgcaagcctaaaggacatcggattggaggccagaccccactagtgatgggaccataggcaaagcaagtcactttcttattctcaattatccataagatgggtgcttagcacatggctatgctgaggagcagatgatagtgcttgcctatgacattgccatagttcccaataaatccacacttgcatattgtccagattcccatgtttgcttaaaagtagcagccctacttggtttacacatgttgttatcagtgtgagacagtttttcatattttcagactttgtggaaagatgtggtaggtacaatattattcaattatgagataaagttgctgttttgttgttgtttttcacacaccaggaagtgtcaaatcaaagaacggactctcctgttctgcagtgtgctgactggttttgtctccatcaaattacttactgagttgtagtgtgccattctaagccttgcatcaaaaccaggcacaagcagctggttgatgtgaaatttttggcacccaacaacagctgaggtgtatttttaagtactccatctggcaactcagcaggaaaannnnnnnnnnnnnnnnnnnngaaaaggaggaaagtctcctccaaagcaaagaggctcttcttggaagtgtcacttgagctatgaacaggagcatctaggttccagtgacttttgtggaaggtttggaaagatgcagatggccgctctgtttctgagttcccttttgacttctcagtacacagaggaaggtctggcatttacagccatgtataccccaggttgtccttctcaaaccactctgcctttcaagacttgctgccccttttagggggcttttacttcgagatcattttaatttggacgagagaccttacataacctttagtcattttcttctaatggactgacttgcagttaccacatctcatcactaccaggaaatagacataaatacaaccaagcaatctgactgaagttgtaccagcttttcctgcactatgccaccacatctgctctcttggtggaataaaaacttcttcagggttctaaacggaatttctctttctagatagctttgagcaattgtatacatgcatatacatgcaggatcaaaattcctcctgtcacagaaatctttctcagtctctctctctctctctctctctctctctctctctctctctctctctctctctctctctctctctctctcttcctccctctccttcaccacttatcctgtcccttgactgtgaatacttgggatgtcacatttcagttactcataattccatgtcctttttctgttggctgctaaagcctaaatcctttgagatcaaggatcttgaaatgccctatgctcctgatgtcttaagtggtactaaagcttccagcttaggggtgtgattgtgtgtctgtcccagtgagggtgggggagtagaagacaagtttggcttgggtctatagacatgacaccccacaagggacagagttgcttggtttctgataaagccaggcagagttgttttccaagttggattttctgtggccagtagaattgctgttacttggcaaatgaagaaggcttcaggcctaaacaatcagagtttaaatctcagccctgtcattaaccagagaagtggcaaatgagctaagctttctaaaccactgtttccttatatctaaaagatcagagaaggagatgagagtctgggcacacatgtaagatacttgagaagtataaatgatagggggaaatgaatctcaaacgagcctacatcagagctccctgaaggatatgaaggaactccaaccaagagtttgggattgggtaggtctggggtgaggtctagtaatgtgtattcctactaaggttacacatgctgcttccgataattagttatggagtcgcacttaggggactctgatggttcctgatactatcacactctagcaaacctcaacatgaggacttaaagtgctggatttgtgaagagaggtaaagccccccccccccagttagtatggattaggaagtccctcacacatatacgcctccaaagcagatgaagtctgtgactttctggtagagagaaaggcacatgtaagtgagaaacatgaaactaaatgctagaacgttatgacacatgttagacatgggcacagagctgatgttattgtctttctgcttaaaagcaatgccatgaagccagagatagttcagttgtctgtctgtgtgctgccacccatgccaggcagctcagaactgctgcctatgcctctagctccaagggatttgattctctctcctggcatccactaacacccttgtccacacacctacacacacacacacacactcacgtgcacacacacactcactcactcacgcgcacacacacttctttgctggacatctgcagatgctcctgtgcacataggcacccaggcctcttaagagccagctttctcccagctcagttttgtccccaggcaggcctctttacacgttgtcttttagcatgtgtatgtgggagagaatgtgggagaaagaagcacaggaaaacaaatgttcttagaagaactgcaaagaacctctcattagagaagcaaattaaaatagttcagtccctaggctattttctttaaatacattgaattacatcagttttttgatagaagactaaactatcttcttttttaaaaaaagaaagaaatgtgttgtatttcacttattctgtgagaattataaagaaaagacactctcaaatattactttctttgccactaagaacgtttttttggattaaaaaatccaatatatacctgagagattattttaaaatcttcagtatactagacttactgaaatcaagtatcaccttaatttcattagttttttctgatctccttctacactctgacttctaccctccttccaccttctgagaaagctcagctggtttcctctaacccaaaatttgttttccacatgtaaggtgccattgagctgagctcctacaaatgggattgttgactccatttttagcagcaaaaacgcatacatatcagacatatcaggtgctttgcttttctatgaaaagcttgctggctttgaactctataggaacatcaggatctgggggatgtatttaatcatttggttttcctcacaggtaccaaatataagctgagccatgtttcagagtaattaactctgaatgacaagggcagtctcagccttaaatggcgattggagtgaggttctttgtcttcataatctgggattatttcagaccacctctctctgtgaattatgtaatgtctgctaaaaagagcagagggatggataatcagagaggaggcagagtagaaaagctctcggtgttacctgaaagtgctgtgtttcttgtaagcaccccacccccagatccaacagatcaggactttcacatttacaaggaggctatttattgatttcacaattcagtcaaggaatagggataggattttaatcttagcaactcaaatatgcctgttgttttaggtcaaagtggttatgttagtaccactgcaaagtgcccatactctcttattaccaatcacccaattgtctgtgccagttaatttcattgtaaaggtatatgtgacagagcaaatggcaggccttttctcatgcaaagagtaaacactcgagagttttgactaccttgactcaaggttctgtgttcactatctcaactgtgacatctggcgacctaatccacacactcagctcctgccagagtttatttctctgtctgaaaacaatggtctgatagggcaagacaatcgccctcagtgtttctgtacctgatttacacactcactcaggctctaggggctactgacattcctcatctcatggctcctgctaccctagaggtgttaatctgcatggaattcatcctaagcttagcatctctctgacatcccctgtctcacaggtggagaaaatgtgtttctttgaaagggttcgtataattagactaggacctctgggacgatgaatgaaaaggtcaaaccaacctgcaatcatgagaaatttgtcatttttacagctgtgtctatctacttactcatttgcatacttattgtcttaaccttgatgtttaagtcttcaactgtgaataagagacatttatcccttacccttatagaaccttaacttgatacagacatgtaatttggtgtttaaagaagcaagtaaaagaacctgatacgaatgatgtgataggcagaattacaagagagacccttaatgacccctttccttacacagctcctctgctctgcttggcagtaaaacttgtaaatataagctattaattgcttgagtatgttcagttttatggcacaagagaaatcgtcccagaggtcctagtctaattatataaaccctttcaaagaaacacattttctccacctgtgagacaggggatgtctgagagatgctaagcttaggatgaattccatgcagattaacacctctagggtagcaggagccacaagatgaggaatgtcagtagcctctagatcctgagtgggtgtgtcctccggttgatagacacttcatagtgtaacaaactgaactcctctcagaactgaatgaacttggaagtgaagtcttccaaagtaagagtcagtccaagttatatccccttgaattcagcattgtcagataattcccagttaaatcctacacacacaaaaggataagctgaattgctaacctctcagtctctatgagcacatatgtcatcataagaagggtctctgcatatttaataaagctgagtcattagaatacagccctcagttctatgagtgatatctttgtgagaagtcagattgtcacacagacatgagcagggttattgaatgaaaacactgagacacagacacaggggcatatgtgaaggtggagactgggattggacctatgctgctataagaccaatgtatgaggctactgaattctgagaaaggcaatggaggttatttttagagactctgtaggtagaatgtgttggtggtataatggtgactttagccaccttcctcgagtacatgcagaagaaattcctgtcaggacctctaatttggacttcaaatctccacaattcaaggagactacatttctgttactaagcaacctagtttgtggttctttgtttcagctatctcagatactaacattgactatcaaatgcatggtcccgtggaattcacccaaacctcttccatcagaactagaaccaagtagatgccgatctaagtcactaatattagggtatttgtcatgtggcaacgcagaacataacatgggagagtttgagaagttgtgagaagggggtgtttgagatgatacagacgaacactagtcacctaacagggaagaagaatgtggagatggttccaaactgaaaattacatttgtaggattcctatggcagcagagagacagccatgttcacaaaattcaactattctggattttacccttcaaatggtactgctttcaaggccagacctacacccggtgccagcaatccacagccatccgctgttcttataaagctcatattttagtaggagacattcaaatacatggatgaagagacaattacattttattagatgggctgtgaagggattcatgtggaactgagacagaaaaccatggaatggatgggatatcgaacacgaagcaaggagagagtaatgagtctgagggaaggcaatgtagctgctatgatcctttccttctagattttgagaaggcttgtctgtcatttttttacaaaaatgcatagtagccacgattttccaataatttcaacacactgtataatagcgctttcttggttgaagccagcacagaaaattctagactaacttaatacaggattatatttctgggatgttaattccagcctgttcactgtaccatccacactacagacagccattctctaactccagtctatgtgtgtgtgcacatgtgtgtgtatgcacatgtaaacttcagggaatcctaagaccacctcttttcagtgattcattgaaagcactcacagcagaaattcacactaaaataagcacaggaaaatcatgaggagtctaggagagtccattgacagctttcttgtattctcccacagaactcacaagacattacttactttcttcagagacagtgtgtgactttcatgtagaatatggctaagcagagatcacaagtgcctttatccacagcagtggtcctcgacctcaagatgtagactatttcctccactctaccaagttgctacccacttcttcacagatggcctctagttatctacccatgccatctcttaaagccaatcaccctgcttacctctttcaccaaggcttcattttagggatggaaaaggtaactcagttggaaacatgcttgacactcaaacatgaagacctaagtttaatcaccaaaacccacatgaaaaagctggtcatggtatcattctttgtgatcttggtgttgaggaaaagaagacagacagccttgtgcttgctggctagccagtgtaattagagaactccagatcagtgagagatacatcttaaaaaacaaattgtatagtgcctgaagaacaacatgcaaagttgacctctgatctccacaaccccacacatgtactcacatgaacatgcgtgcacacacacatgtatttatgtggacacacacaaacacacacacagacaaaacacttgtctaaaatttatgcaaaatgtccatatgctcttgaagtgccagtatgctgtttgtgtcagcaatttgtttcctttcctttggcccttaaatcatataattatttgattgtgactataatacaatttatgtgttctgcttctggtagacatttgaactgtttcaagcttaccttgatgtaataaagttactatgtgtgttcttattcacatttcttgtggacaggtttaaatacaatggatttcactgtgacattcttatatgtgagcataacatgcattggtctggatcatctcctcattatccttccatatcctccctaggtctcccaatgcccttcttttgtaatggctcccattctttttttatggatgtgtgtgtgtgtgtgtgtgtgtgtgtgtgtgtgtgtgtgtgtgtgtctgtgtgtgttgtgtgtgtgtgtgtgtgtgcaagcatatgtatgtgcattttgtgcctgcagaggtcagaggatgatgtcatgtgtccagttcttccattctttacctcattaccttgaaacagcctctcaatgaaggctggtatctagtaccctggtgtactggctagttttgtgtcaacttgacacagctggagttaccacagagaaaggagcttcagttgaggaaatgcctccatgagatccagctgtaaggcattttctcaattagtgatcaagggggaaaggccccttgtgggtgggaccatctctgggctggtagtcttggttcgataagagagcaggctgagcaagccaggagaagcaagccagtaaggaacatccctccatggcttctgcatcagctcctgctccctgccctgtatgagttccagtaatgacttcctttggtgatgaacagcaacatggaagtgtaagccaaataaaccctttcctccccaacttgcttcttggtcatgatgtttgtgcaggaatagaaaccctgactaagacacctggtgaatttctgtctccttcctcaaagagtaccattgctataggcatgtatgaaaacacactagactcaatacatgggtgaaacagttttgaactctgatccccatgtttgtgcagaaattgttaataaccactgagtcatttcctgagcccctcatctatttttttctttatttcatctgtgaggaaaaaagccacataatactttttattttgagtctggctggcttaaaatgatgatttctacttctgtctttttctgggaaatggtatttcctcctcctttatgcctgtatgatttcatctattgtgtatatggatgagattttctttatccacatcactggtgggctcctacaatccttctatgacttgacttttatgaagcaccatgataaatacaagcgtatttctgtggtgtgatgcttttacctcttcttttatcatgaaacaactaaactgtataatattttctatggaatttccatactgatgtccacagtggctacactaatttacaattctaccattgtcgagtatattaaaagttccttccccattctcatctttgccagcatttgatggatatttggtgatagtcatcttaaatagttttgatttcaacccggatctttatcatttatttctaccctctgggtgttgtgctgactggttcttactggttcttttctaagactttgagctctatcatgaaagaaataatcaaaatctctcttatttttcatagcagtcactaatagctctgatcaagttatataaacttggtcttttaattgtgtcagagaggtcttctgaagtttagaagacattctaagaactgccttattgtatcttgctgattctgttgattccatgttcaccttttttcaggaattttaagctccctttatttccttaaatacttccatcattcaatagttcattattaagtcagagatagtattatatgcttcttatcctggcacttgaagggataaataatgaagattaccatgaatttgaggtattccggatctatggagcaagtactgaccagcctaggctatagactgagacattgtcacaaagaaaaaaaaaagaaagataaaaagaaataattattgttagtgctgttaatttgtggtttcatcccattttgatctaataagatacgagaaattactccattcttttgcatttgctaagaactgttttaatgatacacaacatgatgtgttttagacaaaattccataagatactgaaaagaatcatttattctatagtagttgaggtatatattttatgatggtctgaaatccacttgtttatgctatagtttagctctaaattttgttttatgtgtctggtttagattacctctacaccagaaaaaatatggtattgacgttacttgctattgttaaatagggaaataggtattattcggtctttctgtgtccagttgtgcttgttttatatgattgaatgcaccaatatttacctatatatgtatttataatcctatcttttgatttgctatttcatctaccaatatgtaatgaccatttttaaaaggtctattctgatctacatagatggaaatgtactttgtcatatatgagtagacctttcatgtttgattctgaattccatttgcttggaatataatttcccattccattactttcagtctatgtttgtcttttctggtgaggtatgtttcttgcaggcagcaaatagtaaatctcaatttttgattcagtaagcctgcctgtgacaaaatttgaaaattaacatttatattcagggtcataatgggaagctgtacctattactgtcattttcttttctgtatataatgttctgttctttcctaattcattatttgattttctagtgagatttattgtttcctctgctttcctagctgtgaggacttattcttctgtataatcttttatcttctacaataattattaatcactatttgccttagtttttgcttatcttgaaagatttttatctttcttttgactctgaagaacaactttatcaaattacagtaacctaggttgacagttacttcctttcagagataaaaatacatctctccaagatccccaggcctttaaaaattctgagaaatctactggtatcctaatggctttggcattataagtcagttggtccattgtattctttgtattctgacattaagtgtaatatgatgttgagaggttgtggttatgtctgtttgggttctaaagaccttctgtatctaaatggccacgtctttaccagtctttcaggtgctgctgaagaaattttttatgtctttagtctgtacctcagcaccttcttcatggaaagttatataaacttggtcttttaattgtgtcagagaggtcttgcatggtctgttcataagtgtgttcttaagttcttattcttttatctttattataggcttaatgtttcacttcatcagtgttgtcttcagttccttaaaatgatttcttctacctgattcactcaatggaaatagtttaagtctggaactgattggaatggctttcaaataagatactatggaatcagacttcctttgagtaaagtttgtatctaacatataagctcaaagaatccttagaaacatcttgacatgaagctcttacatatttttggatcacaggtcccagtgtgaaactcacgtgaagaatgagcaacaaactcttctagaacatctagaaccagggacatactgttctatgtttttaattgcctataagcatgattttctgacacctagtttctgcatgaaattggaggtgttctaggtcccaaacatctttctctgagattatcagtcttaaaaaaaaaaaaaaaaacaagctgcacccttttctaggtctctgatttaaattttactgcatataatggtcacatagatttcttcactgtggccaccctgaaatacaagataggtgctggcaggaacttgtgacagtacttggctatacattatgagaagggaaaatgtattagtgacttgtatataccaaggaaacacatctgtgtgtaatcctgtcaagatggcatctcaatatagtgttactgttttgatgttgtttgctagagcacttggcaagcaacaacatactcaccaatcaaggttagctgggtgcagactgtatttctgttcctcatctgtttataccacattcttgcccgtgtctcttcctttctgcctcctgttactgcttccttctgtcctgctgcctggccacagtaggctcagcactgaaatactattttattctcttttcagataaccagtgtgagtctttcctagtctctgtccatactccttcagtgcaaccctttagtcatccaccatggggagatactgatttctagctattttgatttccaggtgctgagaagccaaaagaaaaaaaaaatctaatctatcatcttatccgtccactagagctcctccaacctctacatgtgcactgtgacataaatatgcacaagcatgacacatgtttatttatacaaacacacacacacacacacacacacacacacacacacaccatttatttcccattaacaaatagggcagggtaaagtgttatcttttaatataaacagagtgtaatctcccaagccattatgcaaggtggttctacatttgcatgttctagaagtgtttgagagatccggttcagtcacaaactctccagcattggacatttgcctttctcagtttctcctgtgtctgtgcagcaatacctcataatagtttcacattcattttcctaatggccaagatgaacatgcttgttgcccttcatacatctccccagtaaggtgctaagtggtctgcctcaccttgtgctcctatcagaataagctgccacagacccatccagtcatggaaaaaaacaagaaaacaaagaaggcattagtatttctccttataagttgactactccaggtgtttgttacagaaatgcaccctgactccggggaccttatcagcctgtgtgtttacttcctcatcttagattatgtcgtgtaattaccctggagtccatgatgggaaaaatacagctagattctttactgcatccccaacagcagtggaacacttcagtggggaagctataggaacgtttggccactcaccagggctgctggtagatctatattttcttgttgctgtggatggaagagattagcaagctgggatcttaagacaagatgctgacatgagaaaaaagcaggagtcacttttcttggtttactcagagaaactgcagtttttacaactattggctggaaaatgtaaagcttacttcataatatcctacaaagagattggcttccacagagacagtgggtcctccttacccagcactgctcggaagcttgctttgtctagccacttgctttttgccttttaagtttctatcaaagggaaaatgatctcttttctccattctagaacaatacatttgttataaatggtcctaagatgtttgtttgtttgtttgtttacctctttctttcctccttcttttccatttcttttcaattgttattttacattggtgacttggttgcatgtctgtatgggtgtgtcagattccctgagacaggaattacagacagttgtgagctgccatgtgggtgctgggaattgaacctgcctttgcttgcttgctttctttctttctttctttctttctttctttctttctttctttctttctttctttctttctttccttattcactttatatccagctcactgtccccctcccagtcacctgctcccacaatcttttcccctcctccttctaatgaatgagtgggaacccccccccccgaatcccccaacctggtcacttcaagtctctgctaagttaggcactttcccactaagccttacaaggcagcccagctagaagaacatctcccacacacaggcaacagcttttgagatagctcttgctccatttgtttgaaacctccatgaataccaagctgcacatttgaccactgagccatctctccaactccttttgttttcttttaaaatcttctgctatggtgtccataggattctcagcagtggctcactgtaatgtaagtcatataagtgagaagcatatttattttgtaaagaaatttgagggtgatcagcaagtggaagataccctttgtctcccaaatatgataatgtccttgggaactgtatccacagcttgtggctggtgtttccctgtgccaaagaggctctggtataggcacagctaagatgggagaggtttttgttactacctatagattatagtacacatgatacttttaaaagattatagtgcacatgatattttaaaatcagccttctggcactctatgccaagattttaaaaggaaggatagaaggaagggagggacggagggacggagggagggagggaggaaccatatatcttcaggccatttacaaaaggcacatagttccagagtgagaaagaagaaggcatttccctttgatagaaacttataaattataagaattctgagcaggaaagggtcagagtttctatcatgcaattggtaatttggagcttattaaaattgcaggagtggtaggtggctcagcagagaaagtgaattccctgagctcaggaattcaaatcactagaccctacactgtgtgggttagcccatattagcaagttctgaataatgcaagagactttagcaaatataatgaaaagtgatctggtacggtttctgatctcatcctcatgcctccatgtgtgcatccatgtatacatccaccacccaaacacttgcacacatataaacaccacacatacacacacatatgcaaattacacacacacacacacacacacacacacacacacaaattccccataggaactgacctgtctttctgcttcaggtgaaacttgacatgagcaattaacaaactacttttggtcttctgtttcccttaccatcaggaagttaatgcaaggcttttggagaggccccatgtctatggtgactgagcagaacattttcatcattactgatccctcctttgtcttcagtcacctgctcacttgaatgacacaggatttgggcctggggagttaagaggagaaggaagaaggcatgggaggaaatgtgcacacacacaggggagtgaggtggcctttgcattagcatttgtttattctgctttttgaggactgcaatacccttacagtaaaaggaaaggtaaagtgaccagtctctgactaaaacaggaggagggagtaaaggactctagcttctctgtgtatccagttgtgttgatgtgaacagtatcagaggaaactgaactgaagaaaatcacacaaacctccaagtgtggaccaaagtcatctgtacccagatgaaagagggggtgacacctgcactccaggagaccctttgcttttctctgtaatttcaccgtaccacatatcacctttatccaggcttttagcaccatagatacattttgcctgccttgaactctgtacgaatgaactaagagtataaggtctcagtgtctagctgctttttctcactgttttttgggttttgtctgcagtgttgtagagaacagcagttgattgttgttctgtgaaccaagttttctactgactggtgtagccttccattgattctattgctgatagatatttcgattgtttttgtagtagggctgttaacagtcacattgcctggatctagtttatgaataactaatttatgaagtgagtatccatctatatgaattatctctatttacctcacacctgtagccccattacttaggaggctggaataggaggatcctgaggtcaagcccaacatagggaatataggcagataactctgcccccaaaccaaaccgaaacaacatgaagaagcaactgtagtctcacaaaagtcaatgaaacaaaaacacagggtttttaaaagccatgtatttttttaaaagtcagggcagaaacatttcaaaagttcctgctagctgaccagtctaaagtaaggacagagaaggggaaggctgtgaggtttatgtttctatggggtcttagtactgagttatgtctttaaaatgttaaaatttgctgagtgattcactccatccactaattgcttagatctttaaattccacaaatagttgaaagagacagaaagtgggactccttgtgctcagtgacagattctctgtggacacagctgatctggagctccgggctatcaccaggaacaatcctcctgcatttacagaatgtggcaggctagttttgacagaattgtacatttgagagccatagtagttttggttctctgtagcttcctactgtaattttttggaaatttataaacccatgcaaagatgtgatgtataggtaagacaaacaaaaatgcacactcatacaaaagagagacagagacagagtatgctttctaaaacataaaatatctcatcaacaactttttatattgatttttttctttcagtgtatgtgtgtgttgttgacatgcatgcatgcccatatgtttgtgcaggtaatgaatgtgtttgagaaagtgtatggagtctataagacaacctaaaatgtcattctttccttagcatctaccttgcctgaaagagagtctctcattggcctgtatgtcacaaagtaggctaggctcactagctggacagccccagggtgcctcctgtgcctcttagggcctaccactatactcttctttgtattaacctgggttctggagaatcaaacaatgtccacacacttacatgacaaatgctttaccaactcagctatcactccagccctgattttattttgaaatgacagtatcgagtatctattgatttagacatattactagactttatctcacctatttcatttgacataattatggaagttgcacaacatttaagtgacagttatgggctgtattacatttctgttatgtgtctagatctgtgtgtcgtcttgctaatactgttcagcttgggaaacagttgtgcctcacaggattgggggaatactgcacatgtgcttcctttcacacctgcccatgattccaccatacatgtgggctttgtttggttataacttttgactgtttctgtgttgtagtttttagtattgtattaatagacatttgttaactgcaaactgtatacccaggtaaaagatgtgttctatggtatggcttcttgatgaaataaaagcactcacatagtttacatatttgttcatttgattaaggtatacagaagttttttattgttttggtaacagaccatgcactggagatttagtcataagcatgacctttggcaggaagtagcttacaaacaaatagaatgaaaagacaagacaagcaagtgagttcaagaaagtgcaggccctgagggacaggagaggcttaatggagtatgactgtaaacacatttgatagatacccttctactgctcttctggtggactttttttaaattcctgaaataagcccatttaatttctaccaggaaatcagcttcaggaagacactagggagacttagcatgcatatgtaaatttagcgtgtgccatggactggactcagtgggttgctcaacccatggggtaccggggcttcggtgttcaggtgagcaaggagtcagaggggtgacaaacagactccaacacaagagagtgttgatctgattgtaatttctcaaagcaagcatcagccttatattacagaaggagacaaggaagttacgtgatacattaaggtcatacaagatatactgaggttacccaatgcaaaataactctttatacaaaacagaggaatgcatacataaaagctaacaggaaccaggcagtgtttaaaactgggataaaaatcaatgtttacaactgggatcaaaagcagccccacctaaggtgagcttaatcttagaagccaggggcaagggcttcatgtccttgccatagttccaattctagtctattgtataatccaccttctccataggccattgtaaattcctatgtatgggagtgactcagctattgttctaagtatactttgtagactagtcctgagatttctagctctattccagtaaattgtaatgcctgatttctttcactctctctctgtcaacactggaggctttcgtatgaatgagcagcattcttacaaaaatcaaagcccaagtttgactcaatgatttcctaggacattggaacactagtggatgttaatctaacttagctatatgtcaaaaatcatcccttagaggcattttaaataaaacaatattgaaggaaagcacacagatctgttcactgactaatgcaaggacaagattggtgctacaggatgccaagtctccaggagactaagtttccatgaaactttttgcctcagaactgcatccaactttttgggcctgtcacgcagtttctactagagtgggtgtgcaagcatgcacatgtaaatcagttgttaaagaagtatccttttgcttgaggccttggatgctttttaaaatgccaggtggagactccagccacttttacaacttagtaacagttccagggttggtttcttaaaggagtctgtgcccttttctcagcttgttcctgttagtgacttccacaaggcgtgtaggactgtcatgtccttgtatgagtcagtgacttcagtcattaaaaagcatcccaagtaagcaaagggctagagatgcacagacatactaggatgataatctggggtggtaggaacacagcaccatgtattattcagtgtatgtggccgagacagttcacactactcatatgctgacttgaaaatgaggctgcacagaccaaaaacagagacttgatgtatgatgaccccttgacattagatctaaaggagcgaaaaatggatttttgtaaactcattatccatctagaaagaattatctctaccgagtgtcaaaatgcacctagaatgggaatatttaaccctaactgggacatctacaacacaatctctacatttaaagattggagaacatcataagaaggggcagaaaaattttaagtgtcagaggaccaggaaatctactatgtgattatgtctcctagaattgatagggaaattatatccctgataattcaacagtatgtcctaatcaagacccaaggaagacatttatagagatgtaggggaaaatttcacagcctggcctctagacaaagaactacagggaattaatgactcgagagagagggaagaggggtagacttccccagggatttctcttattgactgtgcaatactaaatgatccaccataaaaatatgcaaccaacacttaagataaacaataggctgtatttatatatataaaatatgcaatgaaaataattaaagaaaaagaggtgatgaatttaaaaaggagcatgaaggaggtagcatgagagatgttggagggataaataatgtcatattttaattcaaaagatttgaaagtgaaaaggcatctgtattcctattatatcaccatcatgctaacatatctgtagatcaccatcacttgcttgctttggatgattgtaaacagctgaggtcatcatagtaccagaagaaactgtatgcctctttcattgcaattattgcagtacagatctttggccttgcatgacacattttcttagacacttacttctaattgtatagttaatattgcagaggatcacacatacattagtcaggtgttcagagagcaattggaaataatatagaatttcaaatctgtacagatattagtgtctttaaatttagtgtgaagttcaatatggtgtgaagttcaactttgatttaagaaattacttgaatttttaattttagtcagttcatgtcaattatacacagcagatatttccatcttgatatttatatacacatatacaatgtacttcatcatgcttcctcccattatcttttcctaatcattttttctccatgatgttctccctctctgcacaaagcccccaaaccacaaattgtcaaatgatgggaaaaaatataaacttaaaaagcacatcatttttgtgcttttacatctgatttatttcacataatatgatgatctctagttgtataaaatttctagcaatcaacccaggagttgtatacctggaccacatgctctctctactttcagttttgtgaggaccttctgtacttatttttctgtgctgtattaagttacattccagtccctcatatccagtttcttctccaccatttcatcaccatcatttgctgttccttcttaattatggtgactatagaaacatgagtcttttcccagtggtttaaaaatgttgaactttctttttttttattttcatgtgtttattgccaagttgtacctaattttttttaagtatctactcagttcatttatcaaattattaatcagattactgtggagtcacatttttgaacatttctttttttattttggacattcatctgtcaggtgtatagagaaaagactgtaccgtacaccacgggctgtctcttcagttgattattttctttgccataatgaaacttgaattcccaaaatttcatttgtcagttgctgctattgtttctttactattgggtcctttccagaaagattttgcctatgcctgtatcttcttctaacattttcagagttttaggtctcagtgaaggcctttgtccatattgaactgatttttgtagaaggtgagaaaaaatgatctagtttcattcttctaggtgtgagcatccagttttctgaaagcatagttagttcaaatggagatctctcatctgctatatgctgttgatactttgtcaaagatgaggtggccatagttgtgtgggtttctttctggtttattctattctattctatttctactctgcatgcatggctctttttgtgctgtcatcttgatttaattgctatggttctgtagtatagttggaaatttggtattgtggtaccccactcttgttctttatgctcagtattgctttcactattcaggatcttttatattcccatgtaaattttaggattgctctttctagttttgtgcagaataccatttgaaattttgagagagattaaatggaatttatagattgtgtttagtaaaatgctaatccatgagtaaaggaaggtctttccatttttcttattatagaagtcttactactgtagctacatttattcttaaattttgttttgttttgaaacttttaatgaatgacattttgttcatttttattcagcacaatttttgttattggctattggtatatatgaaatctactgcattttataacttgatgatatcagaacttagaattttctggtagaatctttgggattttgtggcggtttgaatatgcttggcccaaggagtggcactattgggaggtgtggccttgttggagtatatgtagccttgtagaggaggtgtgtcattgtgagtgtgggctttaagaccctccttcttgctgcctgaaaatagtcttctcctagcagccttcagatgaagatatagaactctcagctactcctgcaccatgcctacctggacacttctgtgctcctgcctaaataattgtggactgaagctctgagcctgtaatctaccccaattaaatgttgtccttataagagttgccttggtcttggtgtctgttcacagcagttaaaccctagttaagacaggttttgtgtttatttagatgattggttgactggtttgtcatatatttaaggttgttcaggtggctgtgaacctattatagatggtcttgaatttctgaatcttctgtatagcttcccaagtactcagattataggtatttgccatcatacctagtttatgttatagacctctagaaaaagaactgggatctttttctctttgaggtgataattaatttgatgaaattgtgaccctcaggaacaactcagcactggagagcatttttataaagaggtgagtggacctaagtgaagctttgatgggtaggctatgttccagtaacccttgctaatgactttaaaagtctccgagggaggcctgtgggagctattgcactgtactcttgcaaggaaatacctgtcagaaagctatagtcatgactatacagcgtacatggaagccttggtagaaatgctggcttgttgaattttgcttttatttttattttagaaaatggaattggtttataagagaagcgaatgggatatgtggaggaaaaaaaagagaaaagaaaacaattagctaaaaatattaccagcattgtggtgagtttgagatgattcattcaaatggcctttgtatccaacattttaagccatttgtatgattgagtgttagcttttataggagtcttaacgtcattgaaactttgataaaagctaaaagcttgcccagcaccctaaaaattgatcacatgaattaatttctccattttactattccatgggtcctgagtaagtaaagggctgatttataagcaggcgcacagttccaaactataaactattttccataatactagagttgtgcctcccacctcactccaaacacacatcaactacttgggagtctgtttcaggcctttgatttaaagaaggagcaaacacaaaccctcctctgtgtggctctctcctaggtgcaatacagaggaacagaggctctgaaaacttttagagaatggaagaaaccatagtgccatattcagagtaagacattccaggtcatcaagacccccccaagagttcagcacttgtctcagaatacagctgttcatattctgttccttagcatgcagagacactaagttctactacagaatagtgtttcaggagactcatggaagttttggttttgttatcactttggtaagaaatagtcaacatgaagaagttaataagatatgttctatagcagtcctccctgtgtggtagacgtacttggaaaagctgttgcttattaaccaaatttcaacattaaccaacattaataatatcttaatagcataacccttctgacattttctatgttcattatactcaggtagttatatcaggtgttcatctgaataaaatcattggattatttaattgtagatagtattgtcttgtcttttaagggaaagtgaggtctagagtactcagtaaatttgcctatgttactagtctccaaacctatgattttttcatatatttctccagtgcctattagagcaagaaggaacaatagaggaggccactttatattagaaaaattgaggtccctgaaggtagaggctggctaccaccacatatcaacctagccgcagtagtggatactgctcaggaatgtggctgcagttccatttcagaagttacttgcagcgtaacttgcacacataaacagattatatgcaaatttttttatattacatttttttattagggattttccttgtttacattttcaatgctatcccaaaggtcccccatacccacccacccccaatcccctacccacccactccccctttttggccctggcgttcccctgtactggggcatataaagttacatgcaaaatttttaatgaaataaaattgtttaaaaattatttgtagattgtctggctgtgttgtagcaagtataataaaattaaaaaagcagtgtttcttggtaaggttcagttgtatgtgttgacaatgaagatgctgagaatcaattaaagaaatggcacaatgcatttatattctgatgcttgggtcttacttatatgcagctcgcttcacagtcctcacatcatccaccatgcagtttgctcagcgctaagctgtagaatctcattcctcttctcatggatcatcccagtggcattagagagatgaccacttaattaattaatagcctgtaaagatgagatagtgctatgtccctggtacactggtacaggtagatggtatgatacagagttcctatgtactacattaaattgatggaggtaacatttaagctgaaatgtataagataactgagacagttacatgaaaatgagaaagatgagtgttcaaggtatacactcctacaggcaaactctgagattgcttgcttgagacaaagaagaagacaaagatcacatcataggaaaagtcaggatcttggtactgtgaggtttcctggtgctttgagacagagactcattctgttgccataggccgacctaaaacctgtgggcactcccctgagccagaagcatcagtctggattctcttctaagtgcatggatttggagttggctcatatccttggtttagtgatggtgtggacccaaattgggattttgcacatgctaggcaagtactttagcctaggcacagcaggaagccactgggagctttaggcaaggataccagcaggctttgacttttatggtaagcattgctcacagtcatggtatagaggaaggaagaggtgggctccaagggcagcagcatggttgaggagaaataaatccttggttttattttgtctggttggttggttggttggttgattttgtttgttttgttttgttttttaagcattgtattcagcagaatatgaatatggagtcagtgaggggaaaagaaaatgagaatctaaaaataagggttgcctatttcagtttgcaacagaacacagaatagtattgctgactgagatgagagaagacgcttaggtcgaacatgcatttaactgtttgagttgagatagatttgactacacgagccagccagccactccatcagacactgaatcttgagtctaaacctcagtgggatgacaagcctagagatatggttggaagctaactcacataggaagaggtattggatgtggtcaggatggaggagaacacagaaaaagagaaatggtgttgaccatgggagactcaagacagggcctagaactgcccaacatttgacatcaaactgaagaggaagaataaacagggttgctggagaggtaagccagggcactgaggaaccaccaagagaatgaagtgctttgggggctaaaagaagttgtaccaaagaagtcatggctgctgctctcaagtacacataggggtggtgatgtgcctgcagcagtgctctcagccctgttgtggggcctgtggacttggaagtccccagtggaggcagttgagctattgcttttacctggtcctcactgtttttcatccttagcccctgtattagggttttactgctggtaagagataccacggcaactcttatagggacaacatttaattggggctggccaagaggttcagaggttcggtccaatatcatcaagaagcatgccagtgtctaggcagccatgacacaggaggagctaaatgttctgcatcttcatctgaaggctgctgggagagaagtgtttataggcagctagaaggaaagtctcaaatcccaccccacagtgacatacttcctctatcaaggtcacacctcctaatagtggcactccctgggccacacatattcaaacaactacatcccatctaactcattcctctcaaatgactttcagaaatggacaccccacctttcttgtgatgtgatccatgtctacaatgattcttattctaactggaaacactcaggatgataataaacatactcaaaatctccatataagacattgttgttgtctaaaacactatcaggaataacacatataacaccttctaggcaaaaatctcatgtgaaggcatggactcaagaatatgaaacactttgaaatttatagaggctagtgaaaaaatttattgtagcataagtagtctttaaaatcaccacatataaaatctcattggtaaatcaaatactattgaagtgtttcctttcatttttattcatttgtatttttattgtattatactaggtcaccttgggtagtcttcatgcaagtctgtaatgcatatcaagactgctcccctcactcactcgcccctctgtgttcttgtcattcttctttgttccactatactcttacttctacattcctgacatctgaacatacatgacattatgtctcatatggagtaaggactgaaaatgaaagaaaacctgcaatgttcatccttctgagcctggattaacttactttgtatggtctccagttgcatccattgtcctgcaagtaacatcatcttgtttcttgtttttatacttatgtgtgtatttatctgtacctgctacagtgcatatgtgggggtcagaggaaaacttgggggagtaagttgttctgtccttctaatatgtgggttccagggattcaactctggttgtcaggcctggtgacaagtgactttagataaatgttgagccatctcaatggtccaactgcctaattctttatgtctgaaaacagtactctctctctctctctctctctccatacacacacacacacacacacacacacacacacacacacgcgcgcacgcgcgcgtgtgtgtgtgtgtgtgtgtgtgtgtatgtgtgtgtgtgatttttttccattattttgtagatagacaaaagtttcttttttcttttcaaaaggactgagcctactcctatggggaagaatgataaaataaaaatacagtgattagaaatcacataattgtgctagatagaaattaaatgtaaaaaatataaattgctgaatgacatttacccaatgagggaaaatgtcctgatatagaatctgtactgttggtttaaatctggccaacaattgtattcaagacattggtggcatccaaatgctaagatcaatatctgagattcaaatctcttatttcctttcaaaatatgctaagtgtgccatgtattgtatccagtagagttttctgaacagagatgctctaggagtcagccctcccttccctgcctggcagcttcctgccaagctgacagtaacttcctgcatggtagcctttgctgcctggcaagactgactgtatggaagacatttctattccagaaacatattcaacagagttgtgagtcctgatgtgagcaaagacatccttagaatcagcctcattagcatcagaagcaatgtctttcatgccagaaatggctctttctaatgcagtttcatttgttttcttttattgctgtatttggtcaaaactgcaagcaaatgaaaagtgaggtggataaattgtctttggtgtcatttgaggttaacactagttaagttcaactctatattgatctctaaacccagtaaaaggtacagagagtgactagctgtatggcctcccataggttcccctgtctctccgatagtttctgtgattctgagtggcaccaatgggacacagcccacaggagcattgggaggactgagagaagtgcctccaaccagccatttatatgtttgatacactgccatctttcctatttctgctgtgcttcctgtgtaggcatttgcccacattcattttgcacagtggactttcttgagctatttggtctgcaaggcttgtcctccaataatgtcaagaactgtttaaggtaagggtcatactcgcccttcatcagattccttccctcttttatatctgacacaaagcatccagctcctacctttatgaagggactacttttttaaaaatggggagagaggacagctatcaaggatagtgtggtctcctggggctctgaataacagggaacctgtgaccccttttcttggagagacaaggaacagatggcaagtgagaggctgagaaggggaagaagccacacaggacttggggtgtagacatataaatgtcaggcagccgagcctgggctgaggggaagcagagtccgtcttttcttctcaccttctgaaatcaaggtgcttctcatcggctgagcccagtgtgaaagcagtgatcagggatgtccacatttctgaacactgcagtgaagggagctggaaagcaaacctagaggaggcagcattagaatcctgtaagtaaaagcagttgctagacatggcatgggtgctcatatgcacccgtggaaggagacgggaaaacagactgaatcctcccacaaacggctttagcatgtcgcctaaaaaaggttctgccctgtaccaatgtagtgtgaaggtaaggtttagaaacaaatcagcctcagattgaatcatgcttgctttctgactgtgtggtgaggcagttgctgaatcacccagtctcactttcattcttagggaagaaccctcataggttgcttttgttgaataaatgagttgttccatttagaatgtctggcaccaaagaaaacacctaagaaatgttagcatgatcattctctacaggagtgactctcaacagcggcaattttaatgcccctcctccatatcttcggtgcctgtgataactacagcacagaatgtcctgaagtagagaagaagtcctgccctgatttatatttgtatttcaacccttgggcctctgtgtacttgatattgctttatttttaccagtatgtgtacatgtgctcacttgtatgtattatccacatgtgtgcaggtgtagtgcatgtatgtacacacatatgtggaagctggaggaaatctcctgttatcctcaggaatatcattcatctcttttggaatggatactcccattggccaggaacagatactcccattggccaggaacagatactcccattggcctggagcttatcagttaggccagattggctgaccagccatcactcagaacccttctgtctccatccccccagcactggggttacaacagtgtgacaccaatccaagtttctatatgaattctgggattgaaagcctatccttctgctttcatgacaagtgctctattggctgagctaactctcgagctccttgacacttgactccaagatggctaccttttgctaacttccagtaaatatgaggcctttgtctattccatcttcattaaaatacacacacacaaacacacccaggggaagggatgagattagttctttacactttaactctcctttcactatttagaatacaaacacagcatagacttgtagtcactgtgaaatgctataatctgagataccattgcccaatagtgaagcatttatgtcaaatacacattatagatctgcaaagcgacaatgataccaagctatttctaggggcaccttagagccccagggaacagtgttttgggacacattgttatttctgcaactaaactctcgaggtgctttcagaaactcctcaactaggtcagtggaagtaaacattcctttggataagaactgtctttaaacacagtttcaatgagattttgtccttgtgctactcttctgcaccccaggttcagtcccatgaggccaagtgtccttgctcttggcaagagtgacctttcctatacgagctgaagtagcagaataggttgtctatccaacttcaatgtggctctggctcttggttactcatttcatttcctctaacttcaaagaacattgaccctcccatgcatctgttcactcatgtgctgactcatgagtgtgcttgtgaagtgtttcctgtggcttttgtcttaggcaattgcagtctctagcctcatggaactcttgtataaagtcagttgtcaagtaagcaaattgttaagtcctgatttcagcaggttgcatataaaaccagggagccaagacagaagagaccatcacaatagttctttaaactcagagaagtgaatagcagggagaggggaggcttttcaggaaatgactagagaacggaattctaaggagaagggccagctgggcaaagccctgatgcagagaagagaggaatatgatcaaaggatagaactagcaatagaggcttcactggcaagaggatggggtgcgggtaatgggttggggctgaggggtagaaggtgaaggatgcagggctgaagcactcaaagctcttctaaatgcaactgggcaagcagggacagtatttattcatgcttagtttaacttagtgtgttttctataggctgagaacacacctatgtagtcttataactcacttaacatttatatctacctcatgggctaagagctatttatgcccatgaggaagcagagggcctatgaaattgagaaagccactgttacaccactgaacaacaggcatctcagccttctgtgagctgctctttgaaggaaggatttgtaataacactgacctctatgcactacatgcttgtagcaatctctttgggtcaagctttatatcctgtgtgagagattatcaaaatcatgtctgcctgagaactcctgtaatcattctacttcccatagtcatgagtgaccctacaccagtggttttcaaccttcttaattttctgaacctttaatacaattcctcatgttataatgaaccccagccacaaatatattttcattactacttcttaactgtaattttgctactgttatgaattgtaatgtaaatattagtgttttcctatggtcttagggccacccctgtgagaggatcatttgaccctgaatgcgattgcgacccacaggttgtgaactgctgccctacactaatccactacatgttatttcctaagatctcttgctgttggcttccattcataactattatagttctcatctatcttcaagatgatgtttccttcagtcgccacatggtcttcccaacctcaacatattacttaaccagaggagagacacagctcagtacttttgattgtggaagagtaagcatctatgctaagacgagtcagggtatggcagagggcacaaacccctctccatgcttgaggctctctttttttctctctcacatgaccaagagacaccgggagtctggggaataggatctctggatttcagatacaccactggtaatgatctagttggggatagaaatgaatacttccttcatctggatctataatcataggaaagagaagggtggcttgaccctctttagaaactattgagggcaaacagtatggcatactaaaactaacttcagggtcttgagttttcttttttttttttaagatttatttatttattatatgtaagtacactgtagctgtcctcagatactccagaagagggcatcagatttcgttacggatggttgtaagccaccatgtggttgctgggatttgaactcgggacctttggaagagcagtcagtgctcttaaccactgagccatctcaccagccccttgagttttcaagtatgaaagcacctaacattagaagatctgcttagagagtattctagaaacacatgtctattcattcaatgctattcattcaatacatccagcaccaggacttgagtggtgctgttaagtccctgcatctcaatcatattcccatcagctgaagtctcatccacatgagccaatgaatgactcattcaggggaaatgaaccttcactttgtgtcctacacttctaagatggtggtgccaaaagaacctgatggcttgcagtaagaggagcagaagacagcaaagtagaagtgaaaactaatcagggattggaagagccagtgggagtaactctggtagggacagtgaacatgagtaacagcaggtttgaattgaatgtgcagagccagtaagcaagctgatttcatgaaggcatgatgtgcaggcagtatctcaagaaatgcaagaggggctgtattacaggtgtgtgtgtgtctgtaagtgtttgtgtctatgtgtgtggggggcggggagagtgcatgtgtgtgtttcaatctagcttcactacctgctggaccacacacggtaacaccagtctgcagtatagatgaggcttggccacctgtgccctgtgctctggtcatgctgagtcaccctgacggtcatcgtttgccttaatagaatagactgcttccatgtaagtacacttcgaaagacaaggtagcatgattgcttctgttcaactgtaggaattcctctctctaggcaggacagcatcacctggcagcttgggcatgnnnnnnnnnnnnnnnnnnnncactacatgcttgtagcaatctctttgggtcaagctttatatcctgtgtgagagattatcaaaatcatgtctgcctgagaaactgtaatcattctacttcccatagtcatgagtgaccctacaccagtagttttcaaccttcttaattttctgaacctttaatacaattcctcatgttatggtgaaccccagccataaatatattttcattactactccttaactgtaattttgctactgttatgaattgtaatgtaaatatcagtgttttcctatggtcttgtggccaccgctgtgagaggatcatttgaccctgaatgcaattgcgacccacaggttgtgaactgctgccctacactgatccacatgttctttcctaagatctcttgctgttggcttccattcataactattatagttctcatctaccttcaagatggtgtttccttcagtctccacatggtcttcccaacctgaacatattacttaaccagaggagtgacacagctcagtacttttgactgtggaagagtaagcatctatgctaagacgagtcagggtatggcagagggcacaaacccctctccatgcttgaggctctctttttttctctctcacatgaccaagagacactgggagtctggggaataggatctctggatttcagatacaccgctggtaattatctagttggggatagaaatgaatacttccttcatctggatctataatcataggaaagagaagggtggcttgaccctctttagaaactattgagggcaaacagtatggcatactaaaactaacttcagggtcttgatttttcaagtatgaaagcacctaacattagaagatctgcttagagagtattctagaaacacatgtctattcattcaatgctattcattcaatacagccagcaccaggacttgagtggtgctgttaagtccctgccatctcaatcatattcccatcagccgaagtctcatccacatgagccaatgaatgactcattcaggggaaatgaaccttcactttgtgtcctacacttctaagatggtggtgccaaaagaacctgatggcttgcagtaagaggagcagaaaacagcaaagtggaagtgaaaactaatcagggattggaagagccagtgggagtaagtctggtagggacagtgaacatgagtaacagcaggtttgaattgaatgtgcagagccagtaggcaagctgatttcatgaaggcatgatgtgcaggcagtatctcaagaaatgcaagaggggctgtattacaggtgtgtgtgtgtctgtaaatgtttgtgtctatgtggggggggggcggggagagtgcatgtgtgtgtgtttcaatctagcttcactacctgctggaccacacacagtaacaccagtctgcagtatagatgaggcttggccacctgtgccctgtgctctggtcatgctgagtcaccctgacggtcatcgtttgccttaatagaatagactgcttccatgtaagtacacttcgaaagacaaggtagcatgattgcttctgttcaactgtaggaattcctctctctaggcaggacagcatcacctggcagcttgggcatgataggagtgttttactctgtcaaggtcttcattgaggcattgctgagaaatgtaccactcttatcattagcatagtcagcagggcaccaagaaagcaaatgctattcctctcttcttttaatctttcagagttagccaaaatcctaaacataaaaagcagttgtagggcataaattatctgcagctaagctttaagcttatctaaaactcctagaattaatggtatgtactgtgtggattacctaaactttcagattttatagacagtttaaaatactgctaatagagtgtgtgtttaattaagccttagaccattggaatttgtaataaaatgcccattttatagatgaggaaactgaggctcacagtctagaattattcactatgttagtatctgaaggaaccacagcaacctagttttatttcactttgcctctgccccgtggtctatttcaagcctgcttaacaaatacagctaaaatgtgaattcccctgtcaatgaacaaagaagactttgtattaaatacaaaaacaaaaaacaaaagaaagagagagagagagagagagagagagagagagagagagagagagagagaaggagggaggaaggaaggaaggaaggaaggaaggaaggaaggaaggaaggaaggaaggaaggaaggaagagagaaaggaagagagaaaggaagaaagaaagagagaaggaaaaaagaaaatcaatttgaaggcggtaggtgtaaaagcgtttactactaaagtcattaaggaaaatgttttgtaaatgagtttcctgggagagatgtgttaatctttttgttggtgttctggtttgttccaaaccattcagccatttgctgatgtgatgcagacaaaaaaagatgtgaagaaatatattgcacaaacttccagcagtgcatcagacaccacagccatggctgtgaatgctataccttcaaaaccagcagaaagcagtgaagccactcatcttaataaggacaacacaaagctgaaatttgtaacttaaatgtaattctattattttatcattcaagtcaactcatatcaagtgaagaaaattaaatattgtctcagttattttaatttccagtcttctaaatgattctggatggataatacatcattaatataatatagcactatattatttatataatgtatataaacatttaagtatataatactgtatataaaaatgaaatgacagttctcttcaaagggaaacacacaaggattcttatgataacatgaagctgattatgagacagtgaaggatctaagttgttgctcttatagacacacagaagtttgacagtaatgtctaagtattgacagatggcactggacaacatggcagtgagagggacagtgggtacacacatctactttcttgacttcccatgttattgggtcccatggggcaacatgttggagccagactgcaagagcatgcaatgggtggtgacactgagggaacctaaactcagagagtcccagtgttcttaggctctcctccacacctgcccaagccccaccatcctgagccagaaaccctgcagaaagaacttatctcagctttgcaaaccttgcaaggcagtttttcagagcagtgtctgaaattctaggcaggagtgaatgctacctaaaaaccagcaatgtcaatgccaatggtgatggtgatgacagtgatgatatcgatgacagtggtgatggtgatgacagtggtgatggcagtagtgatggtgatgacagtggtgatggcagtagtgatggtgatgacagtggtgatggcagtagtgatggtgatgacagtggtgatggcagtagtgatggtgatgacagtggtgatggcagtagtgatggtgatgacagtggtgatggcagtagtgatggtgatgacagtggtgatggcagtagtgatggtgatgacagtggtgatggcgatggcagtagtgatggtgatgacagtggtgatggcgatggcagtggtgatggcagtagtgatgatgatgatagtggtgatggcagtagtgatggtgatgacagtggtgatggtgatggcagtggtgatggtgatggcagtggtgatggtgatgacagtggtgatggcagtagtgatggtgatgacagtggtgatggtggtgacagtggtgatggtaatgacagtggtgatggtgatgacaatggtgatggtgatgacagtggtgatggcgatggcagtggtgatggctgctgttttgtaagctactgctcttcagacattattgtaaattctttataatctgttttcttccttattacaacagttatagtagaccctatcacctacattcacacataaccatgcttgcgacccagggaacgtaaacaactccccctggggtaacagacacagaaagcagtcatctgtgtgacattgccactgtcatcatccagcgatttgctgtgatttcagacacatgcctgtgtcctgatattaccacactgttttatttacagctaaatatattctactgaggaaaaatgttttaaataaaactgcaagtgaattttgaatgtatctgtaaaggtataatctcttttaaccaagatgccaaggaaagtgcttaattagtgacatagtatttctaagcattatttatttgtttatttactgtctacttttatgttagcagtgtactccttcattgttttctgtgaaccttctacatgaaaggcattgattagctgtacaaatgccaaggactcaagtccttctcacaaagaaatcaaacaaaatcacagggtgtaaagtgcaggtacatggaatccaaaagaacaaaacacagagaggagcaccatccaccaccactgccactgcctctgcctccacctctgcctccacaacaacaacaataacagcaacaacataaaacaacaacagcatgtgctggcaaaggccaatttcctggctatttcttcagggaaacccaacagtaggaactcttttgtgagaaaagctttggactggatgaagagccactgtgcattggtggtttccatggagtgtttctacttccccctccttactcttttccttcttacagaagacaaaaaaaaaaaaaatcatgcaactggtgaaaatgtaaatgtttggagaaaaagaatgagttaagattagaaaatcctacttaattagcattgatcactacatattaaattaattgtaactactattttcataacaactgtttaaacagattatctgtcacatatttttcaattctagcattttctatatttatttgagatattattcctcagcattaagggacataggcttattaagtagtcttgcttatcaaaactatgctgatgctgaatggctatgaaatattcatgaaaggcatttaagttgaatctgaaattgtttccaatcactgtgaaatcatcacttcagtttaagcaaatgatgtagcattgccattatgcccagggagaaagtctctgtttaaagttatctatatctatatctttttctatatctatatttatatctttgcatgtctttaaaagtcggttaacacactatttgtcttcttatgtcactctttcatggctttcatcattctttgtcttgtcctagtaaagacagctgccctacagaggctgcagagaatatactcaggctgcttcttaaatgagcaaagtactcaacacctactccaaagaatccattctcctgcatattaccatatgtagctcccactgtacacaaggccaagttcaggattgttagcccatgactcaggctgtgatcttcatactgttccttcctcaaactgagctaaaatttaaccatgtaacatatctgcacttgaccttctcccattcttcctcgagaagccagctcttctttcatctcctttctttaccacccggtattgaccaagagtccctccacatcccacaagaccttgtctaattttctattaaaatcattgttccatttctgtcttccccagtacattaaaatttatacaagggcaagaatatgttttattatctttgtgctccaacatttggtgtttcataggcaatgaataaacatttattgagtgaatgaatgataatctatgaagagttgtagggagaatatcttgtgcattgtatgatgcatcatctgtcaattaaaaaacacatggcctataggaaagtgtagatagaatagaaggcgggagaaggaggaacattagcaggcacagagaactgtgggatagcatcaggcatgggaggaaaagaaaaatactcctgacacacattatgagacaacaaacctcaaaagaagccatttagttttctcttggccatctactgatggccatggggcctagcctttttttaaagatattttctttatttatatttcaaatgttatcctctttcctagtttctcctccgaaaatcccctctcccttcccatctccccctgctcgccaacccacccactcccacttcctggccctggcattcccctatattggggcatagaacctttacaggaccaagggcctctcttcccactgatgaccgactaggccatcctctgctacatatgcagctggagccatgagttcctccatgtgtactctttggttggtggtttagaccctgggagctctgggggtactggttagttcatattgctgttcctcctatggggctgctaaccgcttcagctccttgggtcctttctctagctcattcattggggatcctgtgctcaaaccaatggtagtctgcgaggatccatctctgtctttgtcaggcactagtggagcctctctggagacagctatagcaggcttctgtcagcaagcacttgttggcatccacaaaagtgtctgagttatttcttgggtgattgtgaaatgcatgcccaggtacacacacacacacacacacacacacacacacacacacacacacacttaaaaaaaatatttagtgaaaagaatccagctagaaaaataccccaagttctttcacctaccttgcccaatctctaattgtctgtctgtcttctctgggtccatgaagagatctcctgaaaatgtaggctgcccttcagtgagtaccaaaagtaccaccaatcctacgtctccagtgcccagatcatgctaatgatgccaggtcatcaaccatgtttcttcagctgtgccacccaatgctagatctgaagcccccacatgtagctgtttagaccgaagcaaaataacaggaaaagccagttcttcctgctcattaatcacatgctaagtgctcagcagcctcctgtcgtgcttgttcatcatcttggagagtacagttggagagtgtgtttatccctgcagaatgtcccactggaccgtgctgctgtgaaaattcatttagtggaaaagtaggatctgcttatggagctgtgtccccattcagccttacctcaatgacccggaaatgacctctactctaatcatctctcacttgatcctgtgggcacccatctatacagaggatacccagatctttagggagctgccatcttgcacaaagaagacgaatgaatacactttcttttatgttttacttagagggagccaatgtagaaaatataacatgtagtaagtttgtcaggtctatgacaaaacacaataactttattgaaaatgttttaattatgctcaaaaaaatatctgcaaaccttgaactctctagcccctttcatttgtaagtatgttttcccatgtttccatgatcatcttggggtccatgatcaatgacaacagagtggtcatgacatccagtttccagatgcataagagaattcaaactattaacaaaagatgaaaacagaaagaggagatcatctttgtacttggtgcctgagttggagctggtcctccaagcacagtgagtctatgctctgtccccattggactgtccatactgtgtgcaacatacaaatcactggcacgtcggacttctatctctgcaccaggtcagggatatacatgccctcattattctaaaagaagttgacatggatgtttaagactcagagaacattgtctgcatgaaaacaaataggttttcaacactggcagatgcgtttgccattatgtcttactcatcataagttttagaaagtacaaagtaaaggataaagtctcagttacccacagtggattctctgagatactgatgtgtgcttagcaattgtgtggacttctgattttttttttctatgtatgatttacaaaaatctatgactttttttgcaaagtcactaatgttttcctggattctttcataatgttcaaaatcctttctaatggcaaaagtagtattcctttgtatggtgattttaaaatgaagccatttgaatagcatttgttcagcactttattgtaaacaactctgaatattattataggtaggaaaaagtgataagtctttatcataaattcccaaggtggaacactcaaatgttttacaagatttttagccttttgatgcaaatttctgatcttttctgcaaaggccttgtatgctgtatctacaagggaagtttataagaattgatgccctgcaactgtggactctggctgttctatccaaagctctagccacagaagctataccaaaccccaactagggcttccctggaagggaaggtggtaaggagatgctcctaagatatttgtaaaccttcttcgtggtcaaccaatgctaaatctgttcaaaaacatacaacctatgggaggaatatatatattccttaatatatatatgtatatatatatatatatatatatatatatatatatatatatatacacacacacacacacacacacacacacacacacatgtgtatattttatgtggtggtgtaatgtgatagatttagttttctgggtctagaatctttatttttcttttttggcacaacgtgtttgatagtcatctagtttgtcgtccaaatgagtacctgacttttttctttccaccatattccattttccctaattgatttgtccactaccagtgatagatgtggagtggttctactatggagctattaacataagctggtttgaaaagaaactggcttcagattgcaacttcgagatagtcttttggggtatgtgactttgaggataatatcctgtctcccgaagtcttggtgtcttcactcaggacagccatgactgtttctcagggttgtcaagaaaagccttaagataattcgtgtggagctcttggcagcagtcctagctcaatgcccaatgaggctagagctgcagcagcagcagtggttggaagatggatttgtgcacagtttttgatgctttgactttatggactcagctctctgtccaaagccagagagataagtgcatccaatcttgctgggcttgccactcagggaaatctttcagctgactttatggaactcattttccactaagagaaaatgagacccaagttacacagcaaatacatctggcatgtcagaggcccagcaagaatgctgaagctcagcctctagtgttcccatctcaaagggtcaggttgtttcctgaagaccagatggtactgctgctgaccacagctatctccatgatagtcatgatgggagcttgagttacatgagtgcagtttgaggccatcagcatttacatgtgtgatctcattctcatagcaaccatggccacagataccattcttctgagaagataggtttatgttctaagaatcagctgagtgggatctgcaaagatgtgattgagaagcagatgtctctaacatagacctctgcttttctccacctctgtctctcagcggaagccagaagaagatttcctgacaaatctccactatcacagcagccataatcacattagatccaaaactctgcttcctatatatggtcttccttaaggttcctgaagtgtgccctaagccactaggcttttgtatttgaagtttatcagagtttatttttaaagtcctcttcggaaaatacccaaataaagtcctgctttctattcataagcaattatttttgcctgtgctcattagttctctgatccagcatacggtgaactacaaaacaacgggttattcaaagacaccatctcattgaaagacatgagccatgtcgtcttttaggagacacactgtctacagaaagcctccagcaataagccatatcatggaatcagaagctaaaacactgactacatatgcaatgcttttctgaatcttaaaatgtgactgtgtaggtgataagtcctgaaaatacatgggtgagaggcaaagatcttatttaagtagacattgggaatccaagcaggtttccctgcctcaatggcttcctagacatccccacagtgaactttccactttgctgaacttcttagctcatttattgtgatataagtacagtttaatcaaagaggctaaggtcgaaatcctcttctccctgtctatacttccagtgccccatcatggtagcctggagactgagctcaggtcctcatgcttgtgcagcaagcactttatgactgacacgtctcccagacttagaaacggaagcttcaagccattgtaaactgaggagagctgttgagggagactgctgagatttaatgagcagagatatcactgctgtgaactgggttaattcgatcgcttggtaagaaagctatcttagatcatcagcaataacagtatcattccaggtctcagtgtatgggttcaagtaataatgtatttgccttataacatcaaaatcagagtttgatccctagaacctacaccaaaacaacaggcatcatggtgcatacttgtaactcagagccagggaagcagaaacagaatggtggagtcccaaggtcctgccagtctagtctacttgacaaagaaagatgccctgcttcagaggacgagtttgtcattcctcaggatggcaccccaggcaaacccacagcctgtatgtgcatgcacatgggtttgtgtgtggatatgtacacatatagagacccagacatacagacatacacacacaggggtggggaaggacaaagggagggaaaggagaggagaggagaggagaggagaggagaggagaggagaggagaggagaggagaggagaggagagcagaggagaggagaggagaggagaggagaggagaggagaggaagcacatgaatgatgcaaaagacaaaaaacacaaagttgtgtggacaaggaggtgtcaaacatttgagaggaattgggggaggagtgaaacatggtaaatatatttcataaaaatgttttcaataaaaaatgatggatataaatgtaagactcagggcatatagcattaaaaaagcagttcccaaactgcatcagttgtatgcaaattaaatgtatggtattaagagactaaggctcagagtaatgcagtggggacatttatttgttaccattaaacctgataccagtgttcccagccttagtcccatctactattactccttgagtaagctaacatgcttccttgaaagaaaaaaaaaaaaacaaaaaacaaaaaaacaaaagaacaaaaaccctgcttctgaattaaggaaatagctgccagcctgagtgctcatcttgctccctgtctgtctcaacatatctcctgtgcccctctctagataattaagtctcagaaatagcatcattatatccttatgcatttttaattcttccatttacttatttattcatcatgagtatatgtatgcacgtgtgactgtgtatgtgttgcacacacaaacatgccagagcatgtatgtggtaagttagatgacagcagttctctcattccactttgtagggcccaggaatcgattttatggcatcatgaattagcaagtgtctttacccactgagtcatcttgccaaccctcatagagtttccagaatagaagaacctgtttttcagacacagctcagggtaccgtttttgcatctgaagttagtagtttcttagtatcatatagtcagtcaatttaccacagagatttttctaattgattcactaagactaaaaactaacttttcaaacaaggtatatgtattataatgtattgccatggctctctgaatttaggggttaaggtagggtcacatagttcaggttcgcctcaaaattgctgtatagctgaggatgaccgtgaacatctgatcctccagctctaggtgagttctgagacacataggcatgctccaccccatgttgtttgttagtactgggatggaacccagggcttggtgttggctcagcttcctctcctcttgttttatgcttgctctcagatgtttacagggttgatgcttctgttattgattgggagtgttttccagtctggtgtggctgcttttgataccttggcattatctactatggttgtctcattccctagaaattgatgttgggagtcagagatcgacacatctggatatgattctcaggggagcagccccagatgcaactctgtactataccagccaccagaagttatgccttttcattcttgaaagacattactaactactgcacttgcctgcattcagtattttgataggcattgcacatgggtgaatgtctactctctctttcacatgggttagctggagacaacttaaaaagataaagatttttttctcatcaagtatttataggcagaatcactcacacaaaacaaactcactgtttctcttttattaatataaacaagctactacgttagttccttcacctccttttaaaatgatctgttttgttttctttctttggatgtaatattttttattttattttaattaggtattttcttcatttacattaccaatgctatcccaaaagacccacatatcctacccacccccactcccacttcttggcactggtattcccatgtactgaggcaaataaagtttgcaagaccactgggcctctctttccactaatggcctactaggccatcttctaatacatatgcagctagagacacaagctctgggggggggggagggtactgggtatttcatattgttgttccacctatagggttgcagacccctttagctccttgggtactttctctagctcctccattgggggccctatgatctatccaatagctgactgtgagcattcacttctgtatttgctatgcccaggcatagcctcacaagagacagctatatcagggtcctttcagcaaaatcttccaagtatatgcaatgatgtcagcgtttggaggctaattatgggatggatccccaggtatggcagtctctagatggcccattctttcatctcagctccaaactttgtctctgtaactccttcaatgggtattttgatcccgattctaagaaggggcaaagtgtccacactttggtcttcattcttcttgagtttcatgtgttttgcaaattgtatcttatatcttgggtattctaagtttctgggctaatatccacttatcagtgagtacatatcatgtgagttcttttgtgattgggttacctcaattcaggaagatgccctccaggtctatccatttgcttaggaatttcataaattcatttttttaatagctgagtagtattccattgtgtaaatgtaccacattttctgtatccattcctctcttgagggacatctggtttctttccagcttctggctattataaataaggctgctatgaacatagtggagcatgtgtccttcttaccagttggaacgtcttctggatatatgcgaattagaggtattgcgggatcctcctgtagtaatatgtccaattttctgaggaacaccaaggcttatttccagagtggctgtacaagcttgcaatcccaccaacaatggaggagtgttcctctttctccacatcctcgccagcatctgctgtcactagaatttttgatcttagccgttctgactggtgtgaggtggaatctcagggttgttttgatttgcatttccctgatgattgaggatgctgaaaattttttcaggtgcttctcagccattccgtattcctcaggtgagaattctttgtttagctctgagccccatttttaatggggttatttgattttctggagtccaccttcttgagttctttatatatattggatattactcccctatctgatttaggataggtaaagatcctttcccaatctgttcgtggcctttttgtcttattgatagtgtcttttgccttacagaagctttgcaattttaggaggtcccatttgttgattctcggtcttacagcacaagccattgctgttctattcaggaatttttctccagtgccccatattttcaaggcttttccccactttctcctctataagtttcactgtctctggttttatgtggggttacttcatccacttagatttgaccttagtacaaggagataggaatggatcaattctcattcttctacatgataactgccagttgtgccagcaccatttgttgaaaatgctgtcttttttccactggatggttttagctcccttgtcaaacatcaagcgaccataggtgtgtgggttcatttctgggtcttcaattctattccattggtctacttttctgtctgtataccagtaccatgcagtttttatcacaattgctctgtagtaaagctttaggtcaggcatggtgattccaccagaggttcttttatccttgagaagactttttgctatcctaggttttttgttattccagatgaatttgcagatttctctttctaattctttgaagaattgagttggaattttgatggggattgcattgagtctgtagattgcatttggcaagatagtcattttttagtatattgatcctgcccattcatgagcatgggagatctttccatcttctgagatcttctttaatttctttcttcagagatttgaagttcttatcatacagatctttcacttccatagtgagagtcacgacaaggtattttatattatttgtgactattgagaagggtgttgtttccttaatttctctctcagcctgtttatcctctgtgtagagaaaggccattgacttgtttgagttaattttatatccagctacttcactgaagccgtttatcaggtttaggagttctctggtggaatttttagggtcacttatatatactataatatcatctgcaaaaagtgatattttgacttcttcctttccaatttgtatcccctggatctctttttgttgtcaaattgctctgactaggacttcaagcactaagatgaataggtaggaagaaagtgggcagcattgtctagtccctgattttagtgggattgcttccagcttctcaccatttactttgatgttggctactggtttgctgttgattgctttttatcatgtttatgtatgagccttgaattcctgatcattccaagacttttatcatgaatggggattggattgtgtcaaatgctttctccgcatctaacgagatgatcatgtggttttttgtctttgagtttgtttatataatggattatgttgatggaattttgtatattaaaccatccctgcatctctgaaatgaaacctacttggtcaggatgaatgattgttttgatgtgttcttggattcgggtagcgagaattttattgagtattttttcatcaatattcatgagggaaattggtctgaagttctctatctttgttgggtctttctctggtttaggtatcagagtaattgtggattcatagaatgaattgggtagagtaccttctgcttctattttgtggaaagtttgtaaagaactggaattagatcttctttgaaggcctgatagaactctgcactaaacccatctggtcctgggcttttttttggttgggagattattaatgactgcttctatttctttaggagatataggactgtttagatcattaacctgatcctgatttaactttggtacctggtatctgtctagaaatttgcccatttcatccaggttttccagttttgttgagtatagccttttgtagaaggatctgattgtgttttggatttcttcaggatctgttgttatgtttcccttttcatttctgattttgttaattagaatgctgtccctgtgccctctactgagtctagcaaagggtttatctatcttgttgattttcttaaagaaccagctcctcgtttggttgattctttgaatagttcttcttgtttccacttagttgatttcgcccctgagtttgattatttcctgcagtctactcctcttgggtgaatttgcttccttttcttctagagcttttaggtgtgttgtcaagctgctagtgtgtgctctctctagtttctttttggaggcgctcagagctatgagttttcctcttagaaatgctttcattgtgtcccataagtttgtgtatgttgtgacttcattttcattaaactccaaaaagtctttaatttctttctttattccttccttgaccaaggtattattgagactagtgtttttcagtttccatgtgaatgttgactttccattatttatgttgttattgaagatcagccttagtccatggtgatctgataggatgcatggcacaatctcaatatttttgtatctgttcaggcctgttttgtgacctattatatgttcaattttggaaaaggtaccatgaggtgctgagaagaaggtatacccttttgttttgggatataattttctgtagatatctgctaaatccatttgtttcacaacttctgttagtgcccacgtgtctctatttaatttctgtttccaggatccgttcattgatgagagtggggtgttgatgtctcccactattattgtgtgaggtgcaatgnnnnnnnnnnnnnnnnnnnnnnnnnnnnnnnnnnnnnnnnnnnnnnnnnnnnnnnnnnnnnnnnnnnnnnnnnnnnnnnnnnnnnnnnnnnnnnnnnnnnnnnnnnnnnnnnnnnnnnnnnnnnnnnnnnnnnnntttctttaatgaaatgtggatgcccttgcatttggagcatagatattcagaattgagagttccatttggatgattttaccctttggtgaatatgaaatgtccctccttgtcttttttgagaactttggggttggaagtctattttattcgatgttagaatggctactccagcttgtttcttcagaccatttgcttggaaaattgttttccagcctttcactctgatgtagtgtctgtctttttccctgagatgggtttcctgtaagcagcaaaatgttgggtcctgtttgtgtagccagtctgttagtctatgtctttttattggggaatttagtccattggtattaagagatattaaggaaaagtagttgttgcttcctattatttttgttgttagagttggcattctgttcttgtggctgtcttctttcaggtttgttgaaggattactttcttgctttttctagggcatggtttccgtccttgtattggttttcttctgttatcatcctttgaagggctggattcatggaaagataatgtgtgaatttggttttgtcttggaatattttgttttctccatctatggtaattgaaagtttggctgagtatagtagcctgggctggcatttgtgttctcttagtgtctgtataacatctgtccaggatcttctggctctcatagtctctggtgaaaaatctggtgtcattctgataggcctgcctttatatgttacttgacctttctcccttactgcttttaatattctatctttatttagtgcatttgttgttctgattattatgtgtcaggaggcatttcttttcaggtccagtctatttggagttctatagggttcttgtatgttcatgggcatctgtttctttaagttagggaagttttctgctataattttgttgaagatatttgctggccctttaatttgaaaatcttcattatcatctactcctattatctgtcggtttgctcttttcattgtgtcctggatttcctggatgttttgaggtaggatctttttgcattttgcattttttttattgttgtgctgatgttctctatggaatcttctgcacctgagattctctcttccatctcttgtcttctgttgctgatgctcgcatctatggttccagatttctttcctagggtttctatcttcagggttgcctcattttgggttttctttattgtgtctacttccctttttaggtctagtatggttttgttcatttccattacctgtttggatgtgttttcttgtttttctttaaagacttctacctgtttggttgtgttttcctatttttctttaaggacttgtaactctttagcagtgttctcctgtatttctttatgtgagttattaaagtccttcttgatgtcctctaccatcatcatgagatatgcttttaaatctgggtctagcttttctggtgtgttggggtgcccaggactggctaaggtgggagtgctggtttctgatgatggtgagtggtcttggtttctgttagcaagatttttacgtttgcctttcgccatctggttatctctggagttagttgttagagttgtgtctgattagagcttgttcctcccttgattctgtcagcctctatcagcagacctgggagactagctctctcttgagttttagtggttagagcactctctgtaggcaagctctcctcttgcaggggaaggtgcacagatatctgggagttcggacctgtcctggcagaagatgaaggcctgaaacatggcttgtcccagaatctgtgtagcttctgtagtccacactctcacctgcgcagactagtcttggtggactccaggacccaagatggctcccacagatgctgtggcaaagccctccccggtggtgtggacacctctcctctggcagggaaggtgcccggatgtctggagcccataatgcggtctgcctcagaagctctgtcgcttccagctgacccagaagctgctagcttctgtagttcacactctcacctgccctttggaggtaatattacaacatgtactcttttgaatcctgagtaatcattagctgtttaagtcttcagctttctatgactggtaggagccacttctaggtggaatctgaatccatttagcaagattctggaatcctttcattagcttccagatagctttattaatttctgctgagggaaagctattatctatatttcatgcaacctactgcatactgggttttggttttgttggttttgtttttattttgtttggtttggttaggttttgtttggtggttgttccattttattttgcttttgagatagggtcttgctatatagctctggctgtcctgaaactcactttgcaaactaggctggcctgcaactcatagccatctacctgatgttccctcccaagtgctgggattaaagacatgtgtcaccacacctggttcatttttgtgtaaagttgtattcaaagattatagtctacagagcatattaattttaagttttgggttacagtgcattttaaagtgtgtgcgtttctctctcttagataaaggcacagtagcatccattccttacacacggcatctttttacagtgaacagtatcttccataggtcactcccatgtttgcacttacagctattctgcacttctctatatgactttataggattccattgtgtggcagcaccatgctttatctaagctttcttcaacagtgaacacctgctactctcacacttcagcaggaagccttccctgtattctgaactttgctccctcaaattgtgaatgtgaatggtggcttagtaaattctctagggtcacatgctgagctgggatcaaggtagcacattgtttagtcctggagtgcaggttcgcatttgcccattgtctcttctaaagcactggcctggagttctgttattgactgttgaagctgtgctgatctgtagctcagatcaaggtctgcttagtgtgtagttgataaaataaggattactcttcactgaccaccactccataaatagaattttactgaaaagtcaacttggacctgcaagaggaaagaaaagggtggagacattagggctcactttccagaaagttggaaactagtactggtcagaacacaggctgctgagtgtccctcatgactcagactgtttatctaggtcactttcattctggaaagacaggactattgagaataaatagaagatgctgttagtggctaggccagtggtacttaaccttcctgatgctgtaactctttaatatagttccttgtgttgaggtgacccccaactataaaatttcattgctacttcataactttaattttgctacttctatgaatcataatgtaaatatctcatatgcagaatatatatttgacccctgtgagagggctgttagaccttcaggttaagaactgctgacctagattatactcagaattctagttctagggcttagagagcaaaggcagtctctcaggccactgtgcctggagcccagggtttggccttctgcttagcaaactctacatatccttccatcaaaaggaatgttatcatggtttatagatccaacccaggaagtccttgtgcactttggttcctccaatgaatatcttagacaagatttacctcttcctggtacactaagtgagaagttagatgtgagcttgtaacagaagcaaggagtaaaaagggacctcagaaaggcaagctctttagcattgttaagaaccagtgaattcttagtgctgagtggaatactagttatatatgaattctcaaccagtagtttcatgggtgtgtggatgtgtaaaaaaataattgtgctccaattaaaacaagttttgtttgtttgtttaaaattgcatgagagagagagagagagttatcaatgtcctaattccctttaaatgagatctctcattgaacgtggacctctccatttggtctagactggctgaccaggaaccccaggaagccccagtcccttccacccaggggtctaaggttgcagcacacatggttctcccaagtgcttgtgcagcctgtgctttcacccactgccatctcctcagcctggaatgggaacataaccaccagtgcacaatggtagagctacatcacaagagtctgccatgtgcaggcttccctcttgcatttttctgtcttgcacctttaaaaatcccctcccctctccagatctttctagccagtgctaaagaattatgtctcccccttagcacgaaagcctgactctcaaaacagaacacaaggcaggtgagtactaggaggaggggaagcattagggaagaatgatgagaaagcccctcaacagaggaatggatacagaaaatgtggtacatttacacaatggagtactactcagctatttaaaaaaatgaatttatgaaattcctaggcaaatggatggacctggagggtatcatcctgagtgaagtaacccaatcacaaaggaactcgcacaatatgtactcactgataaatggatattagcccagaaacttaggatacccaagatataagatacaacttgccaaacgcatgaaattcaagaagaacgaagaccaaagtgtggacactttaccctttcttagaaatgggaacaaaacacccatggaaggagttacagagacaaaatttggagctgtgacgaaaggatggaccatctagtgattgccatatgcagggatccatcccataatcagcttccaaatgctgacaccattgcatacactaacaagattttgatgaaaggacccagatatatctctctcttgtgagattatgccagggcctagcaaacacagaagtggatgctcacagtcagctattggatggatcacagagtccccaatggaggagctagagaaagtactcaaggagctaaagggaactgcaaccctataggtggaacaacattatgaactaaccagtaccccggannnnnnnnnnnnnnnnnnnnccacggggattctccttgctgctgccctggtgctgtggttatgaacatgttccaccatacctcatgctccatgtgggtgcgggggaatgaagatcaagagaatgtggcaagcactttgctggctgagatctcaccttctcaccttcccagccagcacctcgtgtctttaaagaaattttaggttcacagaaacattgagcaaaaagtataggaattacacatgcccacacctacaaaattttccctattcctacatcttgcattggtgtggtaaatgtgtttgtcatagttgtgaggctacaattcactcagtatttttaactaatgtttgtagttttcattagggtctgcatttctacctttacttttcaatttcagaatactttaaaatgtggttcctacttaatctctctgcctttatggaccttgaataggtgttgttagatgaaagcagtcaagatctctgtggaactccaaatacccagcagtctgcagagtggctgccaatcaattgtgcctttgtcatcgctcatgacaggacaaggttcttatcaaaatcaatttcagtgaggcttctggtcatcatttgtgagatgttgtattgaagaatcttgtgtagcctatgtgtagtcagtattcagggttttccaccttattttctaaaaataattgctactgataaattttctattacacttccaaggccctggatgctgtgcacgattagcaatctcatatgttgttgggctgcactttttaacctgttctccagccaaatggaactgtttgtcacctcaccccaattgtcagcgtgttcattctgagatctgtacctagaaactgacaaaaaaaaatcctttatgtttccttcaactgcctgccattctctcatgtatctcctcatgcctgttgtacttctaccccaacatgcctttctcataacttctgcatctctccattctccttcctattctccctgctacccctgggtctgaaattggagattctgttctatttcaaaccctcttctcaaatgtcatagcctacacataacacggtcctctttgcacattgactctcagggtgctcaaatcatgcctactcttgttcgttgtatgtcaatgacttctcaatgaattaggaattaaaccttcactttggcatgtatggtctgtgccatcatgttccatttcctgttcactgtgtgctagtaccctgccctccatgatcacatccttccccactcttcataagtaccatacagcatctgttcacttcactagtcacaggtacatgacatatagccatgcccaccaagatcttcaaggtaattctgttaacattgatgagacactgccagtttcaatgatggtgcagaagcagcagtgaagaaagttagttttgccttagcatgacaagggcagcaataaatcatgtatatggctgcagcaaggaaagaattcagtaaacatagcaacctatcagcatctgctgtgtgccacaagaacatggttgggtaccactgccttggtgatgctgagatagcagcatcttagtggtcatatcacatactgtgagcctattcacaccatctctgcccactcatctctcccattctctcccaactggcctcactctatttcatgtcaggcatattagattccattggatttgatagagatagctatggagaaatcacttcatgtttttatataacatctgtagttaattgagggagagaagatggaaaccagagctgggtccatgatttggagcctgtgaattgtgcttctgtagcatgagtgttcagctgtctgtgtgctttatataactggattgtatggcagatgtatttttatatttttgaagtaatgtccatggtgactggaacaccatctttaactgaaagaacaactaaaatgcaaatttaagtatttcacagatatttttaggaaattaataaaggggaccaaaattataaaggtagcatttattgtattttgctcatgttagagttgcacagcttaacccacaactgtgagccgggcagcttctttacagccttccttatccattgcaggattttgggtaatactcatgatgatattaaataatacagtatttttgcacataggtaataatatttgttgacatttgaaatacttgcatgactcaatgagcaaatatttttgtatgaacaaatttctttgacttgcatgggtgcaagtctttcaaagaacaacaacaaaaaatctaatggatcttactgttgttgaggataagacatttattgatatgatttcaattttcatattgctactgatgtataaaaaaataccatcctttgagctttgtgatggtgctggagaagactgtcacatttacctagcatggctatcaaaagttttgtttggaaagcaatgtcatctccacaaaagggcaggttccttctacatacaccagtcagagaaatcctggaagcagattgaatactgaagcagaagttagaatccacctgtcctctttttatccaacacagatttaaaatgctattaaatgctccaaatcttttcactattaaccttttaattaaatattttgataattattattataaaataataattaataataaaatattaacctcttaaaaatattttcatacaatgtgttatttaggttaatgtataataagtttattcttgttaattttaatgaattaataaataatttaaacagtccagttttaatctgagttatagtagatatcaagagatataacacaatttgcctaacagaagccctttcgggtcctcagccatgtttcaagttatgtgaagactttgaaataaaaggctaatggctttcaaaagcctttgatctgtgctcctttgttggttggtctgtcaaaagaatccaagtgactagtgcctcagtgcctccaaagtggaggaaaaacgtatttctaaagaatgcattgttttcaagggcaagaggtagatcatgtttccctgttctgtgattggtagaagcaaatctctatccttccttttctcccttttatcttctttatttttaatcatgatgttagtttgttgtttgggagttactgaggctggaaactggggcctcacacatgctcactgtgccagtgagctagcatcctatacccagagcatttcaccccctcctccatccagctgtcaacccgaagtccttctctacattccttttcctgtccctcttctggcagatagctgttttctgggaaagtcctgtcttaatcagtgttcacttactgtctccaagtttgtgtccttttaagtcctagaacgctttttggtagtgtcatatggtgctcctctgactttattctttctttcttgcccaaatagatttttaagaataacatgatcaatggggttttctattacttaattatttaaaaatgcagacttaatttgagaagtataatttcactaaatatattcagtttctactctaaaattaaaaaaggaatacacggaagatggatgcacaatgatagagcataacatggtgatagtggagcattagtgtgtggtaagactctgtctcaaaagataaggtagagagtgaaagaagtggatgcccaatgcccatgtacatactcatgcatgcactcacaccacatgggatatatatatatatatatatatatatatatatatatatatatatatatatatacatatatatcaaagaagacagacagacacgtgcacacacatacaccaaaagagtagatttccactctctcatctgtgttcagaatgatacactgttaaattcacacttacaggatagatatggcttccttcatcctttatgcaataggaagcatattacccaatgaatactttatcaactgtgctttcctctgtgactgcagaaaggcatatgtataacagaaaagcagttggctgcaaataaaagaaaaagagaaaacattcagtggcaaggactattcagggctcatgcatatctccatccttacgtccaagatatgtattaacaagcattgattcagagattcactatttctacaatgttcatagtcttttactccagctgtagatactataattgtttgctctgtccagagaagaggcaacaggaaggaaaatattaacaagcattgattcagagattcactatttctacaatgttcatagtctttcactccagctgtagatactataattgtttgctctgtccagagaagaggcaacaggaaggaaaatatgatgtctctgggtagattcctttttctgagaatttcaaatgtgttctccaaagtccttagagatatctggcactgtcacgtggccatccctactttcaaggagactggacagaagtaatagccattttaacccctaaaatggaagggctaaggaagaaaacatagtgaataccaaccacattcatgcaatttcaaaagtgagcacataagcaaaaggaaacatgaagaagatgaaaagtgaaaggaaattttaataatgacaataatcctttcagtacatcataggagtcattgctgtacactgggcagtgttctgtgtgactcacatatatcatcttgtctgaacctcataaaaaccctggaaggagaaagcactactttacaaggagacatcactgtcctttgtttttgagggacagacacaaaagtgaattacttgcccaagatactgcagtataaaagcattcaaccagagctggctctggcttctctcttcttttccttgagacaatcacttagaacatgatgtttcctcctgactgaaatctatctcacactcctgccaaatgctacaatgagttacaaatggcctgcaggagagtgggaatttccagaccttggtaatgaagcaatttgaatccagggtgtctgagtgactcttgcaagtactgcagtgcttctctctgcctatgacctgtcctctctataggttttcttctcttaaaactcattgctgcaattttcagttctgaccttgatgcccagtggctgctgcacctgttaaatgctgttagatgtccttctactttaggaggctctgtcgataagtggcttttgagggcctatttgtttgtttagagttgggcaatcattgtcagttagcctaggcaaattactttagtttgtttgtgcaagatcatcttctgggctcagccatatttactaggtcagttaactttcacccagacagaacctctgtcccacagactgaactcttagtctacctgtttttatgaacacctaagattttcattttgtcagtcactaacaatgaatattaggaagccaagtaagcaaatgatctttgatctgacagataagattgtaccttggtaattttccatctcgagaacttagtatacatgaatcatccactaagttaatagattcagtcaacaaatacttgttgagagctaattatgtacaaagcactaagcatatcagcatgaaggtagatagggttgggatatttatgaaacacatttttgtgggaggcagattttgatcaaatacagaagacctaaatgcccatcagcaagaaactagatgaacagtggcagaatcacctttactttggaacagcaataatggtgaacaatctattgctacaccaaactctgtgactagatctgttgttcatgactgtactagtatcacactaagaagctggaaaaactgatcaatgatgataggtgtggagccattttggagagcactatgataaataaaaaaagggggggggagatataagatgattcaacaggaaaaactggctgctgtcaattctgacagcctgaggtccatcccaggcccttatggtagaaggagaaaactcccatagtcttctttctaacaagcatatgcccactgtggaacaagtccatatacatgcacatagaaatgcacgtgcacacacacacacacacctaaacaaacatgtaataatttttaaaaaaaaggttctattggtttgcagagaaggaagtgaaaatcgattcttattcagaaatgagatctgtttggagagagctcttgtaataaggggaggacatgatccagccttgagttgtgagagcaattagtgaggctaatatcaaagacatggcagggacttaaagagaaaattatttaaaacctggagaggatgttcattaagatagtttaaagtaagagagagagagagaccatgtacaatgtacaacatggtaggatcctgaaaggggaagaagaaaggaaggaaaggaagggaaagtagaggcaatcacttctatgagttcaggaggaggaagtctggcagtataagcagcagagacgaggaaaaacatttgtgtacaagtccattctccttaaggactacatcagtcagagatagagaccaaaatcatggtagaggcatggcctgattcctgacatgggggaaggtatctagggtgcctgtgatctacagagaaggccatgacattggagtcctgcagcggatctaggcctcgctattttctcttgctatgagatgagagctggttacattggagggttaattttgtaagaatatatgtatcctgctcttgtgatgtgtttttgtatgtgtgcatactatgatccattcaaatgaatttatgctacacaatataagtattgacaatgtaatggctttagggaaattcttaggaccagtacaatgtgatgggaacataagcatgacacttggtcaggaaaggccatcttagagacgtggggttgtgttagattcctgggtagtggctatatggaaaggcagaaagatgacctcgttagggaacagccaggatgaaacttaagacaacaaaggctccagagcatcagcaaggcagcagtgttctgaggtgggcagaatgtgttctgggacagggcagaattggacatggagaagcacagagttcagtctcagctaggaccttggaagtgtctagttaccgtctccctcaattaactagactgaatgtgccaggcagtgggctaagtccccattcccttttaatcttccaaacactcttgggacacaggttcccacatttttacatgaggagccaaggcttagagaatgcagctttcccaagcttaagtgggtacaccaaaatataagcctctgcccctttgatcctaaatgttttggtctgaactctaagcaatgcccctgtctggcatggtcctctccactccggcggcaacaggaacgacacggacaccaagtcaggttcacgcaatggcttctttacttcgaactttttcccctacagctctcttccccagcagcttcttctactacctctgtccttctcgcagcaagggctaaactcctattacaacagcttcttttactactccttctactcacagcaagggctaaaactatattcatgctgactcacctccttctagctccaccccacctcatccaatcagaattcacacatgctccaggcacgagctcaggtcattaacaggtaggctgacaggtcccaatttcgaggaacagtccagcctggcaggcagcccacgcatgcagcctcactgcgcatgttcagggaaggcagtaaacaagtgggtttcatggggcctgcggccgcacctgcttcccacacctgtctctgaagagtagtactttgtgtgactcctttaaaagtactgagaaaactgtaaaactctacatagaggctactgagaaataacatgtgggctgaattgtgtagatatgtaaaatccctcacatctggtcctattagaagaacaacatgtgcagtctaatggtaagacccatccatagcagctagcataggctaaacacatgtcccatgtcagtcctgtctctcagcatcctcactgccatcttatgcaatcagctttggtgacattacatggaagcaaacacagagataaacacaggttcctctttgcctgatgagacaaagttggagagtttatagattaactgctttatagtaaggaaatggtaagtgtcgatggaaaggaagcaagaggagacttcaggttctgctatcagagttttccttgctcccctgtgctgtgagcttaatgttctcaaagttttttgaaaccagaatttggtccatgacaccactgacattgagaagccactaggcaaagacagcagttgaatcttcaatgtgatatgtggtcatcaaatcatataaggaagggcagtctctcattccaaagattattcctgctcctctggtcagtggccagtctttatccctgagatgtatgatgttaaggtcttcttcatctcatgctcccaatgtgtagctggacttttgcatacactaaggaaaataagcatcaaattttaattatatgtagatcaaagattaattcagagcaagtaaaccattaattatgtgcacaggattgtctatttacattgtgtgtgtgtgtgtgtgtgtgtgtgtgtgtcaaaaggatccaaatctgtctccttcttgttttttttcttaagacttgtatattctgtagtttctcccctctgaaatcctagaacataatttgatctagctctatatgcttttccttttccatatagatggaagagctctaaggatatgcttcaatgcctttagactaccaagtgctttgacctggtaaataagatcaaggaatggctgcgtttttttgactattgaacccttagattctggcagagctctgcattcgtgcttggctctttgtaaatgcctgtatataaatgagctccatgcttatttattggatgctcagatttggctttagtcagcaatcagtcttgatcacacagatggtgtgtgctcctaattttatttcaattactaaagacaaaagcttaccctaggctgcttgcccccttgtctcacaaagctaagattgacaagagttggaacggatcctagacataaagtccatgaaatacccttgtttgttaagagcagctaggaattctgatgttagtaatttctacctaacctgctttggatggacttgtgctagcatgctgtcttgtgaatgggttccctgttgctaatctaggtgtaattcaaacttgaggttcattttccatggtatatgcagaagtccagctacacagtgtgaacatgaaataatgagaaagaccttaacatcataaattttaggaataaagaaagttgtgcagttctgctccagaggcaaacagagtcattgtgtaatagtattggatctgaacaggaaatcataattaaagatgtgtgttccttccatattctaaggctattccattcaatgtataattcaactgtggtgtcctagaagaggaaactatggcttatttgcaagatacagcataacacaaatgaagtgcctcattggaagttcatgtcatgattacatgtgaaagtggtttggagacatattggttaaaataaagcatttgaaagatcatatcaactctttaaaagtttacaaatgttcctaatgttgagtggtggattccctagagcatggcaagtacgaatctcgagagagggaagaagactcagtcttttaatgcctgctgcatttgtgtaatgatgatccaaggcccacagacaggaagaatcctgtgatcccagccccatgtacaaataaaatactgcaatcccagtaccctatatacatagaatctggtgatcccagtcctgtgtacacatagaatcccatgagtagaatcctatattcccagccccatgtacacatagaatcctgtgatcccagccccatgtacaagtagaaacttgtgatcccagccccatttacacatagaaacctgtggttcctgtcccatgtacacatagaatcctgtgatcccagccccatggacaagtatacacttataatcccaccactgaggaggcaaaacaagacagctccctagaacttgctgaacaagcagcctagtgtattctgcaaacctcaaggcccagttagcaccctgattcaaaaaacatgatggatgcctcctaagaaataatatacaaggttgacctaaggaatcttcctgcctatacacatgtgaacaaatatatatgtaatgtgtgtgtatgtatatatataagaaatataataaacaaataagcatgaatctcgtcaaacttaaatcttttcatcttcctttgcttccatatccctccctttccagttctccaaaacttacaatctttagtcagagtacccagctaccagctatgaacattctgggaacccttcctgttttatttcttgagtagaaactcagatgaggtttcagtctcctagagctttaaactttattttctacttatattaatttctaataataaaggcctttgaaatccataaagaaaatcaatacttctttaattaacaaacaaaaccatgtgtgttgcatacaacctgctttatattatgcctccaccatagaacaggttaaatctaaatggcaaagacatcacctcacacaatagcattttcgtagtaagagcactcaccatccaccttccaaactgttaaagaatgcaacatctgagctgtagaggcagttctgtggtagaatgcttgcctagcatgcaagaagaaaaaaaaaacatgaaaaccatagactcaatccatagattgactctctctctctctctctctctctctctctctctgtgtgtgtgtgtgtgtgtctgtctgtctgtctgtctgtctgtctgtctatctctgtctctccctctctgtgtgtctgtttgtctgtctgtctatctctgtctctatctctctgtctctctctcttggcacatgaatatgctcacatacacccacatacatacacatactaaatttgttgtagtcagcctgttaccttgctagtcaataaggactcaattcacggaagagctgcaacctcatgaggcagtaagcagttaaaatgcttactgtatccaaatggaaaaatagatagtgagaccaaatgcacttattcaaagccagccccattctagagaagcttcaactccctggccagccctgaatttaagtggcttttccacaagacattatggtgctactggaaagttatttttctacaagaactgtggctgtcagaagcatgtcatccttcattttgaaacaacatttttcaaagcctttacctttttagaagtcaggaacttgaactttgagtagtttatgaactttatatagtgtcaacagaaagtagagctgtttcaaggctacccacagataatatctttcctgcactttgttcattcagttaaatcaacattaattgactgcttgtcacatgtaaggcactagggaggctgcagggaaatcttagtgaaaaagatagcaaaatgggcttaacacatttagtcataaccacaagtcataaagataaatgtttgcttttgagtcacgtgtgagaaggtcttagtctgagctggaattttgagtacttcttatgccagatctgatcatgttgatggaagatgggacattcacaagaagaggaggataattggcatggatcttataggactatttttcttggatacaagatgattagggttgtgaaggcagttgtacagaaagaattgcccaatatgccacctcactccctgaacctcagtgctattgactcctggccaagggtgtacccacactaccagaagttccacagcctctgcagggtacaccttactaggtgttcagacctctgaagaccctgcaggtagagtaagtatccattatgcacagtggagtgtttgcaatgcagagtagagtgtctgctaggcaacattccaacggcagcctcttctttaaagttataaataaataaacaaacagacctgcttgtttgcttagtggtctttgctgatttctgcagtataattagtcccatgtggctcataacaccagccaatgatgcatccataaatgtaaatctgaaaagagacatgacccacttatctacagattctatcttacaagcactgtgcctataaataactacaggcacaaattaaagtaagaaatgaaaaaaatagcaatttctgaatataaccaagcatcactccctaagaaatgttttaacagccaactctttcaaaagttagaaataaacaaacaagcaaacaaacaaacctacttgacagcacttgctgatttctgtggtaacagaattcttgtgtggttgtaaagcaatgtattaaactgtggcttgtactatttttagcaatgaatgtgttccatgtgagttcagaaagtttgctcatttatcaggccagcccacactctgatagatgggcatctttcttgtgaagtagtcacatccctgtttacatgaagccttcaaggttctctttctctctctacagatcagcaaacagcagctacagactgtcaaagaccggttccaggcttttctcaatggggagacccaaatcgtagctgatgaagcctttatgaatgctgtccagagctactatgaggtaagcactgtccgcaggctgaagctccagcctagcctactgatctgataaagactgcagagggtgtagcaccttggctgatgcagaggtgtcagtagtcatctgacaagggactctatagttgtgttgtagagaatgatgcaaatagctcctgcagttgggcattggactgatgactcggtatgcagagtgcttgacacataagcctgaagacttgagtggaatccttagttccacatacaagtctgagttcagtgttgaatgcttgcaatcccagtgctggggagatggagacaggagggttcctgaggttcattggtgtcttagttagtgttctgttgctatgaagagacaccatgaccatggcaactcttatagagaaaaagcatttgattgtggcttactcacactttcagaagtttcatccattatcattgtgacaggaagcatggtggtgctcagacagacatggtgctagagatatagcaagagagagactctgagcttggaattggctgttcaaaacctcaaagcccacacacttcctccaacagggccacaccttcaaatcctttcaaatagtgccactccctggtgatccttcatatctatgagcctatgaggaccgttctcattcaaactgctacaactgatcagtcaacctaactcttaaagccttaggttcctttcagtaagagactgttttaaaaaacaaacaaacaaaaaaggtgtctcaaaaaataattccaaaataataagatctaaagttgatttttagccttcacatatacatatacatatgtgcatgtacatacatggacacatgtacataaaaaagctgctgttttcaaactcatttttatatatagacaatgtactgtgttccctagaacactttatagctggttacctaaaatattttccattttattgatatactaagagtcagaaaggacaagtcagctactctaacaaaacattttgcatagaagcttggaaatgaaactgaggtcttccctttccccatattctgaaagccagtgggagagtaatgagagaaagtttgtcaaaacgggcagccgcttctcatgtttatacttgtcaactcgagtttgtagatctgtatattacaaatcctaattaagacacttatttgagtaatgatacaaattacaagaaagtgtcatttctattaattaaaattgaaaattaatcatcatcagcatgctaacaagtctttggaagtcacgataactatagtgatctgttagtttcattggtagttcctagttttctatgaaagagctccttctgggtctggtgagggatggagaaggattgagtctttcctgttaaggtttgagtagcatagaaaagaatggagggatttgaggtccagctactgttttcattagctagactttagagagccttagattctcatttctagaaaggctaagcccctaaaatgcagatgagagatcagaattagcactgtgccagcagacctcccagggggtggcactctccttcctccattttccaactcttttctatcccttgcaaaccttcacatgcacctctgccaacctctacctctgccaggactttgtattgcaaatgacctgcagcaagctcaaactagtttaaacctaaagcggatttgttcaagaaactttgttaccatgttagggctagccttaggcatggttgcatttggagatgccaatagtatgacaatatagtatgcatcctccctccatatttctgctagctccatcctgcattcctgcatgtaagaaatgcaagcatgtcccaccaggttagcaactccggggacaaagggaacacagttctttgctgagaactgccaaagcctagggactttttctcagttggtaaggttgaattagcctgactcaaggctcaagaccaggaccacctctgtaacctgagtttaggctcagcctgtttcaagcattgtagcaaagtgtaggagtttccctgagagaaattgggagttgttattattgtcattgggtcagaactatgtggctccattcttggtgacagaggaaaccaccaatggacaagcctttttttctacttcattctaaccctatctcccccccttacttttcttctccctttctcttccttctgtctatttttctcttctgctctctttccctccatccccttccctctctctttccttctttctctccatctctctccggtgtttgcaagtacacacctctgtgtatgtgtgtgtgtgtgtgtgtgtgtnnnnnnnnnnnnnnnnnnnnnnnnnnnnnnnnnnnnnnntactacagtagataagtcagtcatagccattaccgttgttcacatactacctactactctagtagagacccattaagggtaaataaaaaaagctgagaagcactcacttttacccacttgtgtgcccatccagcttagtctgagacaagccatccttagctgcaaggggagaggggaaggaggagcagaaggaggccaagtgcttcagtggctatgaagaatacacaagtttactttcttccttcctagtgaccctgattgcaaggccaaacaggatgcagattattccttgagtctcttgaattatgactatgaggttccaggaccgcagcagattctctcagatgtgatctaatcactgtccttttacctccacatggtcttcaggccagtcatcaagtcatcatcaggatcccaagatttttagataaatgtctcatacatttgacactacaatgccttcatctatagaagtacccccgtgtgtggtttgtgtgtgtgtgtgtgtgtgtgtgtgtgtgtgtgagagagagagagagagagagagagagagagagagagagagagtgtgtatgtgtgtgagtatgtgtgtgtgtgtgttgtgtgtgtgtgtgtgtgcatgcgcgcatatggtagtttcaaattaattctcttaatatcaagctttattcttattcacattctcatgtgggataattcacttttcaaaaaattatgtgtgtgtatatatgtgtgtgtgtgtgagagagagagagagagagagagagagagagagagagaagggggcggggggagatcaactcttattaattcatgctacagtacacatgtaaaggtcagagaacaacatacaacaagcctgttatcgccctgcccccaccttattttttgagtctctcctgttgcttttgctttagatttatatgtaagttcaaggaattgaattccacttaccaggattgagctctgaatgcctctaactactaagccatcttcttggccaagaataatttacttttaagactggaaaagatctgccctagcctcagtctgtcagcaaggaagtagcagctaaaccaacctccctgtatgtgcatatctgttagatatgaatgtgttcatttataaaacaatctggtgagtccttagcaatcatggaaggcaaggctaatgaatggaccttaagtattacatatcttccatctagcatccagacatgtttaggagatgtcaaaggttatgaatgccatagatagaactgttcccaagactgaagccactaagaaagaaaagccaacacaaagaatacaaagagatatactagtgttcatacaagttgactggtaccagctcaggcctcacttgtcttttggcacactaggaagccaggaagattagtgtccagctagtgtcctctgtctctggctgacttacctcctctgatactctgtttctccccatttcctcagtcctcagcctccctgttcacgttgatgtacccgtggctactcctgcatagctgaagtcacatggtacttctctgaactgatagatcacttttcatttcaaagtccactcagctctaccctcattaaagatggaaggctggattggcctcatgtgttggtgaaagacactgaggtccaaaagggttaagtcacttctgaagtcaacacaatgcccttaacacatactaagtgactactctgttcaaggaagggatcaggagagttggcatgtccagaatacactgtcaccatcctgtttgctcatggctatgggttctatagaatcttggtcctaactcacttttttggaggcccacatacatgtcttctgactcctgttttcccatctcattctgatataatctggttaatcagcagggtttctgctggaaacatcttcactgttcttaccagtacacttcaacaagtatgcattgggctcagctatgtgccagatactatgttaggtacaaacaattttacacacaaaacaaggaagctttgggagaaggctcagttgataaaaacacttgtcttggaagtataaggatatgggtttggatcctgagagcccatgtaggtaaagatgtacacagtagcatatgtctgtaaacacagtacttctaggccaagatgggagatggagaaaggaactcatggttcagccagcctggagtagccagcagtgaaaaagataccctgtctcaaacaaggtggaagaagaggatcaacacctaaggttgtcttctgacctctatctgtagcacttatgagtccacatgcacacaggcaaatgtgaacacacacatacacacatacactcacacaaattctcacataacccccccacatacacacacacatacacaaatacatacacacacacatacacacacatatacatatacactcacataaactctcacacacacacacacacacacacacacacacacacacatacacaccagagaaaaggagagaattaaaaatgaataaaaaagataactctttaacactatcttcctaaaacttagaatctaccctgagattcaaatatttaccaaatagtcataaaattatggcagatgaaagctagagaagggctttggaggaaaatgaatgtcatactgagagtttaattgggctctccttggtttgtggggctttggcatagctggggacaaaaagcagctccattgcagtttgaatatttttaaacctatcgtgatctttagagctgacaacaaagaatcaaagcccttgtttatgacaccagtgctccttacctgtcccctgggaggacttctcggttggctccttccactattatgccatgtcccaatttataaccgacagtgtttctctagtgttcttaaaatgcaggccagtggctataatgcctatgcccagagtcctggatatttagcatttcctgttcatctcatgccagcacatcctacacttcattgccatggcctatactcaattttccctgtctcctcaaacatttgacctttttacacaaattattccttaagtctgaaatatctacctcctctctgtttttctgtcctttgctcacattcacttaccatctcagtatttacttctgggaggtgtagtgactcccaaataggcacccctagatgctgggttcttcttgatgaccatagactccagcataggtacccctacctgttgtgcaggacacttgaacacactgtgacccctgagattgtgttatttactggggaaaaagctgttttcagttgtggtgtggctcagtgcttagcacacacctttaatccctctaactggactatagacctgacctaaatacacatctttaatcccaaacaatgaaggtaaagttggtttgtagaaggaagcaccatatttgaaagtgatatctaattgaacggcagacaaagtgatgaatcagagaaagatttgacaagatagggtatgtccaactctcacaagaacagggaagaaagacacaacataagaggggaaagaaggagaggcaaagggaaaaaggagaggaggcaattttaccaagagagttttacagggacaggttaaagagagaacaactagacaaaagtgaaactagaatgagccagagaataagaaggagccagaagatcagaacagattgctagagttagtctgaagccaagtggaacaattcagttagaagggaaagaagccagatcaaatcagttagcatggaaaggagtttgagccagaacagctgagttgaccagtaagtcagagttcagaaagaaaaagaaagagtgagcttattcaacagttaagtctcaaaagctgaaaacattctaggcctagatagattgtatggaggctagaagcttccaggagtaggcctatgttagcagactaaggctgtaagcctgagacaacaatcaagtcaggagaataaaagatacttttacacctacctactgggttgtccttgactaccatagactcccacagagggacccatgactgctgggttctgtgctgtcagtggtcattcctgagtgtgattattttgtatgaagttattaggtgatttctgttgcattctgtgagtgcctagtttatgtccagttctactattgcacctccagtacttatggtcatgaagacattgcagctggaaggataacactaagacctcataacttaactttcttacccttccgatgtgaaattggaaaatcagagagggagaatgatttatcccaggagacacagaatcttagttttgcatcctcatccataatgctgcattatcttcctaaagatgcctcaacttgctttgtaatttactactccttggtgagtgtatacagtgtgtgtgtgtgtgtgtatgtgtgtgtgtgtgtgtgtgtgtgtgtaaatttaaaggttgatactgacctcaggtgtcatcctcaatacctcttcaacttatatcttgaaacatgatctctcattgaacccagaacttggacatttggccaggttaagctggccagtaagcttcaggcttcctcctatctccacagtaccagtgcttggattgtagatgcacatcaccttgcccagcttttttatatggctgctagggatcaaactcaagccctcatgcttgcacatcatgtacttccctgactgagccatctttccaactccctattatttgaacttaaacctataggtgagactcataatatgtcagcttaagtgcatcatcgttaagtagtgcaggctcccaagtgaactctgtagctcatgaagtctgggtcagaccagaaaagtatttgacatgtttcctctagttgacttaagaattaactctcaacattatgaactaaccagtaccccggagctcttgactctagctgcatatgtatcaaaagatggcctagtcggccatcactggaaagagaggcccattggacacacaaactttatatgccccagtacaggggaacgccagggccaaaaagggggagtgggtgggtaggggagtgggggtgggtgggtatggggggactttttggaagcattggaaatgtaaatgatctaaatacctaataaaaaatggaaaaaaaaaaagaattaactctcacatctagttgagttgtaggtcccaggctatcaaagcatgccatggacttcacccaagaagacaaaccctccagcttcttttctaaatcacttcatttaatgaaccttaaatggagactgtattggtaacatgttttctcccagtatgacttggtcgtgatgcacaagggtgactgttttccacaagacactaggcactaccctctcagagcatgcaaggcaagtgctggtgtttggcaaggtgatgaatgtttgactggcctctggaggacctttacacaccttttggagcatgaccaagatacagttccgaagtgtcaggtgttttttttcccctctctgaatacaaagtggtagcaccagcacttgtattgcattcactgcgcatgagcttgcgtgagcttccaggtgtgggcagtgaagcaagagaaagctgtccttagtagtagagaagtcccagggctcagacagcacagctggaaggtcttctgcttggtggaagaacctcaaagagaaggaggaagcagagtgaccttaaaagaccatgtggatgctgaggagacagcttaaagggagcttgctgcacaagcatgagaaaccaagttcaaatcctcaggatccacgtagaaatctgagtgtagctgtacatgtgtctgtaaccgtctcactatagggacagagagacaacaatactggggcttgctgcctgccagcctaatgctgggttcaacaacagactctgcctgtctcaaggaagtgtggtggaagatgatcaagcaagatactgaatactgaatgtcctcctccctgggctctgagtatgcactggagtgtgtgctcatacatacctatgcacatataccacatacatatacaatgtatacactcatgggcctatggactctctttctctcccccactcttcctcttcgcctttatccccatgtgtctgtgagtagacactaaaatcaggcaatggaagttatgatgggcaagtccctactcctctgtgaaatcttgtttccccttctaccctcaagcatatccaatttgtggcccataggtcatatgtgacagaggacagaatcataatcatactaaaactacaagtttttgtgtggtcttttcctgtcttgggaagttgactgtatagttcttgtgcgtttgtagatgactgaatcatgttacagtgacaaagcttgcacacacctttcatagtagacagagcctaacagctacatgatccctatttcttctacagagtaccatgtgctagccagagactggagagacttgaggaacacagaaacttcttgcacacatacaattgcatgtcagtcaagggtacagaaaattggcacatattttcttgataccaagtttcagttatgataagtatcctttcaaagataaacaaggtgcatgtagtagttaacatttcagtgttgtgtgctagatacttaatgacaacgataacaacccacgaggcatttagggattcaggcactgttgtaattgctcttttcaaatgactcacttaattaaacaacctgtatagagttgagtattaccctattttatagacgggaacactaatgttccaaagagattcacttaacatagtttgtatagccactgggccgcagaaaatccagtcagtctaaccatagcctatgctttttctccacctatcaagagatcagtccttgaggccattttgtaagctcagtagttctttctgctataatctttacttttcacagttttatttagactgaaggtgttaaatgaaaaatttcagagttaagcaattcacatactttaaatagctcttattataatgtactgctataattgggttctcactggaaagtcttcaagaagaataaacaccacagcgcaagtcaagtacactaatatctgtgatttcaggcactcattgggggtcttgggacacactccctcaaataatggagctattatactatttttattcttgatttaagatttgggcactgaagagtgtgtgaaaggggcctatctgaaatcacacagcaaggacgagtaagtccatgtaaataaaaaacacagttcagggcagtggcacttccaatggctgactcaatttttcttgactgtcctttgttcaggtgtttctcaagagtgaccgtgtggcccgcatggtgcagagtgggggctgctcagccaatgactctcgggaggtcttcaagaaacacatcgagaagagggtgcgcagcctacctgagattgacggcctcagcaaggagacagtgctaagctcctggatggccaagtttgatgccatctaccgtggtgaggaggaccccaggaagcagcaagcccggatgacagccagtgcagcttctgagttgattctgagcaaggaacagctctatgagatgtttcagaacattcttgggatcaagaagtttgaacatcaactcctgtataatgcctgtcaggtaagtgcctgaagtagacatttaggcctagaactatgggtcagtggaaccactttcaagagtcacttcttgttgggaaaacattataaatcatatgttataagtgtgctgatgaaagattgactattttgaagactaaatggtaattatggttttataagttgttaaaagacactgaaacgtttatgtgagcccataagtggtccttggtctcatgaaccatagaactggcttcattgtgtgaggggagagtaggtcctgtgagtattgtgtggccttggtgaacaaaaacagcaatcaatcaacagcataactttatcacaaagacagttctatcttaaactgagtagtgtgtgcacggtaaggcattcctatgtctctagcaaagaacagaacaagacacaaaagctgggtttccaacgtgactgacaaagaaatcctgttcaagtttgggttgaatcacagcccgattccctcacttcatcaatctctgagagcaacagaatgagatatggaccttgggttctacttggtccacccccaaatagacctcgaatttgcctgggtggagccttggacagcaagttattggaagactctgatttcctacttaccaatctggtgctatccattcactcaacaaatatactgagtttactttgcaggctttgatctattttgtctgtgacacttgagagtatgtttaagatgcacattccagctccatccttagagagattcaacctggggccagcccaggaatttgaatgtcaaacaatccctttctggtaactatgttgtctattctccccaggagctgtcagagtcctcaaccttgctctagttcccctggatcaattccaggccctgtagcagtttgaatagagacactgtaagagattagccaagagtgtcccttgttcagactcacagtgactacgggaaatgctcttctggactcgaactagctttgaggccttggagtttgtgatccttcccatgacaatttgaaattataatgagttaaaagttgattgaaacttatgagggtatgcactatatcctgtgagagttaaaggacacatcccattgtaaaagttttcattagctagtgctacgttaaaatggcagaaagatgtgtcttacctactcaaattcacttgctttcttagctcatcttttccttgaggaataatgcttgtgaagccccacccttgatgtgctaggagggttttttttttctgttttgttttgtttttattcttgtttttttaatacacattaaagtgaaacagagctactaaaatagaaatatgtcatcactaagccttctctatttttattacatattttcctcaattacatttccaatgctatccccaaagtcccccataccctccccaccacttccctacccacccattctcattttttttggccctggcgttcccctgtactggggcatatacagtttgtgtgtccaataggcctctctttccagtgatggccaactaggccatcttttgatacatatgcagctagagtcaagagctccggggtactggttagttcataatgttgttccacctatagggttgcagatccctttagctccttgggtactttctctagctcctctattgggagccctgtgatccatccaatagctgactgtgagcatccacttctgtgtttgctaggccccggcatagtctcacaagagacagctacatctgggtcctttcaataaaatcttgctagtgtatgcaatggtgtcagtgtttggaagctgattatggggtggatccctggatatggcagtctctacatggtccatccttttgtctcagctctaaactttgtctctgtaactccttccatcggtggtacatttacacaatggagtactactcagctattaaaaagaatgaatttatgaaattcctagccaaatggatggacctggagggcatcatcctgagtgaggtaacacattcacaaaggaactcacacaatatgtactcactgataagtggatattagcccaaaacctaggatacccaagatatacaatttgctaaacacatgaaactcaagaagaatgaagactgaagtgtggacactatgcccctccttagaattgggatcactaagccttcttaggtcatttactactgagggtgtgcaaagtcagccaaaacaaccagtactttgacatttcaagagttgggggttatctctaatgccacccccaaaataaagtcacactgctcagagcagcaaaaatctaatttgtgcctaagttggctgcaaagaagagagagcatatactatttcctccagctgccacctagactgcatgtagacagagaggattctggactttgccaagccctgttactaggagtcacagatgaaagattcaaatcctctctttctcagagtgcactccaatttgcaagatgctgccaaagcacaagaaagataacatggacacagaattgagatgctttcattctgacccagtggcatattttattgtttagttttacattttctatgcctttgtgtccttacaagatgaacaatacctaggagcctccaaagcagaaagtatccatggccttttcttcttatgcacaacacatcctggaagcggggagctctaatcttttggaggcaaacttgagtgatgtccctttctgaggatcttccggtctcctctcaaaggagaggaggaatttatgaagaaagaacaattatatcagttctgttgtagcataagctgtctatcaaaacacaaagaaagcaaggagccttcaacataatctctctgtttgtgtatgcaatgtctaatggtccattttgtttgagaatgtgtggattgacatcagaagaaactgctcataacccacctaatattccctgtattggcaacccactatgatgtcagcactgtttcctgttttcagagtgccagggaagcagttacctggttatttgaattggattccaatgctcacaaacccacagtgatctctgtaagatccattgtttcatgtaatagatgccactctgcctctgcatgaaattcgaggctgctactggttgtaatgatacagtacttaaagtattttaaaaatgcatccactctccccttcttcccatttgtcgtcaatttcatgcccagttgatcaatcacttgctgctgcctacacttgtgtttaacatcacaagttatcctgaattacatcattctaaagtgtgtgaacatttctcttgagaagcacattgtgggtctatgaagatggctccatcagtacagtgcttcctatagaagcatgcaaatgaatcccacgtcagtgtaaggaaaagcaggatgctatgtatgcagttatgacccctgtactgggcaggtagagacaggaggatccctggagttcatgggctggccaatctagtctaatttcaattcccaaatccaataagagccttgtaccaaacaacaagataaatagctcctgagaaaggacaccaacgttgacctctgacttcccacagtcatatagacaacacccacacaaacatacacccataaacactcaagtgtacatgcatgtacatatgtattctctctctctctctctcatacacacacacacacacacacacacacacacacacacacacacacacaccccaaaagaaaaccaccatggagttatgtgttagaaagaatttaagccagctaaagttgaagagacatggatgaggaaagatgtttcctttggctttaattctgatatttgaaaaatgccacacataggttaacaagcagagccttcagaggcagcatgcctttggcctgtgctcgatgggcagtgacaataacattcatgttcccactatcaggaaatgacatttgtcatctgtaaatttctacagtgtttgcagataaatctggaagagctggatagagacaatctatagatgcctttacatctctaatactgaattcactatagaattctaatagagacaactataggtacatttacattcctaataatgagttcttcatcagtacagaattctcattctctaagcatttctttcctttccatctattaaaccatcatgcctttgatgatgcagtttatcttattactgtctgccttggacttgattaacacttgtcagcttttcatatagtttattagactctgaagagaaacctcaaattaccaggcttttagctgtgacccagattgctgggttgtatcatacatcactacagagcccctaatcttgacataacagcatagctttttactgggtcacaagttccctaaagttgtattggcttaaaatttgcttcttagtgctgattctatttcttaatcactacttttagccttgcaacaataataaagttccttgttgtgttatggttttacaataaataactgttaagatattttgaaattgtggaataggcaattgtaatagtcatctagtaatgccatttagaaacatacctctattacttattcattctttcagcagattttaaagcatctgttgtgatctcagcattatgtgtagtggtctggggataacactcagatcttacattgccccagtatgatgcatggcataactccagatagtcttctttgcccaccccacccatcctcatgactttgtaagttttttgtgcttgcatgttatatgtttgtgttacattgttaaaattgaccacatatttagcaggttaaaagaatgctcattggttatcaccccttattaaaactcaggcacctctcttcagagtctctgttcagggtctcgcaatacaagaatgagggcatcaggcagactttcccatctggagtctcagcacaaaggaatccacctctgagctccttctcattggtgacaggactcacggtttgaggctgtactccagatgattaacagagatgctctgctgttcctgacccctgggtttcaaactcttttaaaggggattaagtcagttaccaagataaatctctttaaattcaagtgattaagactttgatatctgaaaaaaaaaagtgcttcattcttgccatggatcattgattagaagcaagttatcgggtctatctgtggtggtgggagggactatcacaaggcatttgtcattctgattcatcctaaggttgtttcctgttgctcctgtgacaagttagcaaccttccttggtgtgtaatttaaaagctatgctccctaataagcctactgatatcggcttaagtgtcttttggggtcttttgaaacagagcctctgatcaggatagcactcaatgcaattcagttaccttctggcaccacactctcatttgtttatgtgtctgttccttcccttcccccgaagacattgttatgcaaccctaagtaggcagctttgtaaaaaataagtacacaattcaaacatgtacagaagataaatcatgaaggaattattttagaacaattctctgttaagcatagcattttaccacttattattgatgaatgaaaattgcaggcaagggagataggcatgattatttttacacacaaaaaaattaaatcttggctcaatacttggtactcctagacaaagcatcatcaacatttatcagaactaatcaatattttgatttataatcaccagtactgagaatactgctttgcttataaatatgcataaaaatgtctgaaatatgtttggggccatttcagagagctaggatggtttcctactttttgtacctttcgccaaatgatggagcctcttatatagcccacacacagtcttgcaaattaagactagtcacctgccttctgatatgtctcaccagtccagactccctacagccatttttgccacctcaatgactgagagctgggattttttagaagcctggtcaatagagtctaatatactgattacactttctgatttagcctttatctttaaaccctcttgtagctctaaataaaaatgtttgggttttttccagaatgttattaattctatattaatcatttagtctgtataaacattagtccactcagttgggggagttcctatgatctgcctgcttccttacttccagtttgaacagtaataactgccaactgccaaacatttactctctctctctctctctctctctctctctctctccctctctctctctctctctctgtgtgtgtgtgtgtgtgtgtgtgtgtgtgtgtgtgtgtgtgtgttcctgcttgtctataatgccccatgcatatgcaatatccacagaagcacaaaagagcatcagatcacttggagctagcattgtgagctgtttgatatgggtactgggaaccaactaggtcttctataagagcagcaggtggtctttacagttgatcctgactctaatccctgtaaggaaggtattttaataaataagatagaattggggtcaaagtggagaaagaaagaaggaaagatggatggaggggggaatggaaaaagggaaagagggaatggagtagagggggattaatcacttttgaaaggtcaataacaatgtagcagagctagaatttaaaagcaaggttgcatggttttactctttagctgaactggttaaaaatataaaatttcccaagaaagtttatggatatttctttactgtagaaagataattgttagtgggtatcacttttttagccatctcttttatataacttgctcttattttgctaaaaaaaaaaaaaaagttgtgtgaaataagctgagatgcaattctgtgttttggttaattattactacaggagatatttacttaatggtgatgggttaggtttcaggttagttctctcctttaggttagatggttagggacaatggcaggctccatgtcttgtaaacctcagaaaatgacattggtttggttggtggtggcagccccacagaggagctgatcaggaactgaatggatgaggagattgttttggttgaatgaaaggagattatctgagacctcagttatcttttctgcccaattgtagacaaaagatagaagaaattgtactatagatagagcgtggttggttgagtaattgctctcagttctttctgtgtcctgtttcaatatttagtcatgacttgagagccattgaacagacttctctacttcttgtctttgatactcattctatatttgctttgttgacgagctatcagtggacttaaggagcaaatggcttgacatgtcttggtgcaaattgctatactttgatgacctttctaaaaatcgctatttctgcctctagcctgggcctcaatataagacatttgaaattaaagtaacttaacacacaacctagaaccaagctaacacagcccatagcgtgaattatataaccatgcctactctagatgagcagagccctagtcaacttacaaactcatggacatggtaataaacacaagtttatgtagctactgaattccagatagtttactatccaatattattgtagcaacaatgaacatttaaaaaatgtgtaaaatatgtatgcactgtgaacagcagaatggcgagatgtagctataactatcatggggttttagttaattactgacctctcttcaccatgtaactgcttttccccagaattgttcacttatcctgtctcctctgtattcaacctggagtatcaagctgtaaactgtatttgtgtttgcttcctcgtgttatggctgatgtattaatgctaaagtgtgttctctttaactggaggagatgtaaatctatgttgcatatggctaggaacagaagaaagaatggttgccactttggaatctaccttagttcctcgggtcgtgagtgttgttaacatcccgtagtatctaactggttaaaaccaatatagttgtcaccaaggcactagtttcaggacactatgcagttattaagccatgcagatgctcaaggccctcatgtaaagattgcatagtatttatatgtaacccatgtatatcattcaatataccttgaatcatccctagatggcttatgatagctcatggtatataaatgctgtataagctgttgtcagactatatcgttaggaagccctgccaagaacaatgatttgcttaatgcaaatacgatattttgttctaaaattctcattttgtggttgatttaatccatagatgtagaacatttagttatacgggactagctacatatgctcaactcatttcaccaacttctgctagtaagcaagtaatattttagaaaataatctttttattgctccaatacaaatgctaaaaaggtagactgaatgaatgataaaaaaaattaggtctgtcagttactcaactttcttgaggaaaagaaactgaaattcttcagtgtgaaggtcctttttatttttatttgttattttatgtatataggtgttttgtctgaacatgtgtctatgtaccaaatttggtatacatgaaggccagaagaaggcaactgttcccctagaattagattacagatttctgtgagctgccatgtgaatatggagagtcaaacctaggtcctctgaagaatagccagtgttcttaaacactgagccatccctccaggaaatattgttctcagagaagcaccaggaaatatagaaaggcaaggcccatcattggaattgtcagaattgagagactgcttagtatcattccaaatgtatttcagaggacatattctctctgattatttttaccactaagagacactttccacattatgatctaactctgagataagggtgcacagctttcccatcttaaaatattggcttgcttataggaaatcaggaagtcctcatagagacctgacatgagagggacattaggtgtgtagactgcacactacatggataaattgcgtccatccatgcacacacttcatagggattgagccttctattgacagtgctctggggaaataacgtgatgcctgctctcacaaaggtgctgcttaatgcacaagacaaaaaaaaagtcaacaaataccatttcctgtgaagagagataagggctgtagacaaaggtgtagtcaaacaagaggtcaaagggaaatgatactacttgaggttatctgggcaaaatgtctctagggtttgacttctatgcgaagttctggcagaagggaagcggctttagatgaaagaaaatccatggcatgctggggacggagctcagtgacagaggtcatgtccaccatgtgcatgaccctgggctcaatcctaataaccacatatgcaggaaaaatataggaaagcaataaataaataaataaataaataaataaataaggaagtggtgaggaagaaagggagggagggagggaggaaagaaggaagaaaggaaggaaggaaaggaaaggaagaaggaaagaagtgccaagcttggtttaaggagaagtgaagatgtcatcaaggccctgtggttgcagcatagagagcaggctgcagctgggaagaagtgcttccatttatgggaagcatccgcaggtccttaggatagctttctacatatgggtcagtccaggattataaaaagcttccaatggtttgtgagtgagagggacagacctgctttattcaataaggaggtggaaaggcaatgtctgtggaagtttctggggcttccttattcaggttttaacagtttgataagtctgtactttggaaaggggttgatagacctgctccttgaatttctgcaaattatccacatgtgcattgtataatagcaaacgctctagaaagaactctttcgtactgagtcattatttccccctgctcttcccaactctgcaacttcttttaaaccagagggaaaggtggcaattaactctttctatgtaatgacactaaacactttctttaagattagagttagtactagggttcttctatggaatgcagtgggaaaatgtgaagctaatgggctagagaagtttagaaggaaataacacacatagtccttggttttgtctctatggaacacttcctgtaaactatcccatgtattggcataagcacgcaggaatctacctactaattaatctgttaaatagcaggccatgctatttatttaaaaacctattgtgaacaactacatttactttttaatttgttgaaaaataagattttgtaggaatgtttttctctttatactaattgtccgcttttgttcccagttacataattgacacaattttgtttgacctttgtaactccctaatgatgcaggaaggatatcagcatctgtcctcttaaagatgttgaggatgacagccagacaggggaagagtggatcgaggatgtcacaaatagcaaaccttaagcttagcctgaccaactgccatatgtgaatccttactgtccacagtgcttctgatggcacacctttgagacccattcaccttcacaataaacatgggcattagtgtcagatcagtcagatcttacaggtcgagctactagcacagacttctctatcataaggaacccaaagagctgtgttttccgatgagaaagtctgaactagtggttcttcaattttgtgtctgcgctgtctcctagggtattgtcagtatgcacacaactgaagtggttctgccagcagaatattgactgacaggtgaggaagatacaggcaagctgatgccttggtgattgttgggttttgtcaacttgacacaagccttgacatatctgagaagaagcaatcataattgagaaaatgcctccctaagattggtctgtagacaagtctctgggggattattattattattattattattattattattattattattgatgatgactgacatgaaaggaccacattcactgtgggcaatgctgtccatgtgcaagtgttcctggggcatatgaaaacgtaggccgagtaagccactaggaacaagtcagtaagcaatgttcttccatgacttctgtttcagttcctgcctccaggttcctgcctcaagttattgacctgtgatgggatgtgacctgagatttgtaagctgaaataatcctttttattcccaggttgtttctagtcatggtgttttatcacggcaataaaaaccctaactaaggcaacctttaagaatgtaacccaggtgttttccccactcgggctcaggtgccaatgctaggaacttagatccacgaccataccgttaacaaagaatcctgataggagtatgctctagctggggagccacatgccagctaaagcttctgaggacactgaaggacgaagggactggaaaaggaagaaaagacaatgagaatggacactagaaagatagcactctggtatccttcatcattagagacaaagtctatcaaacgatgctcagctgagcagcaactccttcatgtacatttgtaagctaatggtaatgttcacactgtagtggaagcctactcccttacctctccctccaacacaatgcttactgcttctgctgtttgccccttctatttgtctcttggcatgctgtattcattagcagtcttggtacttctaagtgtttatagtactgctgagactcctttaaatcttcatgactataatgcagaacaggactttttggcttggaatccctacagtggagaaattcattcatgttgctgaatgtagctaaatgtgcacactttcctagacatagctcactgtgtatttgctgtcatttattgacttagtgaagacattccggttatctttgaaacttcataaaaatgctattacaaatatttctatacatgtttccttgtgtatctgtataagaatttcctcagggaacatacctagacatgtcattactcgttattagatatcagtgcacactgcatttaattaattgtatattctcttgacaataaagttgaatattatacacttgtcacatagcctaacatctaaaagaactttttattagaatgaagtaacattttacgttgccgtggagaagaagctgcattttaactctttagtgcccatatttgtctactaaaatatttgtgcatgcacatttgtagaagttctgtccctaaaaactaaatattggaatgcctaaatattcaccacaagcaaaatggatcatttgtagtactgtacacactaggacacattaaaacaggaaacctaattgctacaatcaacaaaagataactggaatgtcttcactaagtcaaggaatgacagcaaatacacagtgagccatgtctaggaaagtgtgcacatttagctacattcagtgacatgaatgaatttctccactgtagggattccaagccaaaaagtcctgttctgcattatagtcatgaagatttaaaggagtctcagcagctctataaacacagaagtaccaagattgctaatgaatcccatacacattacattgaaaaaaaaatctaaaccaaaaagggttgtctatgatttcatatacatgtgtactatatgtacaaataagatgtcattcaaactatgccttattaaatggaaagaagggatagcaagtaagagaaaaggctgtgctggtcaaatggttcaatgtgcagcagctctcccagccaagcctgatgacacaatgacagcatgagcttggttctggtgcccagtgttagaaggagatagaaggatgcaaaaaaaaaataaaatatttttaaagagaaaaaacaaatctttaagggctttttaatttcaattttgaatatgctacatgacacaaacacaggagaaaaagcataagagcttggtacaaaagactcaaacaaataacactcttaaaatcggacaatttatcaccaagtttgattgggcttcttctagacttgtggaattaacaaattattaaattcaaaataaagtgcttgggcttattctagggcagattcctccgattgtgcagtgtacccggctgctcccacagcctcctcgctcttgttgtgttcctgcggagccagtttttattgctaatttgattccatccttaaggatagtttctctccacagcatctgcttgtgtagagacacacctgtcagggagaaaatacctacaaaatcacagccgaatcaaagtggtctgaagtttataaaagttaattagaagcgtaacgtttatctctgccgcagtaacctgagtaagccattgcttttattagctgtgtagtgaagaattcattttcacctgctttgttctatacactagggaagtacgagagtactgtagacacaggtagtcttattcaagtatactcagtcacagctgagcagagaaaagagagggaagcggcctgtggccttgaatagcgcatgagcacatgtacacacacacacatacacacatatacacagccacttcttcctgttttgttttctttttctttttttaaacttccgtggctttgacaatctcctgtttcatttctacttgtctccactacacactgcagccacaggaaaagtactgaggccaagtgacctgtcatttgggccctcaggcatcgtttcctctgtgagccaaggagcatcaagagacggtgaagtacacactggtttctacaacatctaggctatcacaaacatgcagaaaaatgaacatttgttaaatgcatgagtctatgaataaatgaatgaatgccatattatctaatgtttgacaaattgtgccaaaacttactgttttgaaacatgcttgtccttcctccatgtttctgagagtaaggagcccgggcatgactcagatgagctgttgtctcagtgtctttcatacactgcagtaaagtgtccaagggaggcagtattctcctagtaggacctggacttgtgtttaggctcacctgtgccttgagggggcttcagctccttctgcattatgaagatgaggctctcagttcatcatgtgagactccatcacaaccgcttactccagtgagagggtcttctgacgaaccagagatcacattcttctgtgatttaatccccaccataaattttactatacatgcttgtaagaaacaagtctactggccaagacgttcctcagatagaaacagttacacaaggcacaataccaagggaagcagagagtcataggggctacactagatgcagctaatcacagatgtctacttcacaagaccatatggaagtttggaattagattctatctaagaaaggcacaatgagcttattgcttgctctttctaaatggctctttccccctcaaatacacaccagtgacactcttcttatcttccatgatttagcttatgtatctctacccccaagagcaattccctaaacagtatagtacagtccccatggcaccccacacatactttcaagccagaactctatggatttcaagcctcaatatatggttatttcacctgcctattgtcaagctcttcccataagtcccaagctttctgtgggtgggaccaagcttctcagatctgcccttcttttactagaacctcagacaggtggattctaagacaatgctggaaatagattttctttataaagttagtgcccaatcaaagaaggggttatgtttaaatagtttttctggggtttagaggcaaaaagggtggtagcccaggagacttccaagattggagattttatattacaacaacaacaaaaatcatgtgggatataagttattgataaactgcaatgataaacttggatggcctaaatcttggtgtctcagacgtttgtgtttgaaatctttgtcactgtccacccctggcctgtcaggcttctttattaccagtctctcactcttccaagctgttcccttcaactctgtctaaggcccccaagcaatggcttgattttccagtggtggtatactttcagcttagtgaacaactattatcttcctaattaccaacaggagtcttgaataagaggccaaaataagccaattaatatgttaaagaactggaagaacaagctgcctctgccatgtgtctacctcccattcaccaagcctttccactttctaacctacatttagggagagcaggcaggcatgctgagtcacccctgtaagccagcccttgagaggcagcagtaggagcatcaagagtctaaagccaattgaacaacgtggaaaaaaatcctgactcaaaaaaggctagaaatttaggtaaagcttagtatatacttgcttatatatgagtttctaaattcagtccccatgagggggagaaacggggagatacggacaggcagactgaagatttagaaaggagagggcaggctgggttgttctggtaagaggaccaataagcacattgtcttgaatgtgccatttttaatcctccactatccagtcaaaggctttgtgggagttattggaattctagagccagtgtccctgcagatacttcactcccaggagcctagccccaagtagccctcttatacctcatatccgatttcccttgtgttacaaacttcagtctagagtggcttattctgaagttttgccagaagagaggaaagcacgcacttgtgtaagaacgggaaatgtttgccatggaagggcaaagtgagccgtcttcaggagagctgtctctgagcttcaggactggtgcagtatcctttacaggaaccaaacaccatgaaaggatgctcattgggtctaacatagctctcagcatcctgagtaaccaagcatagtgagaaatagtcagcatccctgtggagatacagacattctacacacagacttggatcacagggaatgggatatagaaagggctgaagaagataaggagcagaactcctagggaagttatctccagacagagctgttctgtgcactggggcatgtgtagtaatacccctggcttttgctttctagatttcaatatcattcttacatataagaaaacaaaagtgtttctagccaatgccaggtgcccttgggatgctgttgtgggggacttgctgtcactggacctggcagagggatgtagtagtcaggataggctatcataacaaaagtccctaacatcttaatagccaagaaaggcaagggttcacttagaatccacatattaccactgtgggatagcaagaagactctatctacatcacctttgctagcagacctactgagcaactgatgcttttcctgcattgtagattgccctgccagagggaacaggatgtttcttacacgggcattgaaaagcttcaacgagcaagtcattgtccaaaactacactcacgaaactacaaggacaccaatggcatgtggttgccacagacgacaagaaggtctctcgtccctgtgagcataaaatgagggagtggtaaaaccaggagatgcaaggctcccagaaagcaacagcaaaaaccaaggcaggaacaagtgcagtctgaacgtgttgggcttaaacccatctgtctgctatcttagttattgcacatcagcccaaaggagtaaaatggttttattttttgcatttcacagattgtgggactaagacaaaatactcctgtaacttcctcaaatcagtagcagagctgagatttgagccacggagtctcaaattttcagtactgagcttatacccctcagagacatcactctggctacactacaaagcacttcttgctatatgacaaatggcttgcctttgtttgtggtttctgttagaagcatgatcaaggtatgtttgtaagcacctcccctcttccaccacgccctattgtttctttcataatgaagtcttctattcccagactacatggaaagtgctgccagtcattccctcatgggctgttcatgttagaatctgttgtagggcattcgagcacagcactgagcgttcatcaacacgggtgctaagagaaccagcacctataccccaaatcaggggtactgtcaccaactcttttcaaacttgcccatatgcaaatgaagcatctctaaaccccaaatacctaggccaggaggtttcatcacgcaagcaaacagtggactggggacataattaaatcagtaaagtatttgtcatacagaaatggaagcctgcgcaggacacatgtgaaaaacttgagggagaaaaacatgtataatcccagccaaacaagtgagagaggcaggtcctgaggctttctgggcagccactctatcctacttggcaagttctggtgagagaccctgtttaaaaacaaggcgtacagcacctgagaaacaacatcggcagctgacatttggtctttacacacatgcacatggacacacatgaacatgcacatgttaagcatgttaagtattgcaaactgggagccttctgttttggctaagtactgggcactgtgtcattttatacatgagaaaggtgcagctgagggaggttacacagtggggtgtggaaggattccagattttattccaaaccatttgtcttcattggtggatagtgaagttgtttcattttacacacacacacacacacacacacacacatctctgtctctgtctctctctgtctctctgtctttctctttctctctcctcctccccctccctccttttctttctattgggtttacctttaccccaagtcaaccttagaatacttactcacataaaagagagtaaaggatttatttctcactcttctaatgattcaaagagttctctgggggtaagtaaatatctatctaagttcaagcagtagctttcctaagccatatataaatgagaactctctggttactataaagagagccttagcctgaacacaatagctcccattctccaatgtagtttgcctcctgtgtttaaagtgaagatcttctattaggatgaagtttctgaaggaagagcaaaggatgagggcagaggaaaacaaaaggtcaaagacacatacagaactctcaaaaattctaatgaactgattttaggaagacatgagataggtattagacttaagagcaacttccctaattgagctgaaaaaaaattattaaaggcagcaagcttcctcccaggagaaacctgaaaagagggcaccctttgccaagtagttagagaaggagctgcggtacatatggcagataggcagaggtgcaagtaagaacaaagtgtcttgacatgtatgcatgccataatgaaatctgtgtctttgtgtgctaatcgtgaaggcaaaagcacagctaatggggtggaaagaacatgacctttaccaagtgctaaatgagcttctagggctaaatttcactatgacttgttgacatgtgaccttgaactagcactcaccttggcaggcttcggttttccttccctggaaataaaacgtagcatatgtcatgtttgccaagctatattatgagcttaatgaatggacaccatgtactatggcattataagttgataggagctgcttaagaacatacagaaataagtcgggctaatgctttcttcacatctgcttttcctcctgaacatacagtcaaactgccagtcagaacacactcatgtaagtgaactacacaggcctcattgaaatttccactcttttagatttttttaatgcatgtttttgcctacatgtatctgtgtataccacatgcatgccctcagacatcagaagaagtcatcagcttcctagcatacatgtttgaaaaagaaaagtcaagtttggctatgtacacataccccaccaaccccagtgtcatggaagattgaaacaggaagatcactggggctggtttccccgcctagctccagaattaatgagagatactatctcaaggtagtaaggcagggtataacagagtgggacaaatggcattctcctctggcctctctccatctgcaggtctacatgtgcatgggcacgtgtgcatgtgtgaatgcacacacacacacatgcatgcatgtacacacacacacacacaaagagagagagaatctccgcatctaggtcccactagataaatgatatatgtccatggcacacagtttagttctctgctgtctcttgaaacagaggttatgaagaccacaaagcattctcactgtggtaagctcccagcctttcatgttatcatttgcaagacatccctctaatgaagaactgtaggaatccccaaatctcagagcggcattttcaagggacatttgcctctctgagagtgtcctttcatttctaattccccattctagagagacactgaatcaccagagaaaatctggcaacggggcctttaaagccaacctgtatcccaggccccacccactgggatgttttggcatgttggttttgcttattttgggcttcatttaaatgaagttatgagagccacacatacggtacctgctgtaaaggatactgaaaggttctctgccacactgtgtcagcttcttttgcaccacttcatgcctccagtttgctcctatcattacagggaatggtacctttttcactactatgttttatttccatgcatgagtgtaacaacctccttctactcgttctactgtttatgaatctttgtattgtttcttgctggagctgctgtttgcatagttctcttgacccttcctatgcatgtgaattgatagatgttagagcgtgtttctctgtcatccggaccataagatgtacatgttcagcttcagtagctattgtaaacagtttcctaaattacttttaccagtaagcactactcccagtaagatcagagaacaatgaataagccaggctactgctttcttcctcgtatgtggatctagattttagtgtgtgtatacgtggtgtgcatgtgcatgtatgtgtgtgtgtgtgtgtgtgtgtgtgtgtgtgtgtgtgtgtgtgtgacagagagaggaagagagagagagagagggagagagagagagagtagatcctgaaactagaaaggaggctctgggagggaagaaagatcttcagggaaagagaagaggaagaaataaaaccagaatccacaggaccagaacagaatggagggtagtgaggggagggggagaagggggaaaggatgggaaggagaggagtggggggtagaaatcaataagaatgaaagtgcatcaaggagacccagttctttgcgtgttaatttggtacgtgaatgaatagctattataaaagcccacatagccacatgactctctccagggcccttgttaccaggtaggcacagggatatggcaaggatttccctctcctgtgggcacttttactaatcttactgcagtaataaggatgaaggagactttgaggatttgttagttggcaggaaagatataaagtatgcagaggggttaagtattcgaggataaatactgtttttaattctgtaagaatcctatatcacttgcaattagccattaatcaatattctccatggaccactcagaggtatttcacatccgggcttaattaaaaactgaaagatcttgaatcctataattaggggcaaaaccaattagatcttctaatagagtataacttgtgacctatgataaacacagatttcctctggtaaggattcagtgtgtagttcctgcttccaggagacaggtcctcagccctcagatctctatggacaaggccccagcactgaggacctgtggttattctgtgtacattctgaatgttatggttctcttactcagcgggaaccatagttctttcacagtgaaacatagtagagccaaagtttttaatctggggccagacaacatggtccatgtttagaaacacagaaggtgtgagataaggccaggaaagtacaaggtcaaaccaatatggattacccagcaagacctgttttccagtaagcaactagcacacaaacacacatgtttcaggctcgagaaagaattataaacaactatctatagactgatagtctatagtggaggaaattgggtgtaagtattcttccagctttgtgaattcttaagtccttccttggaactgtactggtttcctcgccaggatacatcctaccaaacagtgtgaccaacagtggctgcagacagaatggccaagagttcttccctccttcatcttcagttatccagggacttcataaatgcccccctggggcccctttagcttctgggggtccctgttcatgcttttctctacaaaggcatcagacggcctctcagccgtcaaagagaagaggctttggcatagtgttgactcctggttgtcgaatacagatgctggatgacatgttggaggagtggaactttgggcaagctgcttatgtagtgcacttctatccacccacctttgaagtgaggaggagaggtagttaactctaagtcagtagtggtgctgaacaaggtctgcagaatgcttcagcaaacccttgcttttctggttgttgcttctactactaggagttgcatagcatagttctgacagtgatagatctgcagcttgattgcagcagtaaaaacttactcttaggcaccaccacgtgctaattgcaaaggcagtgtgcactttgcatatgctcactaattccaccaccactcacccctgtgaggttggaataatcttcatctctatttgaacaataggagaaagtaagcacactgttaaagaccatggtcaagatcatatgattaattaatgctacagttagcacttatgcccagagggtctgtctctgctgtgtgtattttcccttacgcttgtacagaataacatgtctaggatgccacactgctatcaagagtgaaattatgagggctggagagatggctcagcggttaaaaacactgactgctctcccgaaggtcctgagttcaaatcccagcaaccacatggtggctcacaaccatccataacaagatctgactccctcttctggagtgcctgaagacagctatagtatacttacatataataagtaaataaatctttttttaaaaaagaatgaaattatgagactaagaagatggtccactggctgaagtacttgtaagaggatgtgagtttgaatcccatagcccacctttaaaaagccaggcatgctgtgtgcatttgtggccccagtagtgggaggtgaaaacatatagaacccataggctcattagcaacttcctacttggcaaggtccataccagtaagaaaccctcaatgtaaataaaggtggatggcacctgggaaatgatacatgaggatgtcctctcacctaaacacacacacacacacacacacacacacacacacacacacacacaggcatgtgcacgcacacacgcatgtgcatgcacatgttttatatgtgaatgtacatatacactgtacaaacacacaaaagaatggaatgttcaaaaaaagttctagactctgtctactatcataatcactaggtctagcaccttttaatttgattcattaaaatgtaatacaaatgaataactctttgttcacatggggctggtagctacccctgtgggcatcacagatgtagaattttaggcattgaacataagagtccagatgaagcaagggagaaagaagcttaagatctgaggcaaagatggagatgactaagacttgtcatcaatgctgatcgggaaggggaagagacagatgagtggagtggcagtcttcctgaggcaggccggctgactgactgtctgactgatggtacctccttttaggttagtgtcttctgcagtcagatctttgtgttcgaatgcacagcagtcaagagctcactgtgtgacctaagcatgtcacttggcttctctgttgtcctcagggttctgtgttcctcacccagggcagcggagcaagcatgagctatgataggtgtacccttaggaaagtgttacctatgggttttgtatagaaagagacataaaagtcaagcaaatgagcaaggagatgggtctggcaagtgggaccttgtactggaaacagatcttagcagaactttcaactgtcaataatctgtttaaaatgagaggaataaagtctctctctgtgtctctgtctttttttatgtgtccctgtttttctgtctctgactgtgtgtctctgcctcagtgcctctctttctctctttgtctctgtgtctctttgtttgcctctctgtctacgtcactctctgtcattttgtctccctctgtctctctgtctctctgtctctgtctctctctctctctctctctgtgtgtgtgtgtgtgtgtgtgtgtgtgtgtgtgtgtgtgtgtgtgttatatcatcccatatacttagagaatgttttcttatttgaaaactattcttttcctagttttcaacattaaatgtctttttttatgaaataatgttccttatagaaacactctatataaattagggctcataaatactagggatattttatgtcttcaacagacacaagaaaatgtacaaatatgttttcatctacgtacttgttttaaattaattagtttacatatttgtttatttctatttattgagacagcttttgcatttagctccagctgacctcaagctccctgtagagcccaggccaacctcaaattcacaatcctcctgcctcctgagtgataggattatagttatgtgtcaatatgcccagctttaaaaatattatttcttcactataaaagcttcaaattgcagtggtgtccaaatatgaatatctatattctttgggagaatgaagggccactagaataagccactggatatatctgtgaaggttagaaacagagaggatggtccccagagggctagtggtgactggagggatggcagaggctggtgagtcatgactcaggctctgctgcagcatctccatgtttctttcttgcccaataggaagtctgagcacgtgccctaagcacacacagagcaaggttaaagatgtgcagttcctcccacctcacagaaatccacagtgatgcccacactgaggtagccacaggagactgattcatccatactaccttctacccagtactctcctctcccctcccctgcatattggcccctaggcaaatctgtaggagttctgaagctcaggagtccctgggtatcaaaggctcccagctacagtctacctagacaggaaagaagccagccagagtacagggagttgccaagaccagagcagaaggcttcttgcattttaagcagcatatgcaaattcaattagcataggtttcacttccccagtgtggctcagccaccttcccaataattcctaagccaaactgacccagtttgaaatgaaaatcaggtttaattttagagggatctgtttatccttgtcttgggctctgtgtattttttcccccgtttggcttgataaacatccaagtgcattattcccagacaagcagagtactgctgacagccatgtgatagatgaccctgtaggagagtaaaactgcctagcactgagggaactgatcaggccctcttgcacccaaggaggcttctacactaagtcattttcctctgctttctgccaacctggagattttcttctggggtcccttgtaatggaaaaataccacagtttacggtgattttaagcttggttacactggggttttgcaaaaatctggtggtattctttgtaaacccggaacatctcataaaaacccagttcagggccagtaaaatggcgccattaattacagcagctgtacaccaagcatgagagtccccattaaatccccagaccccactgaggtaggaggctgcaatacctgcaaggcgtcctaggacctcctcacatacacacaattgattaattacttaagtgtaaaaaaacccaaacataacaaaaacaataaacagcccatatgaattgctccttgaatctatatccaaaaatacttctgaccagagaagaggcacagtacattttgttttgactgtatggattggaaattccatgcaaaattgtattggtcacttttgttttcctctgcaaactatgagttcccatgaggccccagctacctctgctttctgccccattggcatgttcacagcccagtatgatgttaggtcctcaaggatgagtgagagcaacttctagacctggggctattggctggggacaattttgacatgccagttttcgattccatgaagtacagaaataaaagaagctaacgtccaagatgctgtgaaatataagcacagcacagagtaggggacagccctttcctcaccctctcagcaaagatttagacaaccctacttctaagccaatcagcactgttaaggctcaaaacccgccactttcaagtcaaggtaaatttgctcatgtgaccaaaccagctcagacagtcaacagggtctcaagggaggaagtgaggattaaagaaagaaaagacaattagacaacactataacatgagtccagctagttctgaagctgaagagggtatactttttccagtctgctcttatatgattctaggttcatacaaagaatatggtcattcataaggcataaagtagtcaaggaacaaacaaggcattaacagagtagtgaaggaacaaacaaaacataaataaatgtcccatgattgctgtattcagggttttaacaagatacaaagaacacattcctctgctatattcatcttaagcctgctttcttgttctagcccaatgtcaaattcttaccaaattcctagaagcagccctagaagctctccacactcatatatgcttataaccttctggctaaggaaaagcatcattcttaacttcgtggtccatctagaaacaccatcaatcttactgagaagtaggtgtttgtcttgttcagcatagcttcgagtactgaaggtaggggttatttacctccggggaaccaataaattgcagtatctcacttttctaactgctttcctgaatctggacaacgcagaaactcagctaaagcccttgtccccctgtttgagttgttcaactgacctcacatctttatagagacacgtaacagtgttgcatccgatggctgtcatttaaggtcacacaacttgataacatttctggaaaacagaaaccagaatgtggttctaacagagaggtggagaagcaaggtccagctcccaagtctgcaggagcctttgttcagcacaggccaggacagacactgcacagctacactgcctgctgtgaatacaagggctgccaccacttgcttgggaactgtgggtaaaaagcttcaccatgatgagcccaagtttccttgactatatggtaatggaagtccccagtggacacaacatgagaaaattcattgatactctgtggagttcccactgcctcacagccagttcttattgaggaacttcttccactcactatgctgtggcagctatgtgtctgcttattgttagcattctgttggttttggagacagaatggagtttataccccagagctgacatttagtatacacgtgactgtaaatgacaacctaacttaccaaacctgggtttattcatttgcaaactcagcattaatcatggacgtattatttacctcacaggtactattgaatactaaactaagtcagatgctctgaataaacatctaggttagtttctggtgacagtcattggcttgtaaaatgattagttgaacaatgtattttaaaagtcatatttggttgggttctgttgttgaatctaagttctaaagttctatcagcaactggattctgaaaatgccatagctagcagagaagtctagatatttagttctggcaacttcataacagaccaaagagtgctagtaggctttttaggctgcagttctgtgatgacccaatgcactttttggactctggaaagcttagagcatgctgcccctgaaattttagattcatcagtagataacagacaatggtaaattttcctgggaatgaatataggaccatagttatctgtccctctttatatgttggctatagtaccccagtggcacagtaccccaggttgaatagttctgtttaatacactcatttagggggcttcttagctttcttactgactgcacacacacacacacacacgttttacagaaaaaaaatgtcccacatctacaagatgatactctgcccaagaggagagtgtttgatgcatctccatctacacaaaagtcagaatgtgtgatgccttccagcctccatcgctgatataaccttggggtccacaggtagtttcttttaatcattggctcagtttgatgtctgaaggatgagcagatactttccaagtaaaataagaagggaagaaagaaccttcaggacacaagtactaacatgtacgaagacccaggagaggattcaggatggagagaccatcctgtatgaaaggtccagatatggattcatgatggagggagcattttgtgtcttaagatccaggcaatggcttggaatggaggaacaccctgggtaaaggcacaggcaaggagaaaatctagagccatgggggagggcagtatcaaaaagtttatgtggccagtgcagggtcacagtatagaagatgctgaagcactggtagggactgggccatgccttttctaaaagtgttctggtcagggtctgggtatattctaccctgagctgaagccattggtaaagttaggatgtcataagagctcatattgtcatggccttgacttaccaagggttctttgtatttgaaggcctatctgattgccttctcttgcaagaaatggtctcacctcatggacctgcatgtttacctgagacattttagaacatgaattagcgcccatctccaaatctagaccccagggttggcttccgcttaccaactgtacccctttctgcctgcattcctcatacccaaggaggcctcccatagactccaaagaggggaacatgcaatctacttgctgcagtgcaacctcatacagagggtaaaacacccctgcagtgacaaacaatatactttccttcctggcatgtgggttgctttccttttccagaattagaagaatgaaatatgtcacctgtctaacactagaggcttagagtttccttctcaggtgccaaagctggctcaacccacagagcacactcaggcctgtgtccgcacctttatgtgagtgagaggactgacccacagtaactgtactggcaggcagatgaacttctccaaatggtattctagaaactgtagcacttgaggtgctaggagagagaaagagcagtagtttgctctagacctgtctgggaaaccatttagtatggtcattcactctctttgaaggatatttgtctagaaaccctgaaagggtaaaacagtttatcatttttacacttacagtaaaagttctttttgccagacgtttaaatgtatggctttctaaaaatatatcaattatacctgaaactatcacttagagagcacccactgatgcagacaatgtagaggatgtgaactaggtcttctcagtcttttgaagcttttgatctgttatcagggaactaatggattaagattagaacatcgtggagtggcttgtgtatcttcggattggtgccagcactgggccaccttgggtctgaactcagtggacagtcccatgatcccaagaggactctcaacacccccagggtccctagaatgaccaatatcttaggatcactggtgagtggaacacaacatcttttccaacagaatgagctacgaccagctggagcacagacaaaggaactcagaggctcaagttccctagcctaaagaaagatgcccaagaacatacaagaagcctacagaactccaaatggaccataaaagaaattcctcccgtcacataataatggaaataccaaatgcacaaaacaaagaaagaatattaaaagcagtaagggaaaaaggtcaagtaacatataaaggcagacttatcagaattacacctgacttctccgcagagactatgaacatcagaagaccatggggacatgccatacagaccctaagagagcacaactgccaactcaggctactatacccatcaaaactcaactatcatatatggagaaaccaaagtattccatgacaaaaccaaatctatacaagaactttccataaatccagcctttcaatgataataaagggaaaattccaacacaaggagggaaactactctctagaaaaagcaagaatgtaatctttcaacaaacctaaaagaagatagctacatgaacaaaattccaactctaacaacaaaaataacaggaagcaacaatgacttttccttaatatctcttaatatcaatggactcaattccccaataaaaacacatagactaacagactgcttacataaacaggacccaacattttgctacatacaggaaacccatttcggtgacaaagacagacactacctcagaggaaaaggcagatttccaagcaaatggtcgcaagaaacaagctggagtaaccattctaatatcgaataaaattgactttcaacctaaacttatcagaaaagataaggagggacacttcatactcatcaaagataaattttaccaagatgaactctcaattctaaatgtctatgctccaaatgcaagggcatccacattcattaaagaaactttactaaagctcaaaacacacattgtatctcacacaataatagtgggagacttcaacaccccactctcagcaatgatcctggaaaaagaaactagagacacagtgaaactaacagaagttatgaaacacatggatttaacagatatctacagaacattttatcctaaaacaaaaggatatacctttttctcagcacctcatggttccttctctaaaattgaccgtataatcagtcacaaaacaggcctcaacagatacaaaaatattgaaataatcccatgcatcctgtcagattaccacaaattaaggctgatcttcactaacaacataaataatagaaagtccacatacacgtggaagttgaacaacactttactcaatgaaaaagagacttttagagcttaatgaaaatgaagccacattatatccaaacctataggacacaatgaaagcagtcctaagagaaaaaactcatagctctgagtgcctccaaaaataatctgaagagagcatacactagcagcttgacagcacacttaaaagctctagaacaaaaggaagcaaattcacccaagaggagtagaaggcaggaaataatcaaacaagggctgaaattaaccaaatagaaaaaaaaaaaactatacaaagattcaaccaaatcaggaactgtttctttgagaaaatcaacaagatagataaacacttagccagcctaactagagggcacggggacagtatcctaattaacaaaatcagaaatgaaaaggtagacataacaacagaatctgaggaaatcaaaaaaaaaaaaaaaatcatcagatcctactacaaaaggctatactcaacaaaactggaaaacctggatgaaatggacaattttctagacagataccaggtaccaaaattaaatcaggatcagattaatgatctaaacagtcccatatcccgtaaagaaatagaagcagtcattaatagtctcccaaccaaaaatgtccaggacgagatgggtttagtgcagagttctatcagaccttcaatgaggacctaattctgatactcctcaaaatattccacaaaatagaagcagaaggtactctacccaattcattctatgaagccacaattactctgatactaaaaccacacaaagacccaacaaagaaagagaacttcagaccaatttcccttatgattatcgatgcaaaaatactcaataaaattctcgccaaacaaatccaaaaataaatccaaatgatcatccatcatgatcaagtaggcttcatcccagggatgcagggatggttcaatatacagaaatccatcaacataatccactatataaacaaactcaaagacaaaaaccacatgatcatcttgttagatgctgagaaagcatttgacaaaatccaacacccctttatgataaaagatttggaaagatcaggaattcaaggcccatacctaaacatgataaaagcaatctacagcaaaccagtagccaatattaaactaaactcaaagcaatcccactaaaatcagggactagacaaggctgcccactttctccctacctattcaatatagtacttgaagtcctaaccagagcaattagacaacaaaaggagatcaaagggatacaaattggaaaggaagaagtcaaaatatcactatttgcagatgatatgatagtgtatatataagtgaccccaaaagctacaccagagaactcttaaacctgataaacaacttcagtgaagtaactggatataaaattaactcaaacaaatcagtggcctttctctacacaaaggataaataggctgagaaagaaattagggaaataacacccttcaaaatagtcacaaataatataaaataccttggtgtgactctaactaaggaagtgaaagaactgtatgagaaaaatttcaagtctctgaagaaagaaaccaaagaacatctcagaagacagaaagatctcccatgctcatggattggcaggattaatatagtaaaaatggctatcttgccaaaagcaatctacagatttaatgaaatcccataaaaattccaattcaattcttcatagaattagaaaggctatttgcaaattcatctggaataacaaaaaacctaggatagcaaaaactattctcaacaataaaagtacatcttgtggaatcaatgcctgacctcaagctgtactacagagcaattgcaataaaaactgcctggtactggtacaatgacagacaggtagatcaatggaatagaatcaaagacccagaaagaaacccacatacctataatcacttgatctttgccaattagctaaaaccatccagtggatagaagacagcattttcaacaaatggtgctggcttaacaggcagttatcatgtagaagagtgtgaattgaaccattcttatctctttgtacaaattttgctgtaagatcaagaattgacaaatgggaactcaaaaaattgcaaagattctgtaaggcaaaggacacggtcaataagacaaaacagcaaccaacacattgggaaaagatcttcaccaatcctaaatcagatagggagctaatatccaatatatataaagaacccaagaagttggactccagaaaaccaaataaccctactaaaaaaatagggtatagatctaaacaaagaattctcaagttaggaatatggaatggctgagaagcacctgaaaaaatgttcaacatccttaatcatcaggcaaatgcaaatcaaaacaaccctgagattccacctcataccagtcagaatggctgagataaaaactcaggtgacagcatatgctggcgaggatgtggagaaagaggaacactcctccattgttggtgggattgcaagctggtacaaccactctggaaatcagtttggcggttcctcagaaaattggacatagttctaccaaaagaaccagcaatacctctcctgggtatatacccagaaaatgttccaatttgtaataaatacacatgttccactatgttcatagcagccttatttataatagccagaagctggaaagaacccagatgtccctcaacagaggaatggattcagaaaatgtggtacatttacataatggactactactcagctattaaaatcaatgaattcatgaaattattagacaaatggatggatatggaagatatcattcaaagtgatgtaacccaattacaaaagaacacacatgatatgccctcactggtaagtggatattagtcgagaagctctgaataccccagatacaatttgcaaaatacatgaaactcaagaagaaggaacgtcgaaggtatgtatactttgatccttcttagaagggggaacaaaatacccatggaaggagttacagagacaaagttccgaaaaggggctgaaggaatgatcatccagaaactgccctacctggtgatccatcccataaacaaccaccaaagccagacattattaaacatgccagcaagagcttgctgacaggagtctgatatagctgtctgttgagaggccctgccagtgcatgactaataaagaaatggatgctcacaatcatccattagatggagcacaggaaagtgaaggagctagggaaagtacccaaggatctgatggggtttgcagccccctaggaggagcaacaatatgaattaaccccagagctccctgggactaaaccaatcaaagaaaacatacagagggactcatggctctagctgcttatgtagcagaggatatcctagtctgtcatcaatgggaggagaggtccttgggcctgtgaaggttccatgccccagtatagaggaatgcctgggccaggaagcaggagtgggtgagtttgggagcaggggtgggggaagagcataggggattttcataggggaaagtaggaaactatttacatgtgaaatgtaaataaagaaaatatctaataaaaaaagggaaaaacgattagaacagcttggtaaatgctaagaaaaactaaaacataatgacatggactgggaaggagctgtctcgttagtgtggtgatcggaaggcaaaaatctctccaagaggtgtgagattcaccctaaatagtaagtgtttagagggaggcaatgttagctatctgtgagaccagcttccaggtaggcaggacaaaaatgttgtagtgtggtgtggcatggtgtggcatggcactgtgtgctgtagcatagcatggcatagtgtggtgtgatatagctgaccacaccagacagggattgaggtagaaagaaaggaaatcacaaagatggaaagaagcagatcatagtctctcatggccctgactgagttgtggagtataagcgaggtattaagatttcatttttactttaagaagagcacctttgctgttctgtagaagcttttaggataagcaggtatgactgactgggcaggaggaatctgatggtcaagtgcgagaaaggagtgggggttatggttggagttacaacctctttccctctcagggaaaaacaaaaacaaaacaaacaaaaccacaaaacaaccaacaaacaaaacacagggcaatgattataataaatgtgactggttgactggatttggaccaggagagaaagtgaacgcgcaaatgattcaacaagttttaatatgagaatattataaataggggcgatctctagaaaagcaaaaaagatggaggagccaggttagtggtggaaatgttactgtgtttcctttttcaagttacctttgaaattttgttcctcgattcagtggccttaaggggtatgtaacatatgaatagcacttgggaacaaggatttgagtgaagtgtcctcttgtatgtcaaataccacaagactgatttgaaaggctatagcaacatttggcatttgtctgttctttcattcaacaaacacatgcttagtacaacaacctgggagcatctggggaagcccagcaggtctcttctcatcttgggtgctggtgagtgggtgatgcagcttgtcactgatatatttatctggctgcctttccctgtggtgggtctcttgagtaaatgttgaatatggctaagatatttgcatataaaagaaacccacaaaatcagtcaattctagtgtacagattttcagtctttctctacaagaggaaatcacctgacctctgggaagctcagatgatggctgtgctgaggctatgcactgtggacctcatttgtcttttgattatctctgtctgtctagagttggccttatgaacactaatgtttctagaacctgcttttataccactgggagatgagaaaagaatgttcaatttgaattataaatacttttttttaagaaaggactttgaatatccactaatatagctaaaaatgtccatcaaacaacatgatagaattagacagtcagcagcaaccagtgatgataagccaggatattctaaagttagttgcccaatagcacatgaggctgatctgaaggagaaagattgtgccatctctgtgtcccaattaggtgacttttaaaagatttgagaagttgtagaaaccatcagtacacatagaaaatagcaatgcagatggcagcatggtggagtatatgcctatagccctaccatgtgcaagcctggggcaggagggttgcaagttacttctaaggacagtttcagaagagaggacagaaaggagatcaaatggcagcatagtctgctttgagtgacagcatgagatgccactgttgggaactggccgagtgctttgattcccaggcacacaatctgggacactttgcggttgtctaaagaaactatcatcaggcatttaaactttaagctttctagagttttccagatagtccttagtacattctgttaccataacaaaataaactgggtgcttattaaattgcccagtttgtaaggcagaattccaagactggtggacccatctgcttgtaaggacacccataaccttgttaccatagaaattacaacatgattggaggacatgggggaggggaatcacatatgatgagacagaaatccaaagggagagtcaaatatttaaactctcctttttacaacaaccaactctagcagaaattaacacaggaccctgcaagaactgtattaataccttccaagcgtggcacccacataactaattaccatacactatgggttccaccaccttctcaccctgacatcctgggaactaagcttgcaacatacgagcctctgaagaacacagtccacctctatccccaacatggtgtcctaacagtctaggtatggatgcacacattgaaatgacataccagggtttacagtccattatttttcttaatctagaagtaggacataaatgtgaatttacatagcagaaatccacatgctctgctatattttaagtaactgagcagaatgtattggcatttcatttttaaattccttctgtaccttccaaatgcatttttgctgtgtcgtgtgattttgtcagtatgggctgtgctgccctaatttacctgcaaacctgcggtggaatgcaacattgtgcaatgcttagtttcccccccccccaaaaaaatgtattttagatttacttatttttattttatgtacatgggtattttaccttcacttatggctgttcaccacattcatgcaacaccaacagaagccagaagagggcatgctatctcctagacctagagttacacatggttgcaagccatcatgtggtagctggagaatgcaacctgggtcctcttcaggaatagcaagtgctttttttttttaagatttatttatttattttatatatgaatacaactatagttgtcttcagacacaccagaagagggtgccagatcccattacagatggttgtgagtcaccatgtggttgctgggaattgaactcaggacctctggaagaacagtcagtgctcttaactgctgagccatctctccagccccagcaagtgcttttaaccgctgagaaatctctccagacccagaaaaaaagagttttaattcttttttttttttcatgccagggattaagcaagacttcatagagatgacccagttttaaaaggcaaccctaaatctcaagagattacagtatttcaaggaagaataagctcctcaagttatagcacatcaggcattcaatgaatgttgatctaataaaataatccaatatttaagtatattcttcatagtgacaatagcagctgcaaaataggagtagacacgggttgggtttttatgccttgtgcttcttatggtttattaatttgatatttacaatatttctagagctgggagatgcttcagaaggtcaagtgcttgcatgaggccctgagttcagatccctgaatccacataaagaaactgggcactggtgtggttctatggccctagtgtgcagggaggtctctggagctcactgaccacacatgggtttagtgacagtgccttgcatcagaaaataaactggggacaatttacaaagcctccagatatggctctctgaccttcacacttatacactcacatgcatgcatccgtacatacacggacacacacacactcacacatacatacaatacataaatacatatgtgtgtacatgtttccacatatacaattctataaagtatgttttatcatttccaaataatggtaaacaaagttactaagaggtaaaataccttgtcaaggccctacatttgagatgctagatatgaagcttatataaaggctatctaaagcctaagaaaacatagacattggcaaaacagtgtgtgtgtgtgtgtgtgtgtgtattagagagagggaattaaaagcagataatatgaatggttatatatggattatgaaacacattgagttttgtttaacttttcccatagatgtaaatgagaaaggatttctgaatgggcctacggaactatcattcatgttttaccacctgtcacctagttgagatgacctcctttgtttcatggtgattctccacccatgcccctacccttaggctaccttgaaacagatttcacacaccctgccatgaagagcaacaaaacaatggacaattctggagaggatatgtgggaaacggaagcttcattcactggtgggagtataaactggtccagccactctggaaatcagcatagagaaccgtcaaagagctagaaataattattctttatttcccagctattcccctccttggcagaagaagcccaaaagattgatcacctcagatcttcatgctcagccatgtttgttgctgttctatttacaatagctagagagtgaaagcaaactaaatgtccttcagctgataagcagggcaaggaagtgtggcatctatacaccacagaatactgttcacttctggatttattcaccacataatgctgttcatgacagaaaagataggatcaagtaaggtaactcaggcccagaaagtcaaacttgcatgtcctctctcatctgagatacctagctcaacatcttcagatatgagtctataacctctagtaacttcagaaacccagaaaagtgactggataaggatgaggtggctaacaaagaagaactgcaagatcacttcaaaggggaatgggggtggtcgctaattaggcagggatggagaaggaggcaggagagcaaagtcaggatgtctgaaaaagtcaaaaggggtaataattatctatctaaaatatcatgtaactctgtctacacatagagtaaacattaaaatttctcaccttggttgacaatgcttcccacaagagctgtagacaaaaatctagcaaaatccacaacacaaggaataggatctttatttatttaaagtaagttttcctgatgccatatgtagcaagatatttttatacctacaaaaacttaaaatgacaagaatctttctttctcaggaagcccctgctgtgtgacccatcacatctttgtatctatgtgttttgctgagtattactatttttagctgattttctccacacatctgagtgagtccctgatattcttcaccatgctaaacaagtaatgctgttgttagctttcttttagaaatcacttgctggcctcccagcccctgcttccttctgtccttgaaccctcctgcccactggttttcttgagattttccagcgtccagccatgaaactcaaacagctgctcctaagagatcatcatcactgctacagcccaaagctggccacaaatagtgctcttatgctgcatcggatagcaaaccacactgcaaagctgggggatgctgaggtggagcccctttgtggtggaaaggactttgaacagcgttatgtcagagaagttatgttctaatatttgcttgcatgtgtgtttcctcagtgccaactaaactatagtatatacttatgaatatacataagaaaattttggcattgtatctattttgaggtgtttctaccaccttactagctgagtaagttcatttaatttcaatgaaaccagaaagaacctgttacaatggttacctttattaaagagaaagatattgagagaatatggtgaatttagagaatttaagaaaggaaaggaaaaaaaacagaaataaaggtgtgtataaggatctaagaaatgggactaactaaggggggtgcccccatggtgtcacccctgacaagctccaactccaccaagagttgtgcattgcttgagacgtgttatggggtcatgtctttatctctagggaggttccttagttgacaagtcctgccaacgttaaacttggtgcaaaagagtctacttctttgaaggtgttggaagtagataaaaaacccattacattatctcagacctttaatgtagactaaggaagatgatacatcatagggactgacacttgataaatactctataagggctagtattattctgatagtatgaggagacaatgagcagtgactcaaccctaatgcaaagtcatacactcattagcaatccgttccccatggcaaagtctgatacagaaataactccttgtctccagattggctaggataaggaaattaaatataatagatagatagatagatagatagatagatagatagatagatagatagatagatagatagttatggaatttcagtgaggggttagtaggtttattgaccatagaatgatacagttatgaggtattgtgtaatattcaggcatattcattggcacatacattacctgaaacacttagtaaacctttgtgctgggaacattcaaaatcgtctttgtctctgttattgtatatgtctagttgctgatgagtatttcatgttgtgctaaagagcatgtcaaataatccctctaacccaactacagcggtggacccattgaccactttgtgtctaacccctcttcttcatcagctgtgcaaatccctgttctctacctcctatatggtcaacattattcttttaataccaaccgtgagaggcagacacaggaagatcctggcactggctggcctgttagtccaagcaaatagctaagaggacctgtctcaaaacacagtgcgaggaactatgggaagcagggtgataggcttgtaggacatgtgtgtataactttttctttgcttagatacttagtgtcttagttagggttttactgctgtgaacagacaccatgaccaaggcaaggcttatacaaacaacatttaattggggctggcttacaggttcaaaggttcagtccattattatcaaggtgggagcatggcagcatccaggcaggcatggtgcgggaggagctgtgagttctatgtcttcatccaaaggctgctagtggaagactgacttccaggcaactagagtgaggatcttatgcccacacctacagtgacacacctactccaaccaggtcaaacctattccaacaaggccacacctccaaatggtgctctcccaagaatatacaaacaaccatcacacttagcttaattaagatgcatgtcattgtcccctattctctttcacctcttgcaggaattgctcaaaaccaaattcacagatgtgggaggtgacagaggtaacatgttcagtgttctaggagctcaggtaagtaattctcagtccacctcagatccacatcagtgggaagcacatgaattagaagagctgaaagatatctttctagaaggctagaaaccatttatgccctgattttggcagtggttgaatatacatgtctacagatgccagtttcactgggttttcatatctgtgtgcttgtgacttttaagaaagaattttctaggttccaacaacagagagtaattgatctagacatggtccaagagtcagtagttcttacaatctcctgcttttccttgtctgtgaagtctcatggtcaggcaggattgagaatcacctagaaacttcacaaaatgtcattattctcccagtcattaaatccacaaatatctgaacactgttgagtagtgaagatgtgggaaatgatcattctgcttcctaatttttactgtctttcccttcttactacatgaactataaagtaaaattatcactactgaagtattagcaagtaacccaggtcctcaatcttcagtatccatctccccactaacagttgcctttggcataggttgaaaatatggttcccaattcctataaggcaggaagaacacaaatttgagaccagttttgaatagatggacagtaaattccagggccacatatataaccagttctaaaaaaaggaaaaaaaagaaaaaaagaaaaactctctttcaaagaaaagttgggggggggggaggtaggcaaacagaggcaggaaataaacatggttctccagttccagtgtagaatgtgagattcagtacatcttagctggggtctaaggaatctttaaaatctagcatggggcaagtatgtacctgacacagaatagagagcaatagatactgtccacaagtgctgcacatacaatacctaatttaatactgaaactgagaatatatactaaataaaacttaattgagcacaagggaaaaaaaaactctgcagattgcatactttatacctatctagacttcctcagctggtaagctgaaggtagagtagagactgacaagccttgtaaaccgcccaaagcaaagctccagcccacacaatgcctgggcttcggaagtctatacataagtctaaagtcagactttgcctggagagaccgagttgtattttgtttcctccctggggaaagtgaatgactatagatagacagggagtcaccagggtcctcaggttacagctgcacaccactctgtgtgagcagggtctcaaaccagtgctgaccactagtgactagaggaagagcctgagaactttgatttgagctagctcttcaactacctctgcagtaaaagggaagttgttcatgcattaaactttatttcctcatattccagacagtctttctggaacccagtggtcctagctcattgttttatgtctgtagttactttctgcctgattctagtcgctagagcatctctgaaaataacaatgtgctggttgaccattgctgcctcttttatcatgttcctctgctgcccatgctatggcagctgggctttctgctccatcactgatccaacacttcaggtagttacatcagggttaccagttattcatcaggttccttccttatgtctctataggctccatcttggtaaggctgagaaggttatattatttcctcaggattatattccctatatacaatagatataaagcactaaggtattgactccaacagtaataatatccatatatgatgaatcatatggttacataaaagtttatgcacagtattcatccttcatttctacagaggatttccttgtatatcagattcatggacgttcaagtcccttatccaaagaaatgtggcattcatgtgtaacctacacaaatcctcttgtatgcttacaaatcctcttgtacaaccatctccagactatttataacattctccatttttaaggaatagggacaagaagcaggtgtgtttctggttagtacagatgcatttttccctaagagctctgaccttcagctgacctgcaaaagtgaaacttatagacatggaaagacacctacacacagcacaatgcaagcatgtgcatggtgtgtacacatactattgatgtgtatacacagaagtacatacacgaatgcccacaaaataaaattgctgtttttaggctttgtagccaccagtggccatgggttactgggttcctgaaaggaaagctctggatggatgggaaggatggcaagagaaataacgagccaaggcaaagttctctaatcaaggctcaaattttaatgtacagctctcaatatatatgtgaaaacccaaggacccatccctttgttttggctgagttctgttgctgtttcagctggagtgagttgcaaagtaagttcttcagcagctctggggcaggcaggtgggcagtcctcagttcttaggtctccagcatgtaaatgtaaatgtaaatgtaaatgtaaatgtaaatgtaaatgtaaatgtaaaggtaaagaaaggtaaaggtaaaggtaaaggtaaaggtaaaggtaaaggtaaaggtaaaggtaaaggtaaaggtaaaggtaaaggtaaaggtaaaggtaaaggtaaaggtaagtgtagcaaggccagactcctggctccagtatcagaagaggtttgtttagccaactcaaggctgggggaagggaacgaggcttcctcaggcttttgtactttgtctatgctccaagctctctttaaccagccctgtccaatgaacatataatacaggccacttaacatgccctagtaattatttaaggtataacaaaccaggtaaattttatttcaataatatattacttctcccaatatacctaaaatatctccattgtgtaagagagccttagcttacctggtaccgcctgagtgaaccacgtggagcatggtttgttgaaaaaagcaagaggaatttattgttccagtgtactggttccagccctgtggtctgagaaatgctaattagcctctcccttctggaggggcaagtgtttcatgaccttcccaaagttcctaagctgaccttttcaattgcaacatataacagacagaaaaacaaagttttcttgtgttttaagtttttcaggctaaaatttggtgtgtattttgtggtcatagtgcagttcaagttgaaagagctgtgttttaggatttggtaccctctggtgctagatggctgtctgatcagtgataaacactgttctcttaactactctgggaacattctgatccagcaagtccttcaggcttcactagcagcttctgctcattcatgtgttcagtgttcaggtctaccatgctgcaggtgctgtccttagttggtggaaacagaggtagctcttgctagtgggtatatatattctttcccccaaaactcatgttgaattttgaatccacctactgccagtcaggctgaaatgatgctcacaggaaattttccaatctcttggaatggtgccattatgaaaaaaggaaagtagacacagagacacagtagacttgaaaagagagattaacattggagtattgattctgtaagccaaagcacactgaagataaagacaatgtaggtgctcttcttcaaagctctcaaaggcaagcatccctggctataaaagacctctccatggtgccagtatggaaatgtgaacaactgaaaagaaaaagtagctagagagaagtagctaggggcaaaggagaggacttccccaattgcctcttgaagcagctgtgtgtgggataaaggtgttctctgcaggaggcaagaagaagaatctcaggtggccttgctccagtttccctgagttagatagaatgttaccaactgttgagaagctctgcatggagaatgacaggaacagaggtgctatccatttcaggactttataaagcatgtagcaaacaaaagaaagagaacaggaagcataagataagggacaacagatcatcaattcagccgactgagcatcatctcaggcactgacaagagtcaggcagaaagcactgggaaagccatgctaaagccccatactgaaatcactgactgagacaccccagggaagactggcttcctggaagatgagtttctggcttcccatttctgcccgaggtacttctatgccatgagataagcaatagtaacctctgctggagatggtttaccttctggctgttcttcagggagcgatgcattagatacgtttagccatctgatgttctctgctctttgctgcagagggggcagcccatgccaccacaggtagttttggagggcattagaaataaacatgcttgaaatttagacaagggcaggggagccccttgctccctgagcctgctagcaacaagtttaaaacaggggtgacagtctaccaatgcaaatccatcatcaggtgaagaaggaagacacaggaaaggaaaatgacttttctggttcccacccagaaaaaaaatctctccacttattcatgtgaatattatccaagttatacattatttataacatgaagctggaatcacaaacatcagccaagtccagtagttctgagctgggtgagctaatgtgggtttttcttgaactatattcttcctctgttaagtccattagggacataaccgcatttggggctttccagaagtgggccaataaaagcaaggaaatggaatatttcattgctacattgtgttgattgataggcaggtagtttacagaacagctgaagatttctggaataatgtgaattatcaagtgtgatttgacactggatcctcccgggtgtgctacaatttgatagtactgtcatatgcattcataaattctgagtctgagagatgttgttcactggccatctcagagatcctcagcatgtgtcactgataactttaatctcaggacaatccttactaacaaaaactgagagtgagcagatgagtgggaacattccaggcaacaggaagaacaacttaaggggtttgcttaagagcaaaagtacaggaatggtgattgaagtgaatagtaatctacacctatagtaaaggagacctacatctgcccttcattgccattaagtcatataaaagtcatattcaccctagttgggtgcaacacagacaggaatctcccactcccatttaccaaaagagatgtgtgggacagtttcagaaagcaagatggaaggtttttctaagagcaaagaatgaagttacagggctgggattagagttcagtggataacaggttttcagtgaaagccctaggtcctgagtttgaattctcagaactcatttaagtctagggatatgagcatacatctgtaatcccagagatcatccagcaagattggaaatggagacagggaagcccctagaagctcatgtgacagctaagcctggtataaacagtggtaaacaagaaacctcatctcaaacaaggtggaagccatggactgacattgtcctaccttgtcctctgttgacctccacatgtgagcgatggcataggaatgcctgcactctctcatatgagtgggtctgtgtgcatgtacagacacacacacacacacacacacagtaaaagagtgacattgtttataccaagtacaaaataaataactaaatgtagcatcattttctaagcaatataattatctaaaatactttcattctctctatatctctgtgtctgtctgtctgtctgtctctgtctctgtctctgtctctgtctctgtctctgtctctctctctctgtctctctctctctgtctctctctctctgtctctctctctctctgtctctctctctctgtctctctctctctctctctctctctctctctctctctctgtctctctgtctctctgtctctctgtctctgtctctctctctctctgtctctctgtctctctctctgtctctctgnnnnnnnnnnnnnnnnnnnnnnnnnnnnnnnnnnnnnnnnnnnnnnnnnnnnnnnnnnnnnnnnnnnnnnnnnnnnnnnnnnnnnnnnnnnnnnnnnnnnnnnnnnnnnnnnnnnnnnnnnnnnnnnnnnnnnnnnnnnnnnnnnnnnnnnnnnnnnnnnnnnnnnnnnnnnnnnnnnnnnnnnnnnnnnnnnnnnnnnnnnnnnnnnnnnnnnnnnnnnnnnnnnnnnnnnnnnnnnnnnnnnnnnnnnnnnnnnnnnnnnnnnnnnnnnnnnnnnnnnnnnnnnnnnnnnnnnnnnnnnnnnnnnnnnnnnnnnnnnnnnnnnnnnnnnnnnnnnnnnnnnnnnnnnnnnnnnnnnnnnnnnnnnnnnnnnnnnnnnnnnnnnnnnnnnnnnnnnnnnnnnnnnnnnnnnnnnnnnnnnnnnnnnnnnnnnnnnnnnnnnnnnnnnnnnnnnnnnnnnnnnnnnnnnnnnnnnnnnnnnnnnnnnnnnnnnnnnnnnnnnnnnnnnnnnnnnnnnnnnnnnnnnnnnnnnnnnnnnnnnnnnnnnnnnnnnnnnnnnnnnnnnnnnnnnnnnnnnnnnnnnnnnnnnnnnnnnnnnnnnnnnnnnnnnnnnnnnnnnnnnnnnnnnnnnnnnnnnnnnnnnnnnnnnnnnnnnnnnnnnnnnnnnnnnnnnnnnnnnnnnnnnnnnnnnnnnnnnnnnnnnnnnnnnnnnnnnnnnnnnnnnnnnnnnnnnnnnnnnnnnnnnnnnnnnnnnnnnnnnnnnnnnnnnnnnnnnnnnnnnnnnnnnnnnnnnnnnnnnnnnnnnnnnnnnnnnnnnnnnnnnnnnnnnnnnnnnnnnnnnnnnnnnnnnnnnnnnnnnnnnnnnnnnnnnnnnnnnnnnnnnnnnnnnnnnnnnnnnnnnnnnnnnnnnnnnnnnnnnnnnnnnnnnnnnnnnnnnnnnnnnnnnnnnnnnataatgtgtttgttacataatggtacttatctctgcaaacagatgtgtgtgaacaggatgctggcgtaatcacacagcagctgagaacatgagctctgagactaggatatgtctgcttggtctctctgactagctctgtcaccctgggcaagtgacttctcctcacagcagctcaggttccttaactaacagccacacctcctacatccggtccttgggatggcttgttgcatgtggactatgctgatcaggatggtaatccctcctcataccgaggatagcagatacaagtgcaatcctgctttgctagccacatttcaagtgtttgatgactgcacatggctggtagctacattctgaacaatgcaataggataaaattcttttttaaatttgtttttatttttaattgtgtatttctgtgaggcagtatgtgcctgtgcattccgtatacctagaggacagaagacagcataggagctcctggagttacaggtgtttgtgagctgctgatgtgtttgctgggactgaatttgagtcctctgagccttcactgagaggcctatggtggaattatacctctatgaggcaaacgattaccacaaacagcttggcactcacatggttactcctgcatttgctgaactcttctcctcccacccctgctaccagctgttcttgagttggcacttttccccatttgggtggtgtgtgtgtgtgtgtgtgtgtgtgtgtgtgtttgtgtgtgtgtgtgtagacatagaagctaaagtcacctacagttatcattcctctggaactttccacttagtttttttgaaatgggcagctctcattgacctgtagctttacacagagagactggctgaccaatgagccccaagaattcccctatctatccccacctccgcagtgctggatgagattacaagcatgtgccataatgtctggtcttttcatgtgggttctggggatgggaactcaggtcctcatcttacacagcaagcactttatggtctctagcctggtgagctggaaacagtcattctatttcctctgtgttctcatagtcgtctattcatgctgtccttggcaaggctgtatcttggtcttctcacattttgacttnnnnnnnnnnnnnnnnnnnnttctcacattttgacttctctgaggtcactaatggaacttccaagctgtacccccaaatcctttatcattcatctggtgccaggctagagccttttaggaccgagatcacattccaatgatgtgtgttttcccataatcctcagcttgaaataggcatgcagatgctcgcaggaatgaataattctatgaatcagtctgcaatcccctgcttgttctctaaagcatgtctatgcccggaggcaaagctcacaggtgtgagcctgtaggtgctactctgagaccagatgccagggggtatctttttcaggcatcacgttgcctttgggctttccagaagcctctccaggggtgtcttggtcccttgtcatagatcaacatttgtgagctcatccgcaatcttttcttgcctgtgctgtgatgccaggaggcccttagctccccgctacaatctcctagtcctgggatatcactcaagataaccaccgacaatagaaggaaatctttctttttaaacagcacccctagtatcctagaagaatctatatgcaggcagctacagtttcaggatcactctaagaatttgctgttgaaatcttaatctcttgctaagcagagacaggattttgccaatagaggacagagactcataagtaggattgatgcccttatagactagaactcctgagagaatattctcaggcaagcacctcttcctgcccccctcacctaacccatataaagaagcagggagaaattagtacctgcagctggaagagttcctcaccagaacccaacagtaagggaatgctgctcttcaacctccagtctccaagaatgtaagcagtgtttgtgtgagccatggcactcatggtattctgttaaagcagcttccactgactgactgcccccactactactgtagctcggggacttagacaccctctgttcagttccctaactatgaactgaggcacatcctcctcattacggtgagaaatgggtggagtgctagactctgaatcctacacttaatgagaccactcaataagtcannnnnnnnnnnnnnnnnnnnnnnnnnnnnnnnnnnnnnnnnnnnnnnnnnnnnnnnnnnnnnnnnnnnnnnnnnnnnnnnnnnnnnnnnnnnnnnnnnnnnnnnnnnnnnnnnnnnnnnnnnnnnnnnnnnnnnnnnnnnnnnnnnnnnnnnnnnnnnnnnnnnnnnnnnnnnnnnnnnnnnnnnnnnnnnnnnnnnnnnnnnnnnnnnnnnnnnnnnnnnnnnnnnnnnnnnnnnnnnnnnnnnnnnnnnnnnnnnnnnnnnnnnnnnnnnnnnnnnnnnnnnnnnnnnnnnnnnnnnnnnnnnnnnnnnnnnnnnnnnnnnnnnnnnnnnnnnnnnnnnnnnnnnnnnnnnnnnnnnnnnnnnnnnnnnnnnnnnnnnnnnnnnnnnnnnnnnnnnnnnnnnnnnnnnnnnnnnnnnnnnnnnnnnnnnnnnnnnnnnnnnnnnnnnnnnnnnnnnnnnnnnnnnnnnnnnnnnnnnnnnnnnnnnnnnnnnnnnnnnnnnnnnnnnnnnnnnnnnnnnnnnnnnnnnnnnnnnnnnnnnnnnnnnnnnnnnnnnnnnnnnnnnnnnnnnnatcaccagcaccaggtcaagggaagcatgaaagtccatctcttcaaaaacttagtagacataccacacatgtaaaacattccttatggtagataatgctctaaacaaacttgaaaggcttatttggtttatatgttcttacctagcttgtcagataaaatcatttggaatgaagatatatctcaggtggcagagtgttgctgcacaagtgtgaagaagtgagtttgatcttcagaaccaatgagagagaagccaggcttggtggtgcaagttctagtttcagcactagggaggcagagacaggcggtgatccctagggctcactgtccagacagcttagcctactagtgaaagatcctagatgatgcctgaagaacagcatgcaaagattgtcatctggtctctctgtatatgcatgcacgcaccttagattcatagtgagaatatgtatttctatagatttcaagaagagtgttggcaagcttttctgtaaatgttcagttagcttttttttttttaggctttatcatgaggggtttcatctaaatggccaatgtctagaacacatttcagctcaaattaactgcaaccttttgggaatgtggtaccagatatccatagcaaatgttcccaggagatgctgaaatgcagttcaaactagtaagaacgaatgctgtagaggcaacccagatggacctgctggtgaagagatatgctacctcttcagaaggaagtatacatgggatttaaagaaacaagcaggaagaagcgaatgctttctctcccaccctgcaacctcccttagagctccctatgtgcagagtctagcagagctaggttttcaaaacacataggcaaaacacacattgctggatgtgaaagatggatttgcaagatagcaatagtgacttaagtcaagcctcatcgctccatgccctttggctgctgtgcatttgaatatacttccccatccgtatctaatttccatgtaagaagcaagccactcctctgcttccacacaagttgaaaccagtcttcctgtgagcaaaagcatcttctgtttcctaaataaataaataaagatcacaatttttttttttactatgaatgacacattattcagtcattttctttaaaactgaaactctggaaattaaaaattaacatccttgcctgtgagcttcttgtacacaccagaaaaagtttcaacctcgtgttccacttnnnnnnnnnnnnnnnnnnnnnnnnnnnnnnnnnnnnnnnnnnnnnnnnnnnnnnnnnnnnnnnnnnnnnnnnnnnnnnnnnnnnnnnnnnnnnnnnnnnnnnnnnnnnnnnnnnnnnnnnnnnnnnnnnnnnnnnnnnnnnnnnnnnnnnnnnnnnnnnnnnnnnnnnnnnnnnnnnnnnnnnnnnnnnnnnnnnnnnnnnnnnnnnnnnnnnnnnnnnnnnnnnnnnnnnnnnnnnnnnnnnnnnnnnnnnnnnnnnnnnnnnnnnnnnnnnnnnnnnnnnnnnnnnnnnnnnnnnnnnnnnnnnnnnnnnnnnnnnnnnnnnnnnnnnnnnnnnnnnnnnnnnnnnnnnnnnnnnnnnnnnnnnnnnnnnnnnnnnnnnnnnnnnnnnnnnnnnnnnnnnnnnnnnnnnnnnnnnnnnnnnnnnnnnnnnnnnnnnnnnnnnnnnnnnnnnnnnnnnnnnnnnnnnnnnnnnnnnnnnnnnnnnnnnnnnnnnnnnnnnnnnnnnnnnnnnnnnnnnnnnnnnnnnnnnnnnnnnnnnnnnnnnnnnnnnnnnnnnnnnnnnnnnnnnnnnnnnnnnnnnnnnnnnnnnnnnnnnnnnnnnnnnnnnnnnnnnnnnnnnnnnnnnnnnnnnnnnnnnnnnnnnnnnnnnnnnnnnnnnnnnnnnnnnnnnnnnnnnnnnnnnnnnnnnnnnnnnnnnnnnnnnnnnnnnnnnnnnnnnnnnnnnnnnnnnnnnnnnnnnnnnnnnnnnnnnnnnnnnnnnnnnnnnnnnnnnnnnnnnnnnnnnnnnnnnnnnnnnnnnnnnnnnnnnnnnnnnnnnnnnnnnnnnnnnnnnnnnnnnnnnnnnnnnnnnnnnnnnnnnnnnnnnnnnnnnnnnnnnnnnnnnnnnnnnnnnnnnnnnnnnnnnnnnnnnnnnnnnnnnnnnnataactgtttcctataaagcatccatgccaccttcaaactagtgtactttctagtggttataaggcttgaaaggagaactgcaattctgtagtgaggcccatgttgtacgttatgaaaatggttagttgacagaggtggtgctatgtgggatgctctgtcttctgaccaggggcttgggctatccctgaaagatgctgctttcagaaataccatgcaccaagaaaacatgcccatagccacaatatttcaattagggatacactgcaccctacaccactgtaatcagcctgctaccagcttaccagctgctacctcccagatataataccatgtaaaagactcagtgtaggtcttggtattgtcaggtgaggtactcagaggtagccctggacaggtgagcagtggagatgggaagtccattttaaaccacacatcacatctattccttttaccactgcaatattgtacatggaccatggaacgagtgaggagggagggagggaagaggatgctgacagctgcaggagagaacaggaggcacacctcattcagtgcacgccctactgctatgaacttttgctggaccttcagaagaaacagggatgaaatgagctagaactaataaacataatgtggtggtgggggcatacaactgtaaatggcgaagctcaagtgttctactattagtcagaacccacataaaatagtgaggcacagtggtgtatgtttattatctcagcactggagaagcagaagaaggtggatctctgaagatgaccagacagacagcctgaccagaccagcaaggtccaggccaatgggagaacttgtcaagagaaatgaactgagttggtagatggctcctggggaatcacactcaatgcgtggtggagaatgaacatacaaaataagcagactcggcagaaggaccatggggagacaaagagatggttaatgtgagaaagcacaatggtgatggaaatggcatggtcaggaagggtcttgtcacggaagtggccttaaagtgaagttccatgtaggggagcagccaggatgccaatgggaaaagtttgactattcctcataaagggaaatcacagggtctctctgatacacaaagcactgcattcaagtagcaagacaaagctaacgtcaatgaggaagagaatggatagaggtgagtgatgcaatgtggttattaagaagccaaatgaaaagagaagtggatgctttttaagtatccgcatggcacaacctcatttatacaataaaggtatcaattctctgtgaatttgtttataattcaatgtgttcttcattctaaaaatacccctaggtctgtttaaaacaaataaataaagcagcacttgggtgtgtgaggaagctgtaacgtaggtaaacatcaagccagggagaacaagtggactgttcctgcagttggcctggtgggccaccgtggactggactggaatggtgaacactgaaaggaaggacatcatcagggtgaggttacagaggcatctatgtgtttggtggggcaaccagacatgggtttatgcatccctgctattaccactgggctggaaacaattgatagacttatttcccctgtgccagttttaaccaggtgagggtggagggtgaatctgaagaggctgaggatggaagagtacagaagagaggaaccaggaaccatggcttctgctatagtctggggggagcaacatggttagagatttgccttgtctggatagctcttaagctttgcagaacagagtcaccatggaaatgagatcccataccacatcccctagtaattctgatccaaagatttgggaggaggtctgagcatttatatttttataaactctgaagtaatttgtccatgtttgaagacctcgactgaaatatcatcatgaatatctaatagactgggactagagagggggcttatccgttaaaactactaattgctattgcctaggatcctggttcaattcccagaacccacatggagactcacaccatctgtaatgccagttctagagatttttacacccccttctgaccttcctgggcatcaggcatgcacatggtacacagacatccatacagccaaaacactcatacacacaaaaatttttcttgtagattgcattgataaatttttttcagtgtttttggtggtggtgagatgttccaatgatacatgcaaattagttaagtgacaatgttttgaaacaaaatgctatgcccctggagttaaaaatacattttataagagaaaacggtataaaaagattacattatccttgagccaagtagtatggttcatacttacaatcctagtacttgggagactgattcagaattcttaggagaattgtgaatttgagactctcccagggaacatagggaaaatctatataaacaaagaaacaagtcaacatcaaagtttcaatcaaggatcacactctggacaaggggattaagtgtgaccctctcttcccatgtgaccatcactcggaagaataaaatatcagacaatcaacagccactaaagccatttggagccagtgtttcaaagaatgaatttcaaaaatgatgggagaggtttagaaaatgttatagaagaaagcttaaagcaggtactatagcagaaagtaagaagagctcctaaagaataggtcccaagtgaattgttacagtgcccaataggtcccaagtggattgttacagtggattgttactgggggtcagcgggttaaggaggtttcagtgggctgagataatggatgctgggctggtcagtttgtctggcccaaccagatatccccacaaggaatctatgcacttctccttccccaagctggactggagtttgggggagcactttcaaagaccagtgaagtttctgattacacatagcttccaggcatctgtgttcattaggagactgtgagaaatgagaagaaagatgaaagcaaaagacacaaagcagggccactaagtacttctagtccctggccaagagagaactatcaattgagcagccaaaggcatgacttcagaccagtgcagaattgtctcttctcgaaggccacaccctagcttcctagcaaggtcatttctctgattctcatctttggggaaaagggagatggttgaaccagtaaagcttttgttgtacaagcttgtgaagcttatttctgatcccgggtgcccacataaatctcatagagtctgcatccatatcccaacatggggcactaagataggtggatccctgaagccaacagcccagctaatattgtcaaactgtgacctctatatttagtgaatagccctgtctgaaaatacaaagtggagaacaactaagaaatgcacctgtcgtcaacctccagcctccagagacatacacatcaagacacacacaggcacaaacacacatgtataagaagaaaagaacattgtcctagcatttttatgtgtactgagaacacagagcagagaccttctcacctcacagtggccaggaaacagatgagaaactgttggggaacagtggctcttcaggagacttccccagggacttccctgtccttcatgagtacctacccagccacttaaggttgcatcaccttccaacaggttcctaggctgagagtatactctttaaacgtggaagccatagcgttcaccaaagcatttccagaacaaggcctgtgactactggaagaatatttcttctctttcaatagaacttaccatttgcacaagtttatgttcatagtacaactgaacagaatgtccagaccacccatgcacacccccagggtttgttacagatgatgagcctacatcattatcactcagagcccatgttttgcttcagaattacttgtgattgtgtgtattctgagtgttggaataagtatatcatggcgtggatctacaatatgggatcatatagaccagtgtccctgccataaaagtactctgcagtgtccttgtgtgtgtgtgcatgcgcatgtgcgtgtgcgcgcgcgcgtgtgtgtgtgtgtgcgcgtgtgcgcgcgcgcgtgtgtgtgtgtgtgcgtgtgcgcgcgcgcgtgtgtgtgtgtgtgtaactggaatggacatgtgccaaggcacatatataatgtaagaggacctctttcaggagtcaattctctcctcctgtgatgggttaattagttaactcaaactatcatggttgtgtggcaagtatgtttatgcattgaattatctggccaaccctgaatattatttcattgctggggtttgttttgtagtcacctactgaaagacaccctggttgcacccaagtttggacaattagaataaatatctatgattgtctattacttatgttttgtggccacattttttttattcttttgggcaaattgccaaggagttgggaaaaatcagttttgatgctttcttctgtgtgctgacgaattaagaaattctttcactagatgggtatgtctcccccactgcctctctctagatcatactaaaccaatctatccattaatttagcttctgagatgtgtgagcaaggaagttagtgtgtattgagcttaactggtaggtgggatctcctatccacaaaccggcagtgcattgagacagcccaaatgcttccttttagtttatgcagaggagttgggaatggccgtgtgaactgcaaaatttcatttctatgtcaggcattttcttcccctgtgaacttggaaagttatttagtgtcttggctacaggcctctctgtccataacagaagcttgctgttctcctcagatgagttttacatgaaagaagtgttcatttctgggtggctgcaacgctagccatgaagcttccctctgagccttgcaacttacccatttattgagcatatgctgtctgccaggttgtgttccaagctctagaactatagttataagaaagaagcatacattggtccagtttctgtggagcacaaaaggggccacatccaagaagctctgtagtcaccattagtgttaatggtactgttccatgtaagtataattaatcatgtagacacctatgcatcatatcacaaaattcaccaacagtgtttccattttcttaaacaggtagatagcattatgcacacttgggtaacaagcaactattcaatctaaaaatttaataaaaagatgaagaacctgacctgggatgtaacagcagcaggcattgcaggcagcatccaccatacaattatcccaactctaacattcctcccccatatgcttctgcttacaatgcagattatttacaggatgtccagttgcctttactagtccttctgaccttacttagcttagggaagactggtagagagtcgtctggaaggtgacacattcccatggttgacattccaccaggacaagatggtagctcggagcgatggttctatgaaagaacagtgagtgcagcaggccagaaaaaaagagctgcagcaatggcagagtgactcagttggtaaagtgcctgaggcccaagcatgaagatctgaactccaatgcccagtacccacataaaagccagcgcagcagcacacatctgtaaccacatctctaggggagcagagacaatgggattcctgggactcaaaagggaccagccagtctgtgaaacttcagctccaggaagacatcctttctagagacatgaaggagaaagcaactgagaattacacccaacatagacctctggctccacttacatgcacatacatgcatgcaggcctaagaccatagctatgagaaaagccaacttgagatttctgtaacaagccagtgtgagtgtgtttaaggtcaagttataggtgataaaacagcagcatgtgtctgtgaaacacctacacatgcatttaaaaattgccaagcaccagtgactgaagcaaatgacaataatcatggcaagcgattctctgaattgactccagcatgcaacatgatggctgcccattctttcagacttagaaactttagtgattaggatgtaacacatacatacatacatacatacatacatacatacatacatacatacatacatgcatcatatggactgttcttcagttctctctctccccctctctccctctccccctctctccctctctccccctctctccnnnnnnnnnnnnnnnnnnnnnnnnnnnnnnnnnnnnnnnnnnnnnnnnnnnnnnnnnnnnnnnnnnnnnnnnnnnnnnnnnnnnnnnnnnnnnnnnnnnnnnntccccctctctccctctctccctctcctcactccctccctttccattcctgaatccctgactcccttgttgtttcctcatggctcttggatgtgactctctctacagttctcacaggagcatcttcctgactctgtccggcctctcagcctcattgtctcttagcgattcccattgccttcaccttctgcctgtaaacttacccacttccccactgccccactgccccactacctgacttcccttggcttcttcatcctccccattttccctcatctcacattttcaaatgctctgcctccttctttaatttcagacaggctgaagtcactcatcactttttcagcatatcaagattccttcttaattttttgctgtaccttagagaataataaaaacgcttgtgacgctggcttctttctccatctgagtcattccaccttcacccttgcacctcactgctgctagccctattcagggtcttggggttcctcacttctgtacaataatcacctcatgatttgtattccatacttctcaatctaatgtgacatttcatgctcaaattgagaattcccactgccctctttgaagtctttctcatcctcccatttaagaaaagccacatagagaagctttcccagttattaaaagggcatgtatcctgggaaagatggctcaagaggttactagcacattgatgtgaattgatcggacagttagaaacaaaaccattctataatgtcaagaacatgtgaatccaaagagttgtacaaacatgttatccaaacatgagctatgtttttatgcccttcaacttctcctctcatgaatgaaggagtgctaacagactacattttataaaacaatgatcctgttatcacttggcgattcgtgggcattggtatttgaatggaggtcttggctaacacccaatctagatttctggtctgcttctccttcatcatcataggagcagttggaggtcattacctcaagatgacattctatttttgcattatgtttgcattatgattttaaagtttattgcataaaaactcttagatgcatatttcctattatagggtgaatatttataagccatctaaggtaataacagaaaacagagtggtgggatatggaaattcatttttttttcagctcaggcacagcctgggaaaaattaattgcattgttttgcctagaggaaatgctttattgcttggggaatatcaaatgtcaaccttctcttattcaagatgtattcattgctaggactaggagatttttctacaaataaatatcttaaaggctgtcaaaccacagctactaatgaaggaaatcaaaagaggcatcgtttatcaacaccgttgctcttattcatattctggaagggttcctccaccttacaaaactcatctcaagaaaattgctggccacatcattttaattttcctcttccttttttccaaattcccttcaaatgcttctctccatatagcaccatgcaccattaccatcctgtcactcaaacatgtgacagatgtttcaggttgctcctgaggataaaaggctcacatatagcatcctcatctggcactatctataataccaatatgagaaagtcttttccaaatctgacctgttcgcagtgctgtaggtgatagaggatggcggcaggaacagacataatggatgtttccacatggcaatagcaagaataaaataagatttgctgagaaggaaggcttagaagagtgggtagctggaagatcagatgagtgcctgatttgaaagttgggacctgaatctatccctaccttcctatttatagtggcgaatagtaggtattcttgaattattgagggacctgaataaaagcagtagtatagagatggcctccctcactctccagccacttgtagttcattcactagctagcacaatgccattaggtagaaactgttggacttattttagagtcaggaacctaggaacatgaactgcagttacctctgtggtcaactgtaaatacaatgctgattctgttctacagggggcatttgtcaatgtctagagttgggtctagttattgccatgaaactctaagcttccaatgatagaagccaggtatgtcactaaacatcctaaaagccctgtgggccttagaagaaagacataccctttcctgtaagaagcactcaagcctcgaagcctttaaaagccagtgattttaataaatcctcatatctcgttatccaaatgtattctcctacctaaagaaccttcccattttaccagtgcagagcaaatgagtagcaaaatcatgtgttcaatgaacagctgttgagtgaatgaacaaagggattagacgagtgacttacttaggatttgtccttattgttctgagcccctcccctgttcctctccagcaaatggcttatttcatttctgactgtatcactgtgaaggaatgcccttcagatagaactgtgtctttgatgttctttacaaattgtaaaaataaaatgtgtgacaataaaatacctctctgtagacagattaggatagaagtgaaagcaaaacgtgaagggcaactgagaagcaacaggtaatcagtgatgacaagaagatgtatggacaagacctcaaaacacaaaataaacaatattaacaggaagggggagtcataattaccttagctttgaaaatattcgctgccagcgaccctagcacactgaggtcttaaggacctcccttcctgacctttaaaccaattcatgaagagcaagaagaaataccttaagctgtcaacagttcagtgcatcttcttagaactcactaagagtcatagacacaatgccccagttgttggaagttctttctacttggttcacatggcattttgctatgttttgtttctttctttgccggcttctcaacaattccccctggcaggtcaatgctatcttaacacaactatgaaaatgattgtgtgtgtgtgtgtgtgtgtgtgtgtgtgtgtgtgggtgtgtgtgtaggggtgtttctcctttgcttggtgagttttttaacattgaaaattgttctctgatatcagccctttcaaaaatagcagcagatgggagggatctatcaccctcctatggtccccctcaaccctaatttgtaataccaaggctgccaagctctctcctctgctataagcaaatctgccggccatgttctgagccttgggccttaggccatcaaggcagcacattcttcgagtgtgcttctgggctgctggcacagttctaccagcagtgccacatgataattacatcattaagacctagcatgaggccagcatcttctggtcattactgtgtggggaggcatatgagaacaaagggtatatatacataatgacaaagtttctagtccttgacgacttaaagtataggcctttctaattacctcgagcattctgggaagcttcctgaacaagcaattctatcaaagcacagagcgttaaataagtggtcactttaaactcagacctaagtacaaatgagttggctagctattatgatgaactaccgaagcagatgatccaaggtgccaattgaatgcccctccataaacaggacattataaacagcctaagaggaaaattggaaatgactcatctttaagcatgtgtcactagaaaatacagggtttttattgctctctgcttgtctgtatgcactccccacacacatacttatatcatgctttacaatgtatattgactccaattgccctgcccccaagaaaaagcaactttggatgttcatgagaatgcagttaaccaaaaaacaccatttgtgtttaatccttgtgtatcacccacccttacagcacacatctccctttaccctgatgcttcagcctccttggccagctcctgccctgcttcctgcactgaacccttgacacacttcctctccaagatgttcttcaccacggcagctgggccaatctatactttcattctttcttatttcaagagctgctgggctagatgtctgtcttaaagtttctcatgcttgttttgagcacctttctctttgtaagttcacaccatggtgtgtagctacttgattgacactggcacttctgtttctcactagattaccaactccaggagagaaggcccatcagttcacattctcccctagtgcactgcctagcagcatagcctgtgattagcaaattttgcttgaatgatggacaagacagaaggaaagaataaaccatctttggtttacacacattcaggacataagtagttaacacaatttatttatttattcactttacatcccaatatnnnnnnnnnnnnnnnnnnnnttaaactcattttcttctaactccagtgaataacaaagtgaagagtattaacacagagccaattggaaagtcctgcagctggctgacacaagcagtcttcagagatgagttcttagtgtgggagcatgttgatgtaatatataagtttgttttcagctatttccagccttcttgtgtgaaaacaactcctcatcttatctcctctcctctgcatttcctcctctccctcaatctctctctctctctctctccctctctctcccctctctctctccctccgcccctttctctccctccctccctgccccccctcttcccctccctctctggtttgtttttgccttgatgcttttactttggttactttctatttgttttatttagtttgttttgatattggtaggtgactttggtttgaggtaaggggttcattgctctgttttggtacatgccaggcaagtctgccacagggcaagactctatgtctttaaatcactagctttctacttcctttcaaaagtcaagtctgctttcaaccatcaatttcataccacatggaaaagtctttcctccgtgcccccctttgcttggaccagctttccctgagtagaaggtggagaatgtgtggatatgctggagggaatcatgggtatctttctttaattgaactggtgcctgtggtcataactgtttcactcttttagttgggatgaccatgggtaacaaattaatgttggttgctcctgagaggttcatgcaaggagtctgtctgctcctgtcctcagtcacatgtaggcctcatttctggggctccattgaaaaatttttgctaagtttacctagaccagccttgaccttctggttaaggtggcactagttcagctcccttcctcagtaggaacgtggctcacttggaagctgtgtgcatctatcacaaaagatcgtgacagtggtggtagaagtgcctgtggtggcccctctctagcatgccatggctctccacttgtctttttcttctagatctgcctggctaggcataaaggaagattcaatcagttatctacaaagttcttgttcaagaaaaccaggaaaaatgtgatagtaccctctcacacacatcccaggttccctcagtggttcttgaagggaaatcttaacgaagagccacagagaagactgaggaaagccacagtaatctcttcctcagctaatatatgcaaggaagcatggcagacttccttctttccaattcgtctccctctgctccagtccagtttttctctttctatatacctggtaagaaaggccactgggatggtgactggagatagcaagtccaaactggttttctcataatgatcctgggagggtatgtattttccagtaagatttccgtgcctctacctcctgaacatcagaaagaaactatatgaacactgtttcagaagctcttcggggagatgggagtttggccttcccagctccgtccatggggaagcagtatgggagagagaacattcactatgcaaacataagtgcataattcagttcctagcacccatgtaagaaaacagatgcagaggtgcacacttgaaatcctggggctggggaagaaaagacaggaggatctcagtctcactggccagttctcctagcctggctaaattagtcagccttagctcagtgagagacctgtcgtaagaatcaagacagagttaaagaaagcactgaaggagctgaaggggtttgcaaccccataggaagaaaagtaatatcaaccaaccaaaccccccagagctcccagggactaaaccaccaaccaaagaatacacatggagcaacccatggctctagccacatatgtagcagaggatggccttgtcgggcaccaatgggaggagaggtccttggtcctgtgaaggcccaatggatgccccagtgtaggggaacgctagggcagggaggtgggaatgggtgagtgggtgggggagcaccctcatagaagcaagggggaaggattatgggataggggactttcagagggaaaacctggaaggaggataacatttgaaatgtaaataattaaaataaccaattaacatttttaaaaaaaaaaatcaagatggatggttcctgagcacatatatatatatacatacacacatgcactctctcacatgcacacaaatgcacatacatacatatgtagcgtgtagttttatctacaccactttgtattcccagctggttacacatgtgcacccacccaggagctatctctgatccttggatggaatacacacacacacacactcattcatttttaatatgttttttagctcaatggtcaggtacttctaaacctccagtggctaacatgctcttaccttcactcccagctcaacacctctgcaccttccctcagcttatctgctcagttaccttctgtgaagcccattggtcttgcaacctaagatgatttcagactgttttcccttaccgtctgcattttagaagatctcccctgtagcgttcagtctgtcctgtttgtttgtttgttttgttttgttttgttttctcctatgtatatcaattcttctctcctagcctgcaggaaccttgaagttcagtctctttttatactgcctagccattattagtacctagcatctttattgatagatcataaaccaattgggggtgaggacctttagtgttagtaaacagattactaatcacagcatcagaaccaccacccacaatatacatgcacacatgcatgcacatatgcatgcgtgcgcgggcacacacatgaatgcactatgcttccattagtgtttaaaccaattttacaaagactgatatatacctctgagccctcaaaatctcctttttctcactacaaaaatgccttggtcaggaaagagaacctgacttgacttaagaggttctgctataaaatgagcctggcaagctatcatctcagcaaggtttgtgtgaaagaatcctgggaagcagatgttagaatccagcatccatctttatccatggttacacagtagagacaccaaccaaaaaaggaagtcatctaaaaactgaaattgaaatttgatataggacagcaataaattttctttattaagaatgaattggtttttcaacatttaaaatgaacacagtaatgaggtagcctgatcatgcacctgggtctcaggctctggccctggtttgaccccagctctccacccctttttctgtttctcttgttctaatttgactctggccattgtctcaagcttttcactctgggatgggttggtgttgcacaccatcatccttttcctctgagccccagcgtgggggccttggctgttagtgcaccttggtcagggtacttgtgatggacgctgaggaaaagtgctcttgatcaggtcagtctgcgtgctttctcctggagtggtggagctttcaataagaacatgtgggtgacctgtcgaggcttgtctactaagagctctcccagcaagcattgttttgcatccctgtgtctcacacatctcagagaagtttcaaatgtgcagtctcacagataccagtcaagattgttcttgctcccttgttgcattcttgaacaagtttcttaactgtgaaataaactttcaagttttccaatcttgcctctttctggcctcaaattatttcatacctcagcctagctgatgatagttaacctggaggattaacacagtgaagttaagcctgtcggtctacaactactctttgccaccatatacacgagtcacaagggcaatggatccttgcttctctgaggtcagcatctgcagctgggcctctcagagctaccctactgacattttggactggctaatatcttgttgtaagggtctggcctgggaattaatcatgggatgttgaacagtacacttgccctttctcacaggaagtgtattagctctttgtccctcaactgtgacactaaacacttctctaggctatcatgtaatccctggactgggattcccattccctagccagtgaaaactatggacatatggagattgcagatttttatgagagaaaccccacccttcattggtatcaattttgaactgagaaaatatctgttagcaaaaagtttgctgtccaaacctggcgacctaagcttgatttccagaactacgcatttaagaagccaggtgcaaagatacattcttagaatctagtttctatggagggaaaacagcagataccaggaacttgctaggcagccaccctggtctactttgcgaactgaaggccagtgtgaagctctgtctaaatacatacatatatacatacatgcatacatacatacatacatacatacatacatatcaaagagctagagagatgatacctaaggttgttctctggcctctgtgtacatatgtatacacacacatatgcatacatacacatgcaaatttaaggatttctttctgtataagatgtgtaggcagaaagactgattagcaaaatatgatgtgctcttacgaattgtgacaactactgtcacggcttgtgctgaagcctgcctctgaattcctgcagctctgctcttctgtaagaacttgaaagttcccgtgagattaatcactcctgcacatttccagagggaggtagtcccaatccgcatcactctccagtgttggccgtaaaaattgccagggtttgttgatttagagattaattattgattatagggaaccttattaatttttcagactttttctcctttgggtgcatgtctgactgcctgtagtgagcataagattccttccagtcattctgcatcaaagccactggctgtcacccagggtgttatcttgttctgtgcaggctggctgcgtatgttgactctgaagtttttaatcaggcatttcccgactcaactgcacatgtcaagctgtggagacagaatccattagacactggctgaaaccagcaaggacttcaagtcatcatgatttgatatttccacaggagaattttccaataagacattaagaaagtatacattctgaagatagatgagcaaaatgcctgcaggattcaaaaggggaacgccatcaacaagaagtctttcaacatctggaagaatttgtatcaatttaagtatctcaatttcttccatcaatcctgtatgttagcggatacaatcaataggtaactgtctcaattaaccttaatcaatatacttgtcaataatgagcattacatttaatgataataacacagaggaagagtcaggagatgactcactcagtaaagtgttcggtgagtaaacatgagggcctgagtttgggtcaccagcctccttgcacatgccctgcaagcctagtcatggggaggtagaaacaggagaatccctggagctcgctgaccagcttgtcttttccagttggtgaactccggggtcagtgagagaccgaccctgtctcaaaaggtaagatggagaagaacagagggaaacaacccatatacctctcacctacacacacacacacacacacacacacacacacacacacacacacatatgtgcattcacataagaacacacacacatgtacattcacacaggaacacatacacactaatacacctaatacacacacatatgtgcatcacacaggaacacatgcatgcaaacaaagagagaagacagagacagacagaaacagacacacaggagagaagaaagaggcacagagggcaatttttttcaattaagtaaaagcatagagccagtttagagtaatgagagttccttgttatgctgagtccacccagcaaatacagatggagcctctattgcatcttaggcatgcactaagctggacaaataaaaatcatttggacttgggctttgcttcatgctaaaagcctttttcaataacatgttttctccctcattttcataacaacaaggattttgctgcaagacatcattctaaaaatcaatcctattacatgaaagagcaaggccttaacgtggtgtatgtgtgtgtgtgtgtgtgtgtgtgtgtgtgtgtgtgtgtgtgtgtgtatgtgtgtgtgtgtgtgtgtttatagatgtgaatttgccttccttgtgcaggtgaaatcttttttgtaatgatagttaatggggcccacaattactttttaaatttatttttatttattttttttgggggggtggggttcaagatagggtttctctgtatagtcctggctgtcctagaattcactctgtaaaccaggctggccttgaactcagaaatctgcctgcctctgcctcccaagtgctgggattaaaggcgtgtgccaccaccgcccagcccataattacttttatcccagatgttacagtattgtggagaagaaagagaagaagaattttctacaatgacttcaaagccttgtctctgaaagagttttcaaaagcattctcctagctaaggtattttacagacatgaagcactgacaaatgagctgtctgatcctaaactggtttcaaacggaagtagtctggggtctacactccaaatgaaacagcaagggatgagagaccatctgttttactggtggtcaatcactcaagtgtttctcagcctggacacttacagatccattaggaagaaataagactgcaagaccctagggccatcttgaattgaacttcacagtggcaggtgtgtgcagttcagtcgatactgttttaatttacactgcttaaattactgcttgtcacaggtttctctctccaagaagactgctgctgtcttcagattctctacaagcccaagtcgtacttgcaattcatgatgcaagtttacttatttgataccatgtttacctgagtttgagttgacataaaacagtatgcacaggccaggtagtgcaaggaaatactccaatactcaaaacagagtctgtgtcttaaaatgctttaacttatggatactttaacaagtggttcttttgtagcagagactttaatgcttataaaataatatacacatgtctccttacatcgtctagcttcttttgcagaaagatcaatgtcacatgattgctctatgtcaaaccatttatagattctccttgtccttgttttcctgaacctagaagccacatgctgacataaacaatgcataagatgaggtccccacctgccctgatcctttgagaaagtattctgtaagcaggagtcaacaggtagaagagataagaaatgagcctccatgttaaatcactaagagtccaggctgaatgcacagaggagtaaattatccactgcttgttagctcattgagctctgactttcccctctcagtgtgtgctgatgtgctcagtgcagccttgattactggtgcttatgacagatgtgggattattgaccatggctccattacaactacaaaatcttccaacctggcaaaatcttccaatgtggcaagagttagatgttgacctattctaacaaacaagagctgtcaactgtgtccggatgaatgtgctccttgtgtctttagtgtcacacttattgtaatcagcaagtgtttaacaaatgctgataatctatgacggaggtattagttattcttctaccatctaaaagtgagcttgggattttgttctttcatattacctcctcctcttttactcagatacttcaaaaaagattgtgtgtgtgtgtgtgtgtgtgtgtgtgaaggtgcatgtgtatacatgtgtgactgtggagaccaaagatcaaccatcagaaacactctctaccacctttgagatggcatctctcacactctggaactcaccaattactcagaactgactgggcagcaagcagcaaggatcctcctgtctctgtttcctcggctttgggattataaacatgcaccattgtattagtcagggttctttagagtcacagaacttatggatagtctctagatagtaaaggaatttattgatgacttacagtcggcagctcaattcccaacaattgttcagtcgaagctgtgaatggaagtccaaggatctagcagttactcagtctcacacagcaagcaggcgaaggagcaagagcaagagctagactcccttcttccaatgtccttatattgtctccagcagaaggtgtagcccagattaaaggtgtgttccttaaacacggagattcaatcttctggaatccatagccactatggctcaagatcttcaaaccaagatccagataaggatctccaagcctccagataagggtcactggtgagccttccgattccggattgtagttcattccaaatattgtcaagttgacaaccaggaatagccactacaaccatccaatttgggtttttaaaaaatgtggattctggagactggatttagatccttatgctttaaggcaagggctttaccaactgagccacgcctccagccccaaacttgtccaagaatcaataagtggttcattgggctggagagatgattccatggttaagagcaccgactgttcttccagaagtcctgagttcaattcccaccactcacaactatccataatgggatcactgccctcttctggtatgtctggcgacagctacagtgtactcataaaataattaaataaatgtttaaaaaggtatatatgctcagtttgggtatgaatttgataccaggaactgattgacatccaactagctgggtttttttttctaatttatttatttattcactttacatgccaccctctcttcccagtactcgctcatgaaagtgctccctcattccaccttacccttctcttttgagaagaggaagctcccctctgggtgtcattcccctactaagcatcccatacacatcaagtcattgcagaactaggcatatcctctcccactgaggtcagacaaggcagtccatttaggaagcaaaatccacaggcaggtaggcaacagactcagggacagtcccagctccagtttttggaagacccacatgaagaccaaggtgctcatctgctacatacatgtagtgggcttaggttcagcctgcactcactctctgggtggtgattcagtctctgggagcccccaagagtccaagttagttgactctgttggtcttcctgtggagtccctatcctctatgggtccctcaaaccttctcccaaataactccccagctacacctagctggtcctaaccaaggtgaaatccatgtcacatgtttgactttgagccacaatgataccatattatctcctccccttttacccagatacttcaaaaaaaaagattttgtgtgtgtgtgtgtgtgtgtgagggtacatggggcaagcaagaataggataatgaaatatattgctagacatgtgagtagacccagtctctagcaggcagttgtacaatagtcagcctgggggtgggcatgaaatgagcttgatatttgtgacccactacccaaaggaagcagccatgcatgcagcacaatgccagataccacctcagtccagttcaaatgggtacggtcaggttgatgatttatggactcactgtttgctgctgcttgtgacctttcaaacacagagacacattctcaccttataagcatacacatctgattaagttataagtgtagaaactgaagggctcaacctcactctgaccatgtgagtgcctggttctgcatcatcaatgtgtagaatgaaaagcccttctgctcaaagaacaagcagatgtagcagatgcaatccatttcattagagctattttaagcactggtatattttctagacttgcagttgaatacattattcttgtcacttatttttttatatcaaaatttgatgctactgaaaatactacactactcattgcagaaaaggtcatttgtttcctgtaatattatgaccaaattcttcagaagataaaattatctctgacttactctgaaaaaatgatggctatattttgaaagagaatctctgaaattagggaaatctcaatttggggctgaggctatggcttagtggcaagggacttgcctagcatgcctggtttgatcctcaataccacaaaaattagttaattgcttaattaaagttgttgcacccaaagccgggcgtggtgacgcacgcctttaatcccagcactcgggaggcagaggcaggtggatttctgagtacaaggccagcctggtctacaaagtgagttccaggacagccagggctacacagagaaaccctgtctcgaaaacaaacaaacaaaaaagttgtagcaccgagtcctaagattcaggaatttctgtgaaaaggggatagacaaattgtaagagagactttgatgtaagtttggatctcctaggaacatcagaagctacatccatgactccctgagcatgatcagatcaagaacagtactaagagacatgttaacgtggatctgggaagcttacaaagactaacaggcaaggaaggaatcctgagagtaggggaaacagtcttcctaggagaagagcatactacctggttatacaataccaaatcattaactctgaaaacatatccatacaattaatgttatatagactgagcaattctatttatatatttaggtgtgtgtgtgtgtgtgtgtgtgagagagagagagagagagagagagagagagaaagagagagagagagaattaaagaaaaggagatcatgaacttaagagggcaagggcagaggtaaataggtcgtaaagggcaggaaaaaagggaaaatgatgtacttatattacaatctcaaaaaaattagaaaattaattactggagggtgtaaaacaatgatagaacttgtacttagtacatatgagttcacagcacatgcatacttatacacacgaaaacctaacagaaagaaaaacaataatttacatttatacaatataaaagtggtttttaacatgagtatctcttgctgggcatcatggcacacagctggaattcctacactcaggaggcagaggcagtagatttctgtgagtttgaggccaacacagtctacatagcactaccagccacgtatgtggtgagaccttgtctcagagacaagcttttcttcttgacaattcttcgttatttgtttctttaggaatccttgtgtactcagatctcaccataccctaaacaacacatgcgttaagggaatgtgtttgggggggtcagtgtagggcagggatagtagttttgggacaggatctcattgacctggatttcactatgtatcccaggctagcctcagacttataaggatgcccccacccaggctttcaagtgctaagattattacagccatgaatcactgtgccttgctttggttatgttttaatagtaattgaaatggtcatattcccagcctgctgacatggagacagtctcacacctctgctgttcacaccaattatcctctaataactctgttcgcatcatgagtcagttatcctctgtccctctgcccagcaatactcaaattccatccaacaaggattatgtgcgtagactatctgcattccaaatgccacttaagaaacattttgggatgtcagaggccacacctactgttcagtctcacagcatattaaccccgacacaaatcctaagtaaattgtatttctccccatcttaagtttaactgcagaaatatctcctgcttgcctgccacacatgtgtcagtccctggtgctttgcacagtgaacaggaaagacagtgccttttcctctgaggtacttacagtcttacagaaaagacaagaaacaaaccatgcaaagacgaatagatgaataagatgaataagatgaataagaaagatgaataagaaagcatgtgatgtcaggaactcagagagagcaacagtggccaggaccagctagatggaggtttgagtgaacaatttaatgttagctaggcaaagacaacaactgagaggagggaaagcaggctccccaaccaggggtcaagatacacggagtatttgaaaacctagaagtacagatcacctggagcctggagagaagggcagagggcatgaactaaggctggaaatcggtgccagaggggaaggtgaccattccctaagctttggtgagtgtctctctatcgccatggagaatggaaaattactagagagtatggggtcagagcaaatgtgtgccacacagagaggagcacactgctgtgcttgaagccatcatcaggagcggtgacaaggccgactcttgaagctgtccccagaagtgctgaatccaaaccccatagcatagatcaaaaccctcagagctgtaactgtgatttctcatcatatccagggcatcgcgctgagtgcttttggagtacaattgtccttcattcttgtaacaagcctgtgctgttggtattttaggactcctgctctgaaaaatagatttaaacaggcagctcagtagatagcctagtgctacagagctgttagtgccagaccaaggcttttaggacagatgtaactgtttacactgaaaccctgtttaaatcaaatccctacaatggctctgaaaggggcaggaaacctaggacacaaggcaggttctgcctaagataggttatgggctcgctggtgatgcttctaaaagtgcccagttgccacagtaaagcaggcttcttgaagaagatgaccagggaaacttaatgagacagaagcttgaaatgcaagaaaaggagagagctcccaggcatcaggtgaatgaggtgcttctagaaagcagaaaataaaagcagaaatgcccccaatataatgctgctaagccctgccctctcagagaatcgcattttggagtttttacattatgtttaacaaattgacaagaagccagcaaaatccatatctgatgactcaaaggaaggcaggcagtattctcattggctggcaatagccaggagctaaactctgtgttttgcaaccaaagagaactgtggcttttaatggaaaatttgacctcccaaggtcttctccctaaagggaaataagatgtggtaaagaaagacaggagtggtgtggtttcaaggctcctggctgctgatccctccttggtgtggtttcaaggctcctgccttttgatccctccttggtgtggtttcaaggctcctgcctactgattcctccttgggtaatttttatgaaactgggtgtaagttaatgttcaggagatatcctgacccatgattttcctaagaagagtggaggccttttttcatatcttgactgggagtcaagattcttctccagttacagcagttgggaaatgtatacccagagtggacagccctactatgtgatagtgggcaactccaccatgtagaagtaggcagccccactgtgtggaagcagttaacaccgctgttcttgtacttgtcctcagaacggttaagtttgcctgagcccagatcacacaggactgcagtgttgcaatgtgatctcacctcgggtctctggcttagcatctgtgctgtgttttctgaggttctcagtgctctctgagactatagacaactacctaacaatctgcaggttggcttcttacctaaaaggcaatatcctgatctgtctgtcacattaaatattgtttaaatgggaatgcgtgcagaaggtgtgtgtgtatgtgtgtgtgcatgtgcgtgcgtgtgtgtgtgtgtgtgtgtgtgtgtgtgtgtgtgtgtgtgtgagagactgtggaagacaaacaaggatgctagttatctacctcaatcatcttctgccttattctctgtagagagggtctccatttcagaaagcctgcctgaccaacaagctgccaggatccacatatctctgtcacccaagccttatgggtgtctgtaagctaatacttacccaggattgcaggcgtgggcaaccatgcccagctctttacatggggttctaggtgtttgatctcagattctcaagcttggatatcaagtactcttactcactgagccatttccccaagacctcaggacccctaagccctaggatgagaattttgtacgggagaagctgactgggtgatgccaagtcctggctgctgagattcagtcagagaaagtgaccatttgccaagcttcaccttatatttgccacataatttaacctctgatcttccaaaggtagctattatcatctttatttccattttagagctaaaaaagttaaaacaaataaaagctaaaactcagagaggccaacgtcttatccaaggtcattcaaccgaagaaggacgaggagaatataaatctggacaatggagcaggggtgccagctgaccacattctccagcctcaccatcaagggagacaaacaggccatgtgcagaaaggaattggaaggacatagttttacactacagctatagctcaaaccacagtatgttcttggagtgccagcatctgctggttcagagctgggtcacagctgtaacttaaccaggacacactgggcccagtaggcagaaggcaagtaggaagcttgtctctgaaggaggatgagagacatggaggagaggagggtccagcccagcgagagcagtggtttgaagggcagcgcctccttgcctctgtccactgctgaactcagcagcctcattctcaggcaagagtccctgggaccccagcagccatactataaagtagaaaaggagccaagtgagcagagtgacacccaggctagcaggcacctgcacaccagctgctttgtaagggttcttcgtccatccctcaaagcccagcattgaggatgtgttctcagacctggggttacactgtaggccatcaaagagcatccttcacttgtttcagctggtagcactttctggaacacaagtcattgagtagcaaaacatgacaaacaagaaattaacagacaacttccttagcgcttatgggtggctatgggcaagatacttgctctgtctaggtcacaattggctaactgttattggcaggtcaggggttctctccaccctccagggacacagcaaccagtctattccctacctagtaaaggcacaggcacactgacaagcagaaccatacccatcgctgatctcttgagcttaacagtagatgagcttcaaatgatcccaagtgtgtaagaaagttcacagtgtgtaaagtaatacgcaaggacatggtggctacatgggataaaggataaggtttatctgccagaaaagactgcttctagcatgcaggcactgtgtacaaagacagtatgctaagtgaggaacaagtcatgtcttctcagcaaagctcccagcaaatcatactgggagtagaacattaagcctgatgaagccaccccagcctgtggttgtagttaggttagggataactctaagcttaattggtagagtacttgtcaagcaagtacaaagctctggttctactcctagcagcacaggaacttcatgcttgtagaggcagaaaggtcagatattcaaggtcatccttagcaacatagtgactgaggttgcacaggatacatgagaccttgtctcaaagatagaaagaaatcactaaacctctctctagtcttaactcatggtcatttccctttgtttcctgaggctgaagtcgtctcaatttattctgagactgagaagcacggatgtcttcccacaatgcacagcagttatttacataaggcatgaagtcctctgcctttccccacttacatgtcctgcacatttgaatcacatcatctcttgcctgactgaaggctgcccaaagaaactaaagccaaggatgccgcccatggggaaaatgttcacggctagtcctcccaggggcccctgaggctacagaggaagttcccagccaaggtagctccatgactgacatcttcattcctctggaggtcaatcaggcccccctcccttttttgagacattgacacattgggtctgaagaaatagccccagtggatctgaacctggttcccagcacccatgctgggcatctcacagactcttgtaaccccagggtatttggtgccttttgctgccacaagcatttgcacatatatgactttgcggctttctctctgtgtcttgctttctctgtccctttttgtccgtctctgtcggtgtgtttctctgtctctctatctctctgtctctctcatacacacatacacaaacataaaaataaatcattttttagaagatgtatctgagtagtgaaattgcttcccccctctcccaaccttctatgaaaatcccacccatgggcatgagaaaagtgaagcatccagaagcctagggaagcaatgtgcttctgcaaacttattaacacagttggagccaggaaggcagtaggacagggtttccaaaccttacgtaactgtggcctcccttctcccagtagagctgggggacctgcaaattaacgttccccgaaacatatctctgaggaaatgccaatacagggtcctcagagaatcctgggcatagagatttcctcagaattgaacagagaaattataactttggcctaaggtccaacagttaaggtgggggaaatgagctcgcatccagtgagttcccactctagagtagggtagcctgagaaactatttgctcagctgtgagaactactgtgtggcagcattgtagcttgggacacatggtatttaccttaatcctcctaccacactggcaaaaacactttttcccagtgctgcagctaagaacttcaagactcagaagactcaggggtgcgttgaatccctgtcaataacagaactgcaaaagctaattttgaacccaagctacccttacttctcttgtccagtagagattgttgcttctttccttttagtgcctgtgggcaatagacagatgtccacttgacagatgagaaaacaaaggcttggagaggtctggaagctttccatggtcatacactagagtggtagagatggatgggtataacttccatccgtcagatcttgggtttgcatgtaaatggctgtacatgatgagttcactctccactgatgaggagacactcaggatccagatagagacatggcgggctcaggtagcttgcagctatggcttaggcacttccgtgtgcagtgacacacacagtgctcaagtctgcattgctttggaagcagagcctaaggaagtagtcgtttttgctagagggctgagttagaacagaagcttgcttgacctctacgagtaggcagatgatttctctaattaggcaaagagcttccatgctcatgcacattttgaactctaatgagctgtcgatatgaaaggtttgcccttggctcagttctgaagcagatctttcccttcctcagtggaaaagaccagcgcagtaaacagaacccgtttccatggcagcgagtgctccctggctttttcttgtcaggacttaaaaaggtaatgattggatttctctttatatttttgggtataatgcagtggttgaggctgaccttctcaatcatgccaggctattttggggagcttcagttacattgccctttttatctgttctttagatcgttgttagttgtctgggaagcagggtccacctgctggccactgccactaattaaagtccagcagagcaaaggaacttgacttcagagaaggctgaagaacttgtcaatggtggtcaggatggtgcccacagatagattgaggccccacagtcacagcaaggagaaatactgtcccatctgaagcctttctgtctgatcctttgccgccccatggtggctcttgtcagaaatgcagctgacaaggaccagagacacaaataacaataacacaaatggactcaatcgccatttcctcaaagtttgctgcctgctaaatactttctacctgttgtttattcactaagcagactgagggggagttactctgactactaagatgaggggaccaaaagcatggagaggacacacaacattcccaaggtcacatgatttctaatggcagaaccatgataaatatacactcattcttatcaatctaaggctacatcctacccagaagaaatctgtctatcactataaggaagaagggcaaatattttttcagcttccaaggatggttgtatgtgctgaggggacctgaggtacaagatacatggtgcatgtgcagagttgggttcattgtcaagagcaagcatttaaggagaccagcagaggatggaaatccagctcagtggtagagcacgtgccaggatttgatctccggtatcacaggcaacatgaaacatgaaagaagccaacatattgctgggcatgtattcttgtgtaagccaaaagaaattggagtgcccagtactctatgtcaacctgtccttctaccttcctgaggctcagtttgttcatctgtagagtggggattagtgtactccctcttaaagttggggtgtcccttttaagacgtgcagaacttctgaggtggcttgtcttcaatgaaactgttttgcaaataaaaacaaacaaacacccaaatgcagtgagtagagcaactttcctggattttgatgatgctaatcagattattaactttgagtagtaatctcctgaacccagatccttctctgcagatgcctcatagcatcagcataggtctattggcttctttatgaaaggttgtgaaacgggttggaggtcctgggacttgaacagccatcagtaaatagcaatcctctctccttagctgtacctggtattgctacagtggccggccaaggaccagaggcctgccctgtcctgttcctttgtgcgaccttctctagaaacttatttttgttattttttattggtatatgtgtgtgtgactgtgtgagtgtatgtcctgtgtggcaagggcaagaagagggtggcagattccctggagctggcgtcataggtatctgtgcaatgcgcatgctggggaccaaacccaggtgccctagaagaacagcaagcaaaattccaactcaattcttcaatgaattagaaggagcaatttgcaaattcatctggaataacaaaaaaacctaggattgcaaaaagtcttctcaaggataaaagaacctctggtggaatcaccatgcctgacctaaagctttactacagagcaattgtgataaaaactgcatggtactggtatagagacagacaagtagactaatggaatagaattgaagacccagaaatgaacccacacacctatggtcacttgatcttcgacaagggagctaaaagcatccagtggaagaaagacagcattttcaacaattggtgctggcacaactggttgttatcgtgtagaagaatgcgaatcgatccatacttatctccttgtactaaggtcaaatctaagtggatcaaggagcttcacataaaaccagagacactgaaacttatagaggagaaagtggggaaaagccttgaaaatatgggcacaggggaaaaattcctgaacagaacagcaatggcttgtgctgtaagatccagaattgacaaatgggacctaatgaaactccaaagtttctgcaaggcaaaagacaccgtcaataagacaaaaagaccaccaacagattgggaaaggatctttacctatcctaaatgagataggggactaatatccaacatatataaagaactcaagaaggtggacttcagaaaatcaaaataacccccattaaaaaatggggctcagaactgaacaaagaattctcacctgaggaataccgaatggcagagaagcacctgaaaaaatgttcaacatccttaatcatcagggaaatgcaaatcaaaacaaccctgagattccacctcacaccagtcagaatggctaagatcaaaaattcaggtgacagcagatgctggcgtggatgtggagaaagaggaacactcctccattgttggtgggattgcaggcttgtacaaccactctggaaatcagtctggcggttcctcagaaaattggacatagtactaccggaggatccagcaatacctctcctgggcatatatccagaagatgccccaactggtaagaaggacacatgctccactatgttcatagcagccttatttataatagccagaagctggaaagaacccagatgcccctcaacagaggaatggatacagaaaatgtggtacatctacacaatggagtactactcagctattaaaaagaatgaatttatgaaattcctagccaaatggatggacctggagggcatcatcctgagtgaggtaacacattcacaaaggaactcacacaatatgtactcactgataannnnnnnnnnnnnnnnnnnnacatgaaactcaagaagaatgaagactgaagtgtggccactatgcccctccttagaattgggaacaaaacacccatggaaggagttacagagacaaagtttggagctgagatgaaaggatggaccatatagagactgccatatccagggatccaccccataatcagcttccaaacgctgacaccattgcatacactagcaagattttatcgaaaggacccagatgtagctgtctcttgtgagactatgccggggcctagcaaacacagaagtggatgctcacagtcagctaatggatggatcacagggctcccaatggaggagctagagaaagtacccaaggagctaaagggatctgcaaccgtataggtggaacaacattatgaactaaccagtaccccggagctcttgactctagctgcatatgtatcaaaagatggcctagtcggccatcactggaaagagaggcccattggactcgcaaactttatatgccccagtacaggggaacgccagggccaaaaagggggagtgggtgggtaggggagtgggggtgggtgggtatgggggacttttggtatagcattggaaatgtaaatgagctaaatacctaataaaaatggaaaaaaaaagaagaacagcaagcacttgtaaccactgagcgagctatctctctctctctctctctctctctctctctctcccacctgccttttatgtattctattgtattgatgtattaaaagtttcataaatgaaagggcaaatgtgtgaatgaatgaactgacatatgaatgaagctcagggctaaccttgcctgctcatcttcctctctgtcattgggttccgttagactggttggagaacttcagagccctggtacaactcagcttcagggctgattccagttctgtagtgtcatctctatgagcacctgctttccagtagaattttcaactttcgctctaaacagttccttctgctgctttacttctgcagcactggatatatcctttgcactcggatttggaacaagacgtttctaagtagtctaagtagatgttgcacctggatcagaaatgaaaatgttcagaggaaaatattaaaagaagctctttggaactttggggcagctggggacactgaatgcctcatgtgtgccaatcagaggcagtgatgggaggtgggggttactaattgtggtgtgagtctgtgttcatttagaacaggatttcgagctggtgtctgtgggtgtcataacaaaaataaaaatttatgatccaggttagaagttgttgaatggccaatatctggccggtttccttcctatacagttgttccagagcgtttggcactgcaacttcacactgccccaaggctctgggggcttctctggaatatctaataaaattgttctacacagctactgtgggattgctgcctcaggacacatccacaggtctcagtccgttctcatgatcaaagtaggaatacctctcccaaagcagcggagaaaacaaagcagcaccaagtgtctggtggggagacaacagtccataaaatgtctgccattcgagtctgaatatctaagctaagatcccagtgcccacataaaaatcccagtacagtcacatgtatgtatatatacgtacatacctggatataggcacacacacatacataccacagcatataggtgcacacacacatatgcatgttcttagaaagaaatttaatatttaactagttggttagttagtggatagtttatatgtactaaaaagaggaatgacaaccatcctatttgaatagcactatttcctatcaagattttctgtcacataacttactgaagaaagcagacccaaggatagcctgaagcctattgttaggtttgctaagaaataaatggaaacctccaacttctcaaaaaggaattgatttctatggcctaccacttattggtaaatgcannnnnnnnnnnnnnnnnnnncagctcagtggtagagcacgtgccaggatttgatctctggtatcacaggcaacatgaaacatgaaagaagccaacatattgctgggcatgtattcttgtgtaagccaaaagaaattggagtgcccagtactctatgtcaacctgtccttctaccttcctgaggctcagtttgttcatctgtagagtggggattagtgtactccctcttaaagttggggtgtcccttttaagacgtgcagaacttctgaggtggctatgcaatatgcttgtcttcaatgaaactgttttgcaaacaaaaacaaacaaacaaacaaacacccaaatgcagtgagtagagcaagtttccgggattttgatgatgctaatcagattattaactttgagtagtaatctcctgaacccagatccttctctgcggacgcctcatagcatcagcataggtctattggcttctttatgaaaggttgtgaaacaggttggaggtcctgggacttgaacggccatcagtaaatagcaatcctctctccttagctgtacctggtattgctacagtggcgggccaaggaccagaggcctgccctgtcctgttcctttgtgcgaccttctctagagacttatttttgttatttttcactggtatatgtgtgtgtgactgtgtgagtgtatgtcctgtgtggcaagggcgagaagagggtggcagattccctggagctggcgtcataggcatctgtgcaatgtgcgtgctggggaccaaacccaggtgccctagaagaacagcaagcacttgtaaccattgagctatctctctctctctctctctctctctctctctctctctctctctcccacctgccttttatgtattctattgtatttatgtattaaaagtttcataaatgaaagggcaaatgtgtgaatgaatgaactgacatatgaatgaagctcagggctaaccttgcctgctcatcttcctctctgtcattgggttctgtgagactggatggagaacttcagagccctggtacaactcagcttcagggttgattccagttctgtagtgtcatctctatgagcacctgctttccagtagaattttcaactttcactctaaacagttccttctactgctttacaacacagcaactggatatatcctttgcactcggatttggaacaagacgtttctaagtagtctaagtagatgtcgcacctggatcagaaatgaaaatgttcagagaaaaatattaaaagaagctctttggaactttggggcagctggggacactgaatgccacatgtgtgccaatcaaaggcagtgatgggaggtgggggttactaattgtggtgtgagtctgtgttcatttagaacaggatttcgagctggtatctgtgggtgtcataacaaaaataaaaatttatgatccaggttagaagttgttgaacggccaatatctggccagtttccttcctacatggttgctccagagcgtttggcactgcaacttcacacctccccaaggctctgggggcttctctggaatatctagtaaaattgttctacacagctactgggggattgctgcctcaggacacatccacaggtctcagtccgttctcatgatcaaagtaggaatacctctcccaaagcagcggagaaaacaaagcagcaccaagtgtctgctggggagacaacggtccataaaatgtctgccattcgagcctgaatatctaagctaagatcccagtacccacataaaaatcgcagtacagtcacatgtatgtatatatacgtacatacctggatacaggcacacacacatacataccacagcatataggtgcacacacacatatgcatgttcttagaaagaaatttaatatttaactagttggttagttagtggatagtttatatgtactaaaaagaggaatgacaaccatcctatttgaatagcactatttcctatcaagattttctgtcacataacttactgaagaaagcagacccaaggatagcctgaagcctattgttaggtttgctaagaaataaatggaaacctccaacttctcaaaaaggaattgatttctatggcctaccacttattgtaaatgcaatttcattagaacacatcagtgctcattcatttagaagccatctgtggctgctttcatacaacagaactcatgcatcatacaacatcatacaacatcatacaacagaattcatgcatcactaaaccataaatcacaactttatagtgctctatagaaatgtctcccgagctgccccatagatttgtagagagcaaccagggttacgtaacggaacccttcatggtaaggatgggcacactgaaaccagagaagctggagaattagctgagccttgacttttctgatctttatatactagttgtcctcctggaaagagaagataaggaaagatgtttactgtagatctaagagcaactaattggaaatagctatctggagaatggttgggaatgtctgtgtctttttttttccccaaaagacgtaggcttgttttattttaatgactgatccacatgaggccacagccaggccgctatgtacagacacgagagaagctttatttcttggtctcctcctccttggacagagttttgatgacctcttccttcttggccttgagacgttcctcctggcacttccgagcttccttggtcttagacctgcgagcctcagcctggtcagccagttgcttcttctgggccttgtctgccttcagcttgtgggtgtgctccatgagaatccgcttgtttttaaatacattccccttgaccttcaggcacaggctgtgatacatatggcggtcaatcttcttggattcccgatatctcttgagaagccagcacaggatcctcatccttctcatccaggtcactttcttgggcatccaagcattggcagtaccattcgtcttccttatgcccatatgcctgcccttccattgggtcaaggtgtttttctggcaaggagcccgggaatggacagtcacaagcttcctggtgatcagcctatctttgatcagcttcctgatctgctgatgggagttggcattggcgatttcattggtcccatcggggtccaaccagatcttctttgtcccacagcagaggacactagaggaaatgtcttcagcagcctgagcgcactcacggctgtacgcagccatggctgtagcagtgaaaggaaagagcccctcagtgcttactaagaagagcactgacttttattatgtttaggtatgggccttgaattcctcatcgttccaagacttttatcatgaacaggtgttggattttgtcaaatgctttctccgcatttaacgaggtgattatgtggtttttgtctttgagtttgtttatataatggattacgttgatggatttccatatattaaaccatccctgcatccctggaataaaacctacttggtcaggatagatgattgttttaatgtgttcttggattcggttagcgagaattttattgagtatttttgcatcgatattcataagggaaattggactgaagttctctttgttggatctttctgtggtttaggtatcagagtaattgtggcgtcatagaatgagttgggtagagtaccttctacttctattttgtggaatagtttgtgaagaactggaattagatcttctttgaaggtctgatagaactctgcactaaacccatctggtcctgggctttttttggttgggagactattaatgactgcttctatttctttaggggatatgggactgtttagattgttaacttgatcctggcttaactttggtacctggtatctgtctagaaatttgtccattttgtccaggttttccagttttgttgagtatagccttttgtagaaggatctgatggtgttttggatttcttcaggatctgttgatatgtctcccttttcatttctgattttgttaattaggatgctgcccctgtgccctctagtgagtctggctaagggtttatctatcttgttgattttctcaaagaaccagctcctcgattggttgattctttgaatagttcttcttgtttccacttgtttgatttcgcccctgagtttgattatttcctcctgtctactcctcttggatgaatttgcttcctttttttctagagcttttaggtgtgttgtcaagctgctagtgtgtgctctctctagtttctttttggaggcactcagagctatgagtttccctcttagaaatgctttcatagtgtcccataagtttgggtatgttgtggcttcattttcattaaactctaaaaagtctttaatttctttctttatttcttccttgaccaaggtatcattgagaagagtgttgttcagtttccatgtgaatgttggctttccattatttatgttgttattgaagggcatcatcctgagtgaggtaacccaatcacaaaagaactcacatgatatgttctcactgataagtggatattagcccagaaacttagaatacccaaaatataagatacaatttgcaaaacacatgaaactcaagaagaacgaagaccaaagtgtgaacactttgccccgtcttagaattgggaacaaaacacccatggaaagagttacagaaacaaagtttggaactgagacaaaaggatggaccactagagactgccatatccagggatccaccccataatcagcttccaaacgctgacaccattgcatacactagcaagattatgctgaaaggacccagatgtagctgtctctagtgagactatgccggggcctagcaaacacagaagtggatgctcacagtcagctatcgggtggatcacaggacccccaatggaggagctagagaaagtacccaaggagctaaagagagctgcaaccctatagttggaacaacaatatgaactaaccagtacccaggagctcttgtctctagctgcatatgtatcaaaagatggcctagtcggccatcactggaaagagaggtccattggtcatgcaaactttatatgccccagtacaggggaacgccagggccaaaaagtgggagtgggtgggtaggggagtgggggggagggtatgggggacttttgggatagcattggaaatgtaaatgaggaaaatacctaataaaaatatttaaaaagaaaaaaaaaagaagaagaagaagagcactgactaatcctccacggaccgggacaggagaaccacgccctccatggaccgggacaggagaaccacgccctccatggaccgggacaggagaaccacgcatctgtgccgtgccaggggtctccgagagctataaagctagttcttccctgagtgttcattgtgtgagaacttggtcatcggtcccaaaaggtgttaatcagaccctcattaggaacatttctttagaacaattcaagtaactaacagatcctgtgcaatgtactcaaatgtccagcttcacatgctctacctggaaaatatttatctggaatttcactcagactgcatgcattggttatgagatttgtttttaaattgaaattagttcatagatcaagatgggggcacagagttgtataagatgaaaagtcacaagttttttttggcattgatgccctaaactaatagtctccatgtttgtatgattgtgttttatacagctggacaatccagatgagcaggcagcccagatcagacgagagctggatggacgtctccaaatggcagatcaaatagccagggtaagggacttcatgggctcttccctgggaccaggccaccgcccacccacgaagtgcactgactattagggctttcagaagataaattagaggggctggcaacatagctcagttggtatgcagtcctcagaactgagtaagcaagccagaaaaagtagcacacacctgtagcgctaacagtcctgaggcagaggcaggaagaccaggagttcagagtcattcttggctacatagtaactttgaggccagccttggcttcatgaaactgtgtagaaagaaaaagaaaggagaaaaaagagaagtgaaggaaagtgaagggaggggaggggaagggggaaataagggaaggagaaaggaaggggaggggagggtccgaatcccttggttcttgcaatggccactagtgattatatggctcactgtgacaaaaacccagttgccattctaaacctcagatgtgaccagctgagcaagagcctcagaatccctcagcacagcccacatagctccaggacaatacaaccacttttcaatgacagtcaaggctccgaggcagtggagtgtatcctcttcatgtatcatcatacatgacaatttgccaccacagctacaggactccaccacagaatgtctcctgctgatgacacagacctggactaagctttgtacccactgctttctcagcctgagatctttcttctcccttccactcagccaatttctccctcattcttcagcatttgacctcaaacatgtacatgagcccttagcagatagcctccctcctcacctccgttctgcagcattccacatgcagacccttgcttagctgaccaagtctcctggtgactaggcctcttctaagtttgggatcataccttattgctgatgcctatagcttggtatcatctattttatttctgttgttgacatttatgttttgataattagtcttcatgacagtagcatttatcgggtcctgactctgccagatgttctgtttgtatgctccctctgaatcaataattaagcatatcactaagaacattgtatttatcatctttgttttggagagtgaggtatgtagctgacgcaagataagcactaatgcaggagctgtgctggacgatcagctgaggtctcacgttagtaagtccttatagctaagacaaaatacccacagaaagttcttagaggaggaagaacctggtttcccacatgatgtcagaggtgtcagtccttggaacagtgctttgagtttgaggtgaggcagtaagggcatgtgccacctcctgccatccaggaagcagaagcagacaagaagggctcaggggcgtgtacccttcaaaactgtgtctttgtttcttttttctgttgctatgataaatcaacccagcaaagcaacttaagaaaagaaggggtttattttgccttggactttcagagagatgcagcccatcatggcagggaagatgggaccgtgggcaggaaaaacacggtcagaagcaggaagctgggcattcacattgtattcacactctgagtgcagagagcaaacaggaagtaaagcaaggctgtagtctcacttcccctggcatctcactttttcaatcaaggctccacttccagaaggttctactgccttcccagacagcagcacagattgaggctcccacaggagacatttaaagttcagactacagcccccagtgacctacttcctatgaacaggccctacctctcacaatccacccagcaataacttaatcagcaaattagtccattaatgaatcaaaacccttatgatccaatcaccccctcaaaagccaacagccaagccttgaatatttctaagtttttacacagacactttaatatccaaaccataataggccatgaaataacaggctggcaataggtgaggcagttaccctagcaaagaatttaagggttcccccaagaaacttctatttaaaatgaataatatttaatggaatactttaaaagcataattgattttaaagagccattaaggacaacgtgttgaccatttctacagctacttttctcttctggctgtggggacaggtgacaggctgtcagaaatggcagggtgggggtgagcaggagagagccttgtgctgaagcccctaccacaggaagaagtagcccagtttgaatgtataaaaaggagtcttgctagatgaaaagtcaagggaagatttcaggatggaaaacactctgttagtgcttagtattgcagaaatgtttgcgtcttgtttttttagacacctttaaggcgtatagtcaagtcagtctggtggctataaatagtgagcagctacagatttggctaaaggtagtgtgggagactcttgtgttttgaaatctgtttaaagtgagagtaaatatcactaaggtttgagaatttacctctttggtaaactcagtgtctcctttcggtggatttcctggaaaacaagggcagcttggagcacttatttgcctatcgggtaactattacctccccatgaatatgcttacacgtcttgcttatgttttattttctttgaagcttagtattataattcaagaaactaatgttaggctgatttttaacttttcaagactgtagataacattgctatatagtaaatcaataacacttatctctgaaaaaaaatcaaaagacccctccctgagcccccatcttaaacattttcatacaaagtaaagtgagctgagctttcctagaaaatgaaccaggccattcagataactttatttactaggactagagtcagttgaggctccatgcagggtctccaaacagctaaaggtaccaaggactccaagtgacctcttcacatttctattatctgttctcctcaaagctgtctgtggtcttatggagtattcttctactccagtggcaccctcatgataactcgctggcattggccctgaccttcattgctcttccgttgagcttcatccccaggtccaagctcactggtccctagagggagtccttcattcaaagggaaccaaatgtgacccctaaccttccctggtcatgatgaacaggctaacaggtgataactaatgcaaaccaaaccgatgatgctctttcctaggcacaatgaactgcaggataatgatgataatgttggtaggaaaatgtctacagaataaagctgcaagaacaaatgtgtgggaagagacaaactccattgcagcgctgaggaatagtctcaatgcttgcatttgtgagatcaggaacttctgaggtttaattgtgtgactgcttttccctaaacttaattggagctaccaaacataggataaaacatgaagatgttgcctatcttccagctcttgacaaacttaaatgatgcacctctgtttatctttctttggtgttccctggttatctattaccaacatcacattgagttttagtgaggatgtgtaattcaattcatatcctgaaggtcagctcctatatgtgttataaccagaaattgctgaatatgcccattcatgatgtccagtccactctgttctcccccatgatggattaacaagatggattaagcacctctaactgcaggttagaggcaccaaccagagcaagcttatatgaaaaccaggatgatcataagggacaagaagcatagggatgatgggtgaataagagccagacctctggcaagagctagaagcagaggtcatagaggaccaggactaccctgctgctgtctctgcatcacattggttaaccattcttattctataaggcagcactccttgcttttcatatatgatgtctagctatttgatagcttctgaaatatacaaaaagggaaccagtcagccatcacctacttcttgacatccctttccttccccttacttccttgtcctcctactttcctcaaatttgcagttctaagaatccagcctatggttaacccaagtttcttcgtagctaactctggtacagttaaccaactaagcatgctgcctttagcatggatagaatactgactgaagtacctagtatctcacaaacagggcctgctggtgcatgctgcaatcccagcattctggaggtgaagacaggaaaatcagaggttcaaaattatcctcagctatatatccagttcaaggacagcttgagctaaagaaccttcctcagataaaagtacgggcctcactggacacaggggtgctggtcatatacccctcgggcgcggaggtactttaccagtattacttcaggatcattttgaagcaggttgttccagatatacctaatactattaactgcctttcacgtagtatttcctaagtgccaggctctcctatagctgtttcacatgacaatcccctcaaccctctcagagccttatggacagaattgtgctttatcagaacagagcccaaagcagagatattggaagatttgatcaagtttactttgattaaaaactatattcttgactaatttgccttctagatttactgagttactttccaaatatggaccttcatttcactcaacccccaagtcagctcttctcacttagaccagttacaagcaatctttggcattacagtaattctcccaaaatagttatatcagaaggtttaattgctatgcctgggttcactcaacaagaaagcagaaagaagagtcctgtcttcaaagtaggaaatgactccaagacaggatgggaggactggtctctcctgccctctctccctgtccgctgttactccagcaaacagctacccaacgtccattagcatttctgcatccccttcagttatatagatgcaaaagtgaagtagcggtgatttgcagagctgtctccttggattcagaatgcttgccgagggacatctggacttcagggaagggactgtacagcccatgctgtttctgttgtaaacatgttcaccatcagatgaatcagcacgtgtgtgccctctctccttcagacagaaggaagacaagagtaagtcagcttcccaccacacccagagccctaaactgaaccatcaattcagtgtgacacgtaagtggcacatagaatgctgtaatgtgatctagcttgatcagcttcactgcagccactggctatctttcttaccagtaattctggtggtgatggtggcagtataacagttggtatatgtgtggagacatatacacagacagaaagacaaaaatgaacagagatggatgagactgaatcagtggtcaataagtttccatgtttcttagtgtcttttactcttcatgggaaccctgtggggtttattttattttctatattgcaaatatgaaaccccaactagctataaaacatcacaaagccagcaagcatcagcccaggacaccgagctgcttcaccctatgctagataaggttccttgatatcttctgcgttgcctgtggatgtctataatttcatggtatctgatgggtggcttttgtgtcatgtgtgcacatgatcattacctccagctggctccctcacttcccactggtaaccacagcacttgaagcagggaggaacccgggaaggattgggggaatcggatgaagcagctacaagactgttggtgagctcccctacctattgcctttctgtcaccttcctcctaatcccacatgagaatgtcatttgaatctcaggctattctctttgagtgagcatagccttgtcagatttcacacacaacccattccttcttcctagataaatattcaaaacttgtatggaaaagccaatagctaggaagtcttatagtgcttataggtattattattttttgaaagtattacaatattccgttaatgtagctggacatgattagtcctggtgactgtccccactgagcaatattgtccagcaaaaacaacagtgagtggtcagcaaagatttgtctggaggctccatcccaccccacaccgtgcctgtcttttttcataaagcaatatgaataaaaagtaatttttgtcatttttatctctggaaagaagacaatggagatggaaagctacagttctcttattgggcacagccgcggctttgaaatgtgcttgtaatgagtctgccactgaaacttcctctcaagaatcacagcctagactgacaaaatgctttcttccaaaggctccgtgctcagaggagaaaatgaatggctttgttttccttcacaggcttcagttttatcgagttctttttatgatgccatttgaaactgtccaacttctgggacgagtcatcattctttgggttttcccagtgttctgctgcagaatttggtgggaaataactctgcgacagaacgttgaagtctgcgaccattcactgggtcttcttcaaacacgacaagacagaggaattaaaggcatcaagtggatctgggagatggcacagtagcatttgctatataaatatgaggtcataaaggccaaaacccacatagagccaaatgtggtagagcatgcctatgatctcaaccttctcataaaaaagtggaaggcacaggcaaaaactcatgggccagttagcctggcatacacaacaacaagtaacaaagagaccccatttcaaaagacagaaagcaaggaccagcacccaaagttgccttcaaacctctacatgtgtgcctgcactcacatgagcatgcacacacacacacactcacacacatacacacacagagagagaaagaaagagtcattatgaatacaagcatatacatcatatacacacacatacacacatgtgtacatagacattatgtatgcaagcatatgcatcttatgcacacacacagagacatcatgcaggtaagcatatacaccacacacacacacacacacacacacacacacacccttaagtgagtcacaagtaagtgacagtagataccagacttgatgcactctctcaaagctgattaggaaaaggcaaactatttcataaatgctattctttttctccccatggaaaagacaacaactattagtaaaattgcaagatcctatttactaacttccctttcaaataccccatctatactaatatttgagctttaaaataaagataaaggacctgtccagttctcccaccaaccatgggtggcaagagccaaggaagggaggacgactctccctcgtctgtgccacctcacagcagacaagagtccgggtcggctctcctgaggctcatacccacagggccagctcacccacaatccccatgaccaggaccagctctgatgtactgcccagacaaggtgcagggtctactctcccaaatgctatagcagatgagggccagcgctcatgctttcatgactcaagggctatctctcccaaatcaactgaaacacatgggagagtgggccgtgcagctcacctaggcagcagaatagagctagccctggttataggagttgagggtaagtcagacctgagagcaggacagcataaaaactggctctgccccttgatggtggcattggatgggccagccagggctagacaggataattcatcccaataccgtgggggcaggagagctggcaactgtccagcacagataccttccaggaccagatccagggatttcaattggcccactaccccactgatgaaatgctagagtgcataagaggctggttctacagatccaaagctacaggatacccatgatacagggcaacagcaggatatccaaggggagtcccagtgaggatccagtattaatcgagtagcagaaacaagggaccttgttccagaccaacaagttattgcaatgaacattggcaagcagggaagtgaggacaaaaggtaaactgtgggatacactaacacactgcagcttccatgatgaaatatgttttcctttgttagagaggaaggttgcaagggtggagggcaggtacaaggtgtgagggaaataagtgggattggggtgcttaatgtgaacttcacaacttttaaaaaataaagataaagatgaaaagacaaattaccacactttaaactcttggggtataaactttgtcatttggtagtctttctgtgatataggtactgttgagaccatgtcttcctctgtcttctcttcactctccagatggactctgtgtagaaaaagtgggcagcactatgtggactatgtttagtgatctgaatcctcttggactcatggttatctacatcttccattgaaggggaaaaaagcaatagctctgttctcagctaactgaacctcaaggcaaactcttcttaattgatcagacctctagccaaatatacgtcctctgtgaagccccaccggttctctcaggaagcatccatatcccttggttgtctattcaaatgtttactttgatgattctgtatacatcttcccccacccccaccccaaataacagtgaagccttggagaaatgattgcattctcctaccagaatctttctaatgacagccgcagtattcattggtttgtgtgttttctaagttaggacagccaagcactcaagttcccttaccttcagggttctacaccaactttgtcccagttttacggattccccagtgacccttaaggagtttaagaatcaggaatttcaagcatgaggggaaggtttagagatattaggcgttgggaagcctctctcattgactcaccactaacttctgtcaatactgtgagtatattatttccagcctgctgcttacacatccgcctacagtgtatgtagaaaaccccacacagtgtgagtaccacctttaagcaggaagtggttgaattcagagcttctaaaaggaaccagaacactgaggatgctgcataagttcagacccctgtactcatttcccatgggacagcagacttaagtcatggtcatcctgcctctcctcgctgctgagtggtagctactttaatatttaatatcgattttttgataagtcattgacacagctactcagttcatatatgctgaatgcttactaagtgttacacattatgtggatgttaagattttttagtgggatgtcaaaactgtgtgaccctgattcatagcccagaaggaaagacagacactaagcaaatacaactcataaatgatttgttgattttaagtatgctatcttagtctattcaggctgcttaaaaaaaaaaaaccagaatttgtttcctatagttccatactactgggagatcaaggttaaggcagcggcaaagcctcaactccttctttgatctctagacagtcatcgttccacaaggtccatgcatggaaggaagagcaaatacattagctgtggccttgctggaaggcaatcatcttgttcataagggctgtatccttgaggtctcattataaatgccatcatactgaagggttagggtttatacagggtttgaaaggaaaacaaacagctggccatttcaataacagatacccataaagtagaaagtagtggtaacccgacaaggagacgtgttgaagttgaatgtggaagaagacaaaaggctgagagtgaccaaggagcaagagaaaagggggactagcccttaggaaacaccactggctaaggccagagcctggcccagcccacgggcatcactcagcaagctctaagagaaagatctgcacctattgcagtgaagttgctgactcataagaacaaaacactcttagctaactagcagtcagggaaattactaaaaggaagaggagactcccaagtgtattagtttcttttttttcttctcttctcttctcttctcttctcttctcttctcttctcttctcttttcttctctctctctctctctctctctctctctctctctctctctctctctctctttctgtgattaaaataatcttgacaagcagcttaagggagaaagagcttagttaggcttacagtcccagacagaatccatcatgtcaggaaggcatggcagcaggcaggatcaggaagtaagttgatgacatcacatctacattcaggacacagagagacaacagcaaatgaaacctcaaaatccattcccagtgccctagttcctcaagcaaggttccacttcgtaatggttccatatccttctcaaacagaaggatgccaactagggaatcaagtgttcaaacacatgtccctatggaggacattttatatttaaatcacaattccaaggaattgacattcaagaggcgatgttagaccatgtgtgaattagaaagttgatagaagccaagcttcatttccacgattctgaacaagttctcctgcttttctcctgctttctccttcctgtatactttcctctagtcccttctctttagccctccttctctattgcttgtcctttctttcactcctctttgcttagtcattactggattgattcaatatggcagcaaacgctcagggaaatgttcattttgtttcagcttcattgataactaactacccattgcattcttgatgcttctcaattcggttgcttaaaatagtgaatatgcttgattagcggtcacttaatagaactggttagttgactttagttgagcatccatgtaatcaacctcttactccttggcctgaagaattatcaaaccaattcacgtctcatgtgctctagatcaaggtccatcccagctatatggcaattcattaatctctcatagagacaaagtatttatttttcccatagataattaatatgatatcatgatgtgtagatcctcagcgatgttatagggacattgagtggaaccacactaagtttggagcaattttcttgtttctaggcccaaatatttgaccagaagcaagttaaagaagttaaagaaggaagggattcttttgattcatacttcgaaagtgcagtctattggcagtgaaggatcagcagaaggtggtgggaagtgtctggtggcattgtgtccagttaggaagcagagagcaatgaaggttaatagtcactttcttcggtttagtcagtccctgatacccatggaataggtggctctttaattacactaatgcagaaacacccccacagatgtgcccagagtttatttcgatgctgatagacactattctcgttctgttagcaatcaaaaacacaaatcatacagagaatcttaaaagcaaggttttggggaaacacttatttggggttatagcatttgaactctagtttcaaccttgcttgaagctgagtttatcctgggatattcccaagctaatcagttcctccagttgtttaaaccagtttaaactgaatttgtctataacttataaaataaaaagaaagccaaaaagatttggcttgcctctcaccctatcaattacaaggctgtagagtagggtttcatgggagatttcatcttccagcttggaagtggctctttgataagatcatcaatccaattcaaggcactcaggaaacttagaggtctgagtggacaaccatgtagcacgattagagtgttgcctccccaacagaagctgtagctgagaggtagaatgacagtggccaattcttacgcaccgtgactactttcctgaacacttgcaatcatgtttttctttactttgttaatgttttcaatttttcttgaggatagttaagtatttgtcttagaaatagccacaggctgtggttgaaacatctcaaatgagctacttttgaattatgaatgggagaaaattctgtacagatatccagaaatggggtgtgcttctgttcacataacttacaaacaactcagctgcatttgataaagaaggaaaaaaatgttgaaactgggattagatttgaaaacaaacaaaaaaaaatcacccatttttctttccacaaatctagtttcctggacagaaccagggcaaagagtaaaataatcaaactcttcttccttactagatgtctatgtctgtctccctacctgtggagagattatgagtaactagaaaagctggctccacatccagatggaatgtcttccgaacacacttccttaatgccagggtaaatttgttagtggttgatatggtcaaatctgtctctggtgtgcaaaccttctatgtgagtcaggtctctactctgattatactttgccctttctcttacaaggaacgcaaatttcctaagttcgtatccaaagaaatggaaaacatgtacattgaggagctgaagtcctccgtcaacctgctcatggccaacttggagagcatgccggtgtccaagggtggagagttcaagctacagaaactgaaacgcagtcacaatgcttccatcattgacatgggtgaggagagtgagaaccagctttctaagtcagatgtcctgctgtccttctccttggaggtaagtcccaaatctctgaaagtgtactggtatggtaagatagccaaggagacccatgtgcttagcccagcaaatcttgctttcacccttcggtcctggaatagtttttaaattaacagcttgctaggatgggtcacccaatcagcagtaccatcgcccactcctgaagcccacctctctcctaaggaagtgaggtctgaagagacaactaacaaatgtaattttgaattattttccctgtcttaaggcagtctcaaggattctggaaaggcttttggcaatttagaaagcttacattttagaaacctacattatcatttgagatgtgagatctagagcagttagaaagagttgtttgtttttgttttttgtttttccccattgtctttcctggtggctatatggtagagtcgttgtgaagcattctgttctgttttttgttttgttgatctcagcccccagagtaagacttggcccaggccaactcaacagagtgctctgggagagtcaatgcattcctttatatctctaaccatgttggctccaaatgtatttccttttgaatgatgttgattcaccaacatcagactttactgggaaactagttctgacagctaagaactacttggtcccatctaacccaagtctataggtaaatggagcataaagtgacacagcttctttagaaattaagttagcattttttttctcaaaaggctcaatatacaactgtgatgatatctagctatgctatgctcagataccaacccaagagagctgaagtcacatatccacacaaatgtatttagagaacagtaacagccttaattctacacaatggatgaatggataaaaggaaaatgcaacatgtgtgcatagcagaatattataaaaagaacacttattgatgcacatgttgatatgaatgaacctcatcaatataatacttattgcaagaagctggcttcttgcacaagtgatatgatagtatgaccccactcatatcaaacactaatctacagaaggttaatctataggattagagagcttagtatcaatgtgatataaggttgaaagtagaaataggcataagatgtattgctggggagtgtggcctaagggaatttcagatgattgtgttacagcttggtaagcttattaaaaagtcacagagctatacactgtgggagaattgtatggctcctaaaattgtgcctcaagaaaagctgtgtggatgcaggacagactgggatgtactttaacaaactattcaaactatgtgggggtatttgtgaagaagtcagctcagagatgttggaaaattccaccaggcacccctcccctcctggaaaagacaggtcagagagcacatagaccagaatgaaaaggctaattaagcccctactacctcattccctaaagaccaatccgtttaaagagtgcactgttccaccaatcatattgtgcctgttgctgatgctctattctgccctagaaactgtataaaaactctccaaatgggccgcccaggaacacacacacacacacacatttaactgatacatacatgtttataaaggaccctgcaatattttgatacatttttataatgttcaaatcaagcaatgtgactttattcccacaaacatttattattgctttatgagagccctaaatcccataggaattgtctgatgatctcagatttagaaagaccaggagacatgatgatagctttgtaaatttaattagtgtgtggaaaggataacttaccttctggcctgtcattaaggatgctgtgggtaagtcatttttcccccaatcggcccaccttcacatcacagtgtcagaagaggtgggtctcgattgcaatgcccttgagtccccacatactttcctttgggtgagaaaaatcaccagtgtaacctcacagaagctttgtctttttacattttttttgaagaactgccaccgaggtactgagtgctgttcttttggtgcctttggatttgattactgccagttaaaggtggcaatttatttcctagccactcttgtcttccaacatatgggagggtagaaagtattccatttactgtcatgaagcttttaactatgtaactttctaattcatgattagacctcaatattaaatagctggttacttggaagataggtgtaggtgaggcctcagccatgctctctgcatgcaggattcaaatggctttggcttataaatacaagcacagattgcaatacccttgagtccccacatactttttaattggaaaactaaatgcacactgtagtaaaaccgccagccaaagccttcacacctctattcatggatgtgtttgggaagcagagcacagtgagtggacacaggagcaggtggggatggactgtcctagcatcagggcgggctaccattcagatttgtacactgctgcgtaatatttttcaaataagcagagaattgaatggcttaaagagactgagcacaagctcagtttgtgacaagacaagggaaaaaaaaacaaacaacaacaaaaaaacaaaaaacaaaacaaacaaacaaacaaacaggcccatggtgctgtgaatgagggcaagggagtgaagccaccaaaagcaacaggtatgctcagaaggcagctgtgtgaacccttcttcacaagggccttggaggtgttttcaggtgtgcaaacaaagcccaacacttgcaaatgccacagttaatgaaggctcagaatccgatttaaggccaggtctttcagattctaaattgttctccttccaaggcatattcccctttctcctatgcatgtgtttcttctccagtatgaaaacttttggttatggacattgcctttctagccccaccggtacatatcatgtccccacttcacagataaattcactaagatggggccaaggaaagtgcttgccacacaagtgtggggtccccagtttacacctgtcgaatccagcctgaagctgctgtgagcatttgtacccatcactcctgcagagatgtggaaagcaggcaggactgtacacagcaacgagtaaaggacccaatctcgaacaaggtggaagacaaggcctaacacctgaggctgtcctctgacttccacatgtgcatctgcacatgcgtaccacacactctcaagaaagaaagaaaataataaaaagaagcctctgcatatttgaaaaaaaaacaaaacaaaagaaacaaaaatggaagggacttaagtgtgagataattttccaaaaccccagctaaggggttctctcatagtatggcccctgcaccagcagcagcatcacctgacaccatctgagaggaggagtcctgggttcaagccaacccactgagcagaagatgctcaagaaggggaatcttgtggcctctgctttacaagtgattcctatacactctgattgagaatccatagactattgcatagcaaaatgaaggcttatgcaccccaaatgtgcgtccttgaatcaaaaccattagaagcatgtgtcttttccaatatccacttctcttcctttgtaatgctattactcttttgtagagaaaatgattttccacaaatgctactcagtgtaggtcactaacagatgtcattttattctgaaggttaaagttggtctcatcttttctcttcttcttgcttctgtggcagagtacccccctgcattgctaactgtcagaatagaaagtgattgaatggggataaggaattctagaagttggaagtgacttcaggctagcctggagacatggtgctcaagagctgtttcagtttggcacacaaagatcataactgtgaaagtgatgtacataaagttggcacattttatttctttctattcagaatgtcagcatttctaaatcaaatttctgatcataatttagactgagacgtctctcttcaagcaggaaaaagcagagtatcaggtcattgaactggggacagagaagtgttaggttccctgtagatggagcctgtgctttccagattgccttagttcctgctgtttcctgccttatctgcagccctaaagctgcatgatgctagctctgtatcttaggacttcactattgcttatcttactatccagagaaaagctaatgcatatgctgacccaaaagctagaattcttaaagaaactgggcgaaagcctttgcttcctatttggttaacatgaaaagagtagcccaggtcactttaccactctgatcctgtgagcaaattctgctaagcctggtgggataattgctgacccagacctataatcctagctacatagtagtagttgaaggcctgggctatacagctaatgtaaaataagcttagacaactaagtgagacactgatgtgagagagagagagagagagagagagagagagagaaagggaacaaaataggagaaggagaaaatggggagagggaggaagtaggaagagacagagacatggaaagaagagagagataaaaaggaaaggggacatgaaagaaaggagggagacactgggcgtggtggtacacacctttaatcccagcacttgggagacagaggcaggtggatttctgagtttgaggccagcctggtctacagagttatttccaggacaacgagggctatacagagaaaccctgtctcaaaaaaccaaaaagaaaaaaatgcatattttaaaaaagagaaaggagggtagaaggaggaagttgggaaggaaagaagggagggggcaggagggggaaggaggatgaagtgtgtatctcaggtgagatgtttacttagcagcaaggctccacataattcacaactctgcagagtgagggaatgagccacattgttccctctcaacagcaatctgctacattgtaagcaactatgtccctagaaggtcttgagtcattgacaaaagtctgacagaagaagaagaagaagaagaagaagaagaagaagaagaagaagaagaagaagaagaagaagaagaagaagaagaagaagaagaagaagaagggctagagagtaagagggagagagaggaagagaggagaggggaaacgccatccttgcctgctgtctgctttcactgcagaagagaaatgtgggaactaaaatgggggctgggaaagaggggggagggaggatagcccacgtcccgccagagttccacctatgctctggacaggtgggagggctgccagacgctttccactcagccctggtgggcatccaagcctctgacccactcgaccgggggtggggagtggtggggtggtgggtggacaaggtgcagcccccgaaaccaaaaggggccctggagttacactctgtagccccggggttatgggagagactgcatagggaagagaggttcccacacaggcaagagtttgcacagctgaacagagatagtctatgnnnnnnnnnnnnnnnnnnnncatagaggagacaagatgaaagggagagagagagagagagggagagagaagaaggaggaggaggaggaggaggaggaggaggaagaagaagaagaagaagaagaagaagaagaagaagaagaagaagaagaagaagaagaagaagaagaagaagaagaagaagaagaagaagaagaagaagaagaaaggctagagagtaagagggagagagtggaagagaggagaggggaaaagagaagtgaggagtgagagagtgaggaggggccaaaagcccgttttatggtacgtggctactgttgctaggtaactggggaggagtttagcctgaaagtcagaagcttgggacattgtctatgtgactgctagccatgcttttcttgtgggggctgagggagtggtaactagacaggagccagagttccaggagacatgtgagaactccttccgtcccatgtaggtaaattatcaccaccaggttccggggatcagcatctcagctcgactggagaccagcctgtctatgcatagcccaatgcccacagagaaatagtttctgatcctgtccctggtttcgggattcagtccatcttatgtgattctgtttcaggtggtgatcatggaagtccaaggccttaagtccttggctccaaatcgaattgtatactgcacaatggaggtggagggtggagagaaacttcagacagatcaagcagaggcttctaaaccaacgtaagtagatggtttatatcacagaggttgtcaacattgcttttgtttgtgctaattccaaaagaaaggtctgttttcccagaagaacccaggagaaccaaccataccaatgttatcatacaaggtgacttgactccattttttaaaaaacagaattccatgtagcccaggctggcctcaaacttgctatgtagccaaggatgaccttgagtttatgatcctcctccataccttcacttcgcaagtgcaggtatctcagcaatatgccaatacacctggtttatggagtacagggagtcaaactcagaacttcatacatatgagataggcagtctaccaacttggttacgtctgcagtctcaacagcagttttatttgacagctatgacaagaatccaagttctttcaaagctataatgggaagttgaggcaacagtcccatttctgaagcctttagccacatgtcactgtggggtgtgtgtgtgtgtgtgcgcgtgcacgcacgcgcgtgagagcatccatgcaagatcttgtactgctgcaaccttgcagcactcccagtttagtgaggacatcagggaagtagtcacaagtgtgtattcataaatacagtctgcctgtattttctatgtctttagattcaaccaactgtgggttaaaactttttgacaaaacaaaaaaggaatattggccaggtgttgcctttaattcctcaacttgcaggcagatctctgccagttcaaagtcagcctggtctacagagcaagcatagcaagttgtaggaaaggcagcttacatagagaaagcgagtctcaacaaaacaaaaaacaaaagcaaacaaacaaaaagaatattgtgtggacacagattgtatatagagttgtcattagtctctaaacatgacagtgcaactctttctagagtaggtacctttgatctacacatggttctgagtctataaaggatgtccataggttatttttaggtactctgtgatttgatataaggactggaacatcagtaggtatccatgaagggtggaggaggtcagaaccaatatcccatgggtacttggagacaaatacagctataaatagagggaacggtgacttgagatgagagaccagggggacatacaccagcttctgcatggccttccttggcatacaggagacatatgctctaatattatgaagcacccatgggagtgaagagcttgtgaatggtgctgtggttagcaatggcaccgtggcaaaaaagaacacaaagatgtgttggaaggcatcttctggcttccttagaagggcccaaggtggggcagtccattgctggggcagtccattgctggggcagtccattgctggggcagtccattgctggggcagtccattgctggggcagtccattgctggggcagtccattgctggggcagtccattgctggggcagtccattgctggggcagtccattgctgggacagtccattgctggagcaatggctgacagcagtgaagaattatctattttggagactaggcttcccaagcctcacagagcagtgagagatctgctccctttccccagcaccactgcccccatcctttctttctcagtttccgtgatgcctgcatagtagaatgagcatcttcatcttcgtggctggcattagtccataagagtcatcagaaggtaaccctccccaactccttcttagagcattaggagccgtttggcagaacataaataactcaccatggtgttcaaataaaatagctcaaaggaagcattgaatgttgctcaggctgaagaagggctgagggtattgtgtaccttcaagtggttctttgtatgaataggcaaagcctcagatgcccgtaagagtgtgtgtgtgtgtgtgtgtgtgtgtgtgtgtatagctggatgttaatgagcatacaagagggaatggaggccaatgtgacttgctgcatgctatcccacgctccacatccccaacctccaaaccccctccccactcccactcttcttttaaatccttgttccacaatgatgatactacagttcctttttactgccactgataaaagtttcctcgagtggcctgatctttgtcaataccattgtgctgctttgtttacaggagcttttttcaacgttgtgtgttacatggcaggggttgggggaactgagtgactagggacattgcaatgcttctgccaaaccttttaaaggagtgactccttatggggctacaagagagggagggaagaaagctctgctttttctcatctgctgttacaaggtaactcatgtcactttactaggtgcgagaatatgaatgacaaatatatttttatgaccttgggaatatcaagtataaaatgtttattttagtgttagggtacgcctgaaataacctatctgctcacatctgtagaggttatggtatccacgcacataaactcctcatatcaaaatgctttgcttttgtggccaaggatgctcttttgagtctcctttcatcagagaatatgacgaaaccatcacagacagaatcctgaattgtttaatatacacagaacacaggcatcataatcaagctcaagtctaacaaactgctaggagttacctagtgtggtgtgttgaggattccaagataaatctgtatccagaaggaagaaggtgtcatgaacagcttgtaatgtctgccatgagaaaggaaggggtgtgatgctctgagctagccacacctgcagtgctgtagacataagcagagtctaagatctcccaacacacaagtttcctcctgtctctttctttattcctgtgatccacctccttttcatcctcccctttcctcctacatgcacagagctcctctttctctttccctcatcacagttcaggactgacaggtttgctctgcttctgtctgcttttacctggaaaaataaacgaccttgtctgtgcagctctgctgtctcccttcctctttcatttggacttactgggagtcttcatcatttccttccttggaagctttttatttcctcttctcctcttccctttcatttctccttgcaattttcccactgctgatctctgtgttatttctggcatttgattttggtaatcctaagtggtatctcccattagctagtaaccctacttagggttactagctaacttacttagctgattcctgctggagcctttccatcttgttttgttacatacagctgttgcccatgtcacatttacacattcccaaacaaaaatcctaatcaagcttgtcttgttactatagagtctacctttccagctactaaacattcccagtgcatcttgcccatcatgtgtctgcaaggaatttgtcttttgtattatttttagccaagtatagttacacattcaggaggatatgacataactcatttttcccaacaatgtatcctctgtacagtttacacaggaagagcagagacagggactgtaatagcatagttaagtatgtctgggaaactgaagacgttacatcgttggtgaaccactcactatacacacacagtttagagttctaaaaagcccagcagcaagtaaatctgtgtgatttttttttaagttaaattatgcgtccaacttacttgaactgatacctttgaacagtcattggaaaccctgctctgcatcactcagccatagtaaccaagaatctgccctctctcctacttctttttatcaactgtatctcctcctgtgcacccagagcacctttcacagctcagcaaggccatattggatcagtttcataatctaagtatcccgtgtccatgacttaagtgtatttcatgacatatggttaagaatgtggcgaggtgaccttttccattcagagctgacttgtggcccctgctcactcttcctttcatccaactgcttgctgcacagggataattttccagcatcccatgcatccactcagctctgctttcctcctctcctagggtttgcaggttgtgagtcagcaatatatgctcaaaaactgctgtgagctatacttactagaaatggtatcttccatttacaggttgtttctgcttccagcaggaaaacacggatgagaaagcagaaggaactgaaatcctgtatacgcagaatcctcttaggacagcataggagaaggcagagtctttgtggtttcaggggcctaggtgtaattgttcatctcctttgggatagagctgttagggccatcatttgtcaggtgttcttagctctggagtaacaagagatctttaggtattaccaaagcatggtgttgactgacatcaaagcaaatgggagcaactactccttctccacttctcgcctgcccattcctgtggccagaacaaggaggtaattttaattaggtgctagaaggcctttggcagctcctcaagcctgaggctcagagccctctacagcagacaagagcagttggcactgactctgctcagtgttcctacaattactcttcctcatggccgctgatgctcgttgtcactttgccagcaggggaaatcactttccctttttagagaaatatgttaatatttcagggctgaattaatttaaagaaaatgcactgggtgcataaaaacacagatggcacctagacaggataaaaggtgatcctgctgacaggaacgaatgtggagctacagaaatagagggtgggaagctggcttcaaacccctctaacctagggggggacatgacatttccctgagtagataaaattgtccaaaatcactctttctgtgggaattttgcacagtgtaagtttctgctctaaaatagcatgaatgacttgagaaggttaaatactggagcatttaaataacgttttcacagaacatttgagtaatagcctagtgtctctcttgcttacctgaaaccacactcctctgaataaaacccaagattccacttgccaagttcatttcaccagagcaagccaaggagtgcagattccattgttgctctaagatcagactcttttctgctatttccaagagactgggaaggtaatgtgccttggctgagaaagcttgccatggcgctagtctcttttcaatggcaccttgtcctctgagacagtattttaaaacaagagaaagagcagtggctttctataccatttttcttctgtgaacaatattctgtgttccaaaagcacaacacaaagagtcaggctctcatgaccaggttatgcaaagatggggagttctactgagtcaggcccatagtcagcctacaacaaacacagggagttctgctgctgagtcacacccacaatgagcctgctacaaagatgggagttctgctgagtcacaccacttactttctcctattgtttgcctcaggagtcatttctccacatagtacttctcttcattttgaccaaatattttgtgactggagtcttggaatgacttgagtatctttcctgcttggctcaactgaagcagagagtgtggagtgtggttatctgcccttcctccatggaccatttccttcttttcagctagcactggcatcacgatggtgaagcacataggcccagctttgggactttgtgcagaggtcctgcacgagggcatcagtggtgaatacgagagcagtgtataagacgatagcagagtttaatctgtgcccctgaggggacaaaccagctaccgcagtacagtggtgagagctcaggtcacttaggtcccagatgacgccctttaaattgcagtatgcttgaatgacagaatgtttactatccaaagaatgaggaaggaaaaagtcagagtcacaggaaaagcattccaggaagaggaaagagcgagtgcaaaggaaatagtgagcaggaaaacgatgtcaccagatattagccagtaagcatcctaaggaaagcccaaaaccacagcatggccagacatggtgtggccatctgagccatgagagaagggtttattccaaggagacataagttttctctggagaaagcttagggagattttaggccacagagcagatgattggattgctatcttaaaacccagaacttattaaaaaaaaatcagagtaaacttagaatctcatctatgttggtttgcaaatacccagtaagcacatactgctgggggcattggtgttaaaatgagaaatcctgatgctgccagtgttgttaggatcagagcttgtatcctagtagtactgcaagctgggctcagccacctgtcctcagcagagcaatcaaatagtgaaaagcagaaaaagaaatattcagtgtggtcacatggggaagagggccaaagaaatgcagtgacccctatgtccagttttgcattcctgacctgatggtcagagttatgtgtaactaaatctttctggtcgttttctgtgttccagtctctgcaagatagtccagcatgtcagaattgtgtgaactgtctccctgaatgttaaaaaaaaaaaaaaaaaaaaaaagtaaactccaattacatgatgtcttactcagggtttctactcctggacaaaacatcatgaccaagaagcaagttggggaggaaagggtttattcagcttacacttccatactgctgttcatcaccaaaggaagttaggactggaactcaagcaggtcagaaagcaggagctgatgcagaggccatggagggatgttacttactggcttgcctcccctggcttgctcagcctgctctcttatagaacccaagactaccagcccagagatggtcccacccacaaggagcctttcccccttgatcactaattgaggaaatgccttacagctggatctcatggaggcatttcctcaactgaagctcctttctctgtgataactccagctgtgtcaagttgacacaaaactagccagtacacatgaatactttaatcatgagcagatggagaactaaggacatgctttgtaaagtattgttatttaataatcagaacagcatagaaaggtatgttgtggagtcacttactgtaatattgagattcaggccagatactctaacccagtggttcccaaccttccaaatgctgcaaccttttcgtacactccctcatgttgtggtgatcccaaaccataaaattatttttcttgctacttcatagctgtaattttgatacagctataaattgtaatgtgaatacggtacttttcactatcatgttgccttgccttcctaacaagccagggaaggaagacttttaaatagaattgggcatttgggaagactataaaaggatcatttcctttccataaattcagctgttgtgtggggtaaaatattgctggtatttaaaaagcaataatcctaccaggcgaggtggtgcacacctttaatcccagcactcaggaggcagaggcaggtggatttctgagttcgaggccaacctggtctacaaagtgagtttcaggacagccagggctatacagagaaaccctgtctcgaaaatcaaaaaaaaaaaaaaaaaaaaaaaagcaatgatcccgctgtcactcacactgcacaggtatccaggtcaatgtatccagcaggtataactcagcacatgagcaccagtaccattccagtctccaaagatgggccagagaactgaaagttactcagaaagccctgggaaagctctaaatacgatgaggcccaccttcatggaaccaattacagtcacaaatgctctaccatggctttaaaattcctgtcaggtacaaagttagtaggtggcatatgatcaacagggaaacctatctctaagtcctaccttcaccattcatcagctgggtaaccttaagcaagtagacgttcctctcttctccaatttctccatactaaataggagtgcaacctgcctgtgggactgttgaaaactgtcaggctgtggaaggtggaagcatcagcactttgcagcctctcagagagtagtgctgataacagccaaaattccactccggtcgcactttgctccattggcagagtacatgctgcagcaatctgagttcattccccaacatccatgtaaaaagtgggcacacatcactaaatgtgatctcagagtgagaagatagttaaaggcagatccccagagctctagcctaattggcaagggtcaggtcccattgagaaagcctgtctcgataaagcaatgtggaggctctcaaccacacctgaaattggtttctgaactccacactcatacaaacccatacacacacacacacacacacacacacacacacacacacacacacacccatacacacacacatgaacacacacgaacacacattcctgagcacatgtgtacacacacaagaatctagtactttctcattaaataggaagaaaccttagaaccttaagctcagaaccttactcaatttgccagccaccctttggaaatcaaagagcttattctgcaaaaggaaaaatgaacacagggtttttggagcagtggaggggactcttaaggtgggttgatctcatggtacaagagttgcttctcaaaggcaagaggaatccacagtgaaacatctcattgtttcttatagtcataccccctccctgagtcttactcagagtcctacaaccccatgagtaggactactgtctactgtctactcggctatcttccttctgatcagagacagtgtttgagagaggttggaatgaagcagagctagttgagtctatacatcctaagctgctgctttgatttgtttcccctgtgctgtgatctagaactcacctcactgcactattgctgacagagtggggcctctgaggaaaacataacatgatgtctgatgccaatggtctaaaatgctttgagactcttgggcctttttgtgcttcaannnnnnnnnnnnnnnnnnnnaacaagccagggaaggaagacttttaaatagaattgggcatttgggaagactataaaaggatcacttcctttccataaattcagctgttgtgtggggtaaaatattgctggtatttaaaaagcaataatcctgccaggcgtggtggtgcacacctttaatcccagcacgaaaccctgtatcgaaaaaaaaaaaaaaaaagcaatgatcccgctgtcactcacacagcacaggtgtccaggtcagtatatccagcaggtataactcagcacatgagcaccagtaccattccagtctccaaagaatggccggagaactgaaagttactcagaaagccctgggaaagctctaaatacgatgaggcccaccttcatggaaccaattacagtcacaaatgctctaccatggctttaaaattcctgtcaggtacaaagttagtaggtggcatatgatcaacagggaaacctatctctaagtcctaccttcaccattcatcagctgggtagccttaagcaagtagacgttcctctcttttctccaatttctccatactaaataggagtgcaatctgcctgtgggactgttgaaaaatgtcaggctgtggaaggtggaagcatcagcactttgcagcctctcagagagtagtgctgataacagccaaaattccactacggtcacacttagctccattggcagagtacatgctgcagcaatctgagttcatcccccaacatccatgtaaaaagtgggcacacatcactaaatgtgatctcagagtgagaagatagttaaaggcagatccccagagctctagcctaattggcaagggtcaggtcccattgagaaagcctgtctcaataaagcaatgtggaggctctcaaccacacctgaacttggtttctgacctccacactcatgcaaacccatacacatacacacacacacacacacacacacacacacacatacacacacacatacacacacacatgaacacacacgaacacacattcctgagcacatgtgtacacacacaagaatctagtactttctcattaaataggaagaaaccttagaaccttaagctcagaaccttactcaattcgccagccaccctttggaaatcaaagagcttattctgcaaaaggaaaaatgaacacagggtttttggagcagtggaggggactcttaaggtgggttgatctcatggtacaagagttgcttctcaaaggcaagaggaatccacagtgaaacatctcattgtttcttatagtcataccccctccctgagtcttactcagagtcctacaaccccatgagtaggactactgtctactgtctactcggctatcttccttctgatcagagacagtgtttgagagaggttggaatgaagcagagctagttgagtctatacatcctaagctgctgctttgatttgtttcccctgtgctgtgatctagaactcacctcactgcactattgctgacagagtggggcctctgaggaaaacataacatgatgtctgatgccaatggtctaaatgctttgagactcttgggccttttgtgcttcaacccttaagtctttcagcatctcttggttccctagggaggcctgaaaggctctcattccatttccttacatacagctcagagcacttggccctggtagtctgttctaaaggacagcatgttaggcacatattaggagataaaccttcagctctggcttgagagcaatgtttggagagagacacccacttgtttcagatcccacctttgctgctaacactgttgaatggtgagttgttggatccctctggactcagttccttcccttacaaaacaagactaatggcactaacactagctgtttagggcttgaatgtaatgtgatctcccagtcttttatcttggtgtgaactcccagtctgatctcctggtgtgatctcccagtctggtaccttgatgtgacctccagtctgatatctcggtgtgaactcccaggttgatctcctggtgtgatctcccagtcttttatcttagtgtgaactcccagtctgatctcctggtgtgatctcccagtctggtaccttgatgtgacctccagtctgatatctcggtgtgaactcccaggttgatctcctggtgtgatctcccagtcttttatcttagtgtgaactcccaggttgatctcctggtgtgatctcccagtcttttatcttagtgtgaactcccagtctgatctcctggtgtgatctcccagtctggtaccttgatctgacctccagtctgatatctcagtgtgaactcccaggttgatctcctggtgtaatctcttaatctgatctcccagtctgatcttccagcctgacctttcagccccaccctgccagggccaccaccttgccttcctctctattgtgcctactcacacatcctgtttctaagtagagaacatcactacattatattctgttagtcaaacttagcacaatgtgggcccctggaaactgtctttctttcctactttcctgtttaacaatatcccaatgcaaaacaatctcagccatcctgatctctaaaagtggaagcctctggaagatctggcacacacacctgtggtcatctctgatcaggatggactcatgctatgagcctactctatgctgactccaccagagaaggtgaatcaagaatgaatcagactgtgagagaggagtacacactgacttcattggtctcccctttgtccattcagatggtccttcattcaaggatccactgcatctgagtgtctgctctcatacaatataccattgcctaagagtgacacagacaatgaaggaacgaaggcaaagttcctgccattaggatacatacaaccaatcttgtggtgcgtataatagagacagtaacctgagtagagacataccagggtgtgactttgacctccttatgcagtcaaatcaagtacatgactgtggcttctgccttacctttggaagatgattttttcaaggtcatctctgatgtaggacatgctctgtggccatgtaattataaagaaaagcattacaacaaatggcagaaaaaaatgtataaaaggaagatatatcattctgattaatgttaatataaattttcatgttcagatacagatgagcagtcaaatgcatattggaatcaaaatatccttttatttcatgtgttctatgtctatatatagatatagatatatatatggttttatatatatagatatatatatatggttatatatatatatataaccaaaaggttaatacttgtaatgacttatgaaacaatttctgtgataccaaactaataagtaagtaaaagaatacactaatttagtttctttagggagaatatcctattcatgttcagcaaaaacatcttaatcaaatttaaatatcaccagatggaagagcagagattagatgttatcacagctctactcttggtacacctgtttgacaggcttgtgttcttctatctcattcacaggagaaggctcacccccatccattcctgtgcagaaagaagaaaaacttaactatttcccactgacacaatgatcagaaatttccaaaactggacaaaactgtgtcacttctccatcaagcccaagtcaaagtaaacatgctttttttttctgtctcccatggagacaccatggaaaatattcactttgccatactaacaaatgttttatttctataccatgatagtaaaagtttgcatttcagagcatgaggaaatggctcatctgatcaagttcttgttgcaaaaccacgagacctagtttatttcccagtattcactcaaaaaacgcaagcactgtagaggatgcgtgtgctcctgaggcctgggagaaaaggatccctgaggctcactggacagccattctagccaatcagcaagttccaagttcaataagacgtcatctataactaaacaaattaatagactggaatggagatagattaggaaaacctaggctttatgtctggcttccatatgtacatgtacactagcacacacatgtgcacacatctgtagaaggaagaaaaaaaagcaacaacaaaactcttacactttgactattctaatgattaaagtgaaatacttaaattactgataactccattttattcttatatccttagaaatttgaggacactaattctcatctttagccatacatctgttttaaacccttggacatttagccaaaatttggtgtgtattggggtgcaggtaaaggctattatttcacagagattggccaaggtggagagaagctatctgaatgtaagcagatggaatgttttccaaagatgtgactgttgaagtcagagtaacacaagaagaggacagtcataagcagagaatggtggaaagagaaaaaaaatcacacaatcagaaaacaggcactaaaaggagtttaaggggcagaagagaagccagcttgccaaaaggcagtgaaggaacactgggaaatgtaaatgggaaatgggaagcagtaagaatggctcgaaccagactcagagtcagggctcacagcaagaagttcaggctttagtacaaaatattcatcctggaactcacctacttacaatttcattccagcatatgagaggggtagtagccatagtgacagaggaatgaagggaacattgggacacagggacaactctgacctcagtttgccactcttgcaagcatagcatcaaacactggacagtcagcactgaatagcacctggctcttcaagtaagcatttatagccacggttgtcaccaatcttcttcacacaccctttgcctacttgtaagttgcaatgctgtcctcttggtagatgaccttgagtgagctaaagtcagttcagagccttgtgagaggtcgtggggatacagcgggttctccagcagagtcttttttcctatcccttcaaagagcactgctcagtaccaccaaatgtggtctttctccatattagcagagatgccattcccagcatgctacatgctgacattatgcactcctgacaccaaattcaaagaaagcagacacgttctctccccctgtctggctttccttcccattggctttaaggcagattgtgctgtgcctgaagtactccctgctgctgatacaggcattaatgaaagaagattctgagaaacaacctgcagcgaatacagccccacccaaagaaggagacactctctgcatgtaatgtcacagctgctgcgtatgacatttaattacacgcaaacaaactgagctggacccacagttctagcagctgcaaccgtgaagcgtctgaagcaggaaaaatgtgcattttatacaaacacttgaaataatgtgtatttgctgagtaacccgtgtaagcagtctgtgtgcttttcacattaccctatttttaaaaaatataatttgatgttatgttttttgaccaaaatattaatattttggttgtacagagtagggaaaatataaagagaattaagcatcactcatcatctccatacccagagagcatcactgtaatgatttgatgacgttttccagtttgcttggctgtgtctatggctgtggcatgtacttatacatgtgcacaaactcatacacttacacaaatgtgacatgtacctatacatgtacagacacatacacacacacacacacacacacacacaaagtaagtaaataaataaataagtagaataaaaattaaactagggtcttggtttttcttagtcattggcacagtctatggctgtgtccatgttttatccacctgcagatgcagccaacttatagataatgatgtaatggaaccctttaacatggatgtaaagtcagtgacgatagtgactttgcataaactcgtaaagatagtattactacttcattactagttgtttcttacatgttgagaactaaggcttttaactaaccctggcttaccctgaacttctctaggctgagttctgagagttccacatcttagaacaagctggggacatttggtcacttgattaaaatggacacatccagccaacctccattatttttacctcctgaaggggaaggcagtgagtgtctgacaagcatttgctgaaattggttttggggagacccctgtcccttcagcgtctacccatcaggaatccatccttgtgtctggcaacctcagaggattcactgcagctttcaagtttgagtctgaattaagatgcagttcagctgtttgtgtacaaacagcaagcaaatcgctgtgctcaaatgaaggtcatcgcctggcctcactgaacaatctcaattcgctccatttgtctggttactgaagagaactgcctgattagaattattgtattaacagcagagtgaagcttcatggagctaagcacagggagtgcatatttgaacacggagggaaagcaattaatgccttggttatatttgtgcaggacctcaggtagaaacaggaggaaaagctggctgtagattaaagcctatgagcagcaatgcacaggagatgaacaggacattctagataatctccaggttactctcaattagtattcacagtctaaatcctttataaaatagggcagtcagggccagaagacagctcagcagataaagacactcagcgccaagcctgatgacctgcgttcaagccccaggacccacatggagtgaactgagtcccaggacttagttgttcctttacctacacacacacaatgtgacatgtgtgactcatgcacttacacaaatgtgacatgttcctatacatgtacacacacgcacacacaaagtaagtaaataaataaataagtacaataaaaattaaaatagggtcttgtttttttcttagtcattgaccaggaaaccaaatttagatcacacctgttgtgtcaggtaaagtaggtttgccaaacaagtcttagtactgagactaattcaattgagtttaagaaagatcacctaccaacttcatcacccaccacctcaatgcttctcacattcacatgcatttgtaggtagagaaaaatatgtgttatgtgcataaatatatgtattgagtatatatatgtatatgtataatttttaccttttgctttttattatgttttcttttaatatactaagaagaccatctggcctataaaataaatattttgacacttaagaaatagcttttggaccctctaaatagaaaggtgctgatgaagtacgggatgactggtggggtggcagccacacatgcactcccaggatggggaggaggagacaggggatcccaaggaagctggataggcacactatccaatggataggctgactggctgagtccatgggagctttgggctcagtatgtaagacggcaagcacgtgaggaaggtggcaacctctggcctttgtgcacagtgcacatctatgtgtatgtacaactacacccctcacacatgtgcacgcatacacatacactcaggaacatacatgcaaacactcaaaaacatgcaacaacacaggaggtagttagtcagacttgactctaaacctattacggtccttcatcccagctgcactgtacttcagtgagaaggaatatgtcactagtctgtaagaaaaaaaatcattcaataggagcatgtatggcttcagaacaataacccgagtgagaggatactgaagatgggtgggggaggtttccctgagactggcttgtcagggacaggccccatgagttgtgactacaagttgtcaaggtccaatgccgaggagaaagcatggtcaagcaagagaagggagcaaactctcatgcatgttcacaaagggtgactgtatcgcttctgagagcaagtaggaaatgaaagaaggtacaagccatgtcacacaagcctatgtaccagggacggggctggaacttggttttcttcccagtgatattaagaatatctcatggagaccaactgctgtatgctttgcagaccatggttgggggagaagcggagcactgagcagtttttcagtattctaattcagagttcggtgatagtctccagtgtgcttttagaaaacaaacgcatagggtatgttctgagacatgagactgcacagacgagaccacacatataagcttcaaacacatcgccaagcaagagcagccagatgcaacaccacctgctgggtgcttttacaaactctcaggagcatgcaagtaagtccatggagacagagtagtgtgcttgcttgaaatgacaagtagggtttgtcttcagacagttgcaagagacatttgagggtgagggtgaggtcatgttccaatactggagcagaaaaaaatctgcacagtactgtaaacataccaaaaagcatggctttatagacctaggattgaaggatttatggtattaactataccccagtaaaaggctatttaaaaattcttgaagggagagtcctacatggattgtggtcctaaaagaggagacaaagggcaggagagctcactagaatcatctgagcaagccatggatcatggtccagaggggaaggactgcagagagcagatgtggctcagagagtgacacaaagggcctggcaactgagtgtgagctgtgtgcgtgcagtggaaaagagtgagccatcaaacaagagggaaaccaggattagcatcctggggcagcggttgagccagaagcttgttgtacagccagcgcccaagttatagtcatgtgtctccacggctgacaaaccaaggacagcagcaagaatcgtgctaataatcacacattagatttccatgctaaaacaaaaaggagagagagaaggggagagggagagagagagttgaacatttaagcttaagccttatgcatttttttgtagctggatgacaattgtgatggcccacaggtgccatcacatttaatctgcatgcgtaatatctgtgctatgaccctgagacaggggctgcagctacagagatacgttagacctaaactcctgtgcattcattcgtatctgggaggaatgcacactctgcagtgtttgagatcttcagtgattgagatcgaattacccactatgctcacagaccgatgtctcctgacctgagagattgtctaacaagtccgtgggtcaggcaaacactcagtaaatcctgtatcaacttacacatgctgtctgtcctgagagctttgctctattcgttggtttctatgtttacagcaacaatagagttaatgttttacagccccaactttgaaacgtcagtttggtaaacagactataaagtgggtctcatttgctttctaacaaataaagcagagcagcttgcccatggggatttaaatcataatttacatttaagtttatttttatagacagaccataagcacagtttgcaaagctggataaagctaaagcactagaaaattgaaaggagagatgagagatttatttttccccttaacagtatgctcagttgtaatttgaaacttaactgtttaaattatacagaataattggattaggtagaagtttgctaaatttgtcagaattgaaatatgacaggtaatattgaaaccaggatgttcatacacatatgcacacacataaccacacacacacacacacacacacacacacacacacacacacacactgcacagaaaggaaaatggaaatgattcagaggaattaagaacccaatattacgtaagaattaatcctcagatatacatattaatgatgagatttcatagaaaaatctattccaaatacaatgttgagcaggattaggagagatcggcttggaagaatcctcccttttcaaatgcaacagatctttaacatcaccacagacaaatgtcctggctacatttgccccaaaacatctgttattttggatcatcatcccttcatctctaaggaccactgcttcgggttgttaagtactttatagttttctttacctttttttggtggtgatggtgaaggaggtggtggtgtgtgttcttattcgtgtgtgtgtgtgtgtgtgtgtgtgtgtgtgtgtgtgtgttgtagtgttctaggattgaattatatatctagagcctaagttttatcttggtcccttttttgtaacatttcattttaaggcaagatccagcccattcttaagtttgtaaccctcctacctcagcctccttgaagctggaattatcagcctggtccagcttgttgtcactcataagttagatattacaggtctagccaatggcaaatgaagtaaccataaagtaatttcagtagaaacaatgttagcaaacactgaagctgttcccttctcagaactccaaaaaaaccaaccctctttgtaaacaggcaaacaaaaactctcttttaggagctcatcacacacactgagactctctgaagaatttcaatacagaagagagcctctctgggacctgtgctgcccaaagtcccttaatccatcccataatcagcttccaaacgctgacaccattgcatacactagcaagattttactgaaaggacccagatagagctgtctcttgtgagactatgccggggcctagcaaacatagaagtggatgctcacagtcagctattggatggagcacagggcccccagtggaggagctagagaaagtacccaaggagctaaagggatctgcaatcctataggtggaacaacaatatgaactaacaaataccccaccccacccccacccccatcagagctcgtgtctccatcagtggaaagagaggcccattagtcgtgcaaaccttatatgcctcagtacaggggaacgacagggccaagaagtgggagtgggtgggggagcgtgtgggggacttttggaatagcattggaaatgtaaatgaaataaatacccaatttaaaaaaaagaaaaagaaaagaaaaagagtatactctgacaagcacagtactttactccaaatgtctatgtttacattcattctctcggatgattgttttgtagagtattccatgactttcttcttggtaggtcttcataggacagctcatacagtgatgtggatgagcaagacacaggcactaaccatgggatatggaactcatgacaaaagataggaaacttcttccacagtaggctttgccttcagttatgtgaatggaatcacagatgcaagggtgccttcctgataggaagaccaaagccaagagttttatttgcatggacatgagcattttattacagccttgggaacatcaaatgatcattatcaaagtacttaacaagccatagagtttggggcggggaggggcagagggttctggttttggtgttgtttgacacaaggttttgtacagcccagaccggccctgaacgttccgtatagcccaggatgaccttattgaccctgagtcacctccccagtactgaaattccaagaatgcaccaccatatcccatttgtacagtatgaaaatcaaaggacttacttactgaaccagtcctgagacacaatttaaaaaaaaaaaagtagtagcttgatcaatttcagagaagtatctctgatgtatatatagcatgacttcataagaaagtgaactcagatgacaaggaaagctcttaggatacatgaatattcatgggggagggggcactgtgaattctccctaaatctaaaacagttgccatttcattccaaggaaaactggagagttctctgtgtgggggaaggacatatacagcaggattgtatccagtgaacacagtgcttgcaaatcgtcctgcactgagctaggaagtccttacaactgtatagtgggcgggaagggcattaccacagaatcatctacctcctgcctctgaagtccaggtctatgcaggaaacattagttccaaagagctgctaagaggaggaagagaagaaaaaagtcatctctataaatatatactgcatctaggagggaaaaacagaaccttggaaatgaaactcagagaagaaacttcatcaaatgtgtttagaggagaacacatgctacctagggacagaaagccccttcatggaaggattatgacctgggcccattggcttcctgtttctgtaggactatgacccagctcttgtggtcacctttttctagagtgagaaccagactggcttgtcctatgtcaggtcttgtccctggattagacatgtacagtcaggatggcaaactcacatctcacactctgatgatgggaggccagcccacaccagtgcatctgaacataggagcagggtacagagaaggagttgccctggttcacaggctgcataacctctacacacagcagtcaccaacaggaagtggcattggttttcttttttgctataatcaacagcatgaagaagaaaatgttgagtcatggttcaagggcacaacgcattactgtggaaaggtcatggcagccagagcctcaggtggccagtcacatccagtgaggaggcacggagagatggacattgcttctcagctccctccacattcctctccctccctcctatccagtgtggcactccagcctataggaaggtgccaccacacagaggggagtagcccctgcctcagttaacctaatctagaaaatccaaagattctccatagactttttcagagatttgtttccactatgactctgaatcccactgagttgacagtaaaggtggactacaaagttactacaatccacatgtccttgggagtgggtgaggggatcaggactatggagttaggaccatggctaacctgccttggagaacagaaaagaaataagagcagattgaaagaagacacgcttgtacattagaatccaaagatctcaacaaagcaggaagcaagggcatctgaaaaaaggagagcagccgagtctccacagcccactcttcccgaggctgaagatgcttgggatgggttttaaagaaatcttaccagacctgtcttaaatagtcccatggaaatctatgctagcaagacaagagtcattactacccccatcctaagacagatggatgctctgatgtttattttccaacatctggagctgggatgagtgtgcaagtacagagagggaggtctgggagcaaggcaggcttcagagatgcagggccagacatgctatcctagcagcttggccgagacctgcagctcctaattgtgtccggagctctgtgggtgaggttcaaaaggtgaccagggtttctcagcctctctaggactcacaattttgggagcagttaattcttgatagcaaggaggttagcatcaccttcatagtttaataagttccaaaatgctcttgaagataagaaaggaaagacaaaacacaaatgaatccagaacataggctaagtggatgccaataaaatgtacaccccagtggtgacaacccgaatgtgtcaacagacccactaaatgtccccagagagagcaaaggacaaagtcatcctccctggaaagtcatacttagccaataatttgtgttctctgctatttcaaggcactgtatgtttctgatgaaacaggagctcagaaaatggctgtataagaagttagagtgtgtattccttgtcaccagatctggatgcctgaggggtgactcagaaaaccatcactttagtactgatgcccttttactcctcaaaaatagcagtaacggcaatattttaaggggagaattatgatatgcacgtgtgagtgtgtgtgtgtgtgtgtgtgtgtgtgtgtgtgtgtgtgtgtgnnnnnnnnnnnnnnnnnnnnnnnnnnnnnnnnnnnnnnnnnnnnnnnnnnnnnnnnnnnnnnnnnnnnnnnnnnnnnnnnnnnnnnnnnnnnnnnnnnnnnnnnnnnnnnnnnnnnnnnnnnnnnnnnnnnnnnnnnacatacagtcatgcaaacacctgtacacatgaaacaaaaaataaaatctcaaaaaaaaaaaccaattgaaaaaagatggcaagtgaggtacaaccaagagcaaggggcctagtgaggcacgaccaatcaagctcggatgaccctcagcttctattatcttaggggaccaaatgaatacaaaatcattctggtgtaggctgattcctgtggacatccaggagtagactctgattaaagtgcttcaatccaaaaagtagggtatgggcctcagctctcattcaccgtgagggagttatcagccacctgtaaggaaaaagcaagttccttctcggtgccttgtgcatccccatctaactgcccaggtgctggagaataaggcctggcgtggccttagtgtctgtctctgtgggttcaaagacatgggcctgggacagagccatgtcatgtagatgcatcctcagaaacaacttcacaacgaacccatgtgtggggctttccttcagagaaggacatgtgctttctatattctgttctgctctaaataaacagatcaagactcacatgaaatttaggtacaattcccctgtatcagtcaattaactcactggattcaaatagtagctaagaatacagaagtcttgctgtgtccttacagatttctaaagggctgaattttttcttagccaaaatgccactgcagtaaatggaaatacacttggcagtgtggaattcaagcgcaccacagctgaattgtagactgtctgcaagtggaccaagggcagaactggaaaagcatttacagaccaggactgccatctagtgacgaaatcctgtcacaactcactggtttccatttcttgctttgttttttgtttttgtttggtttttctgcatttcacaaactttttatatgtcttacactctcttacagagatgaaatcattcacaagtcacagcacttatgcatccttcgttatggtttaagtagtgaaaaatcatataagaaggagccagaatccattaaaataataataataataataataataataataataataataataataaccagtacgcagtgactggtcctttagaagatattttaatgcattttaaaattcaagcaatacccattatctatttttaaaatcctagctaaagcaagagctgctgtcagcatcgtgctgtggaaaataattcgacctgcctatgaatatgggcttgattttctcttagcaggacttaggggagctgaggggaaatgggagtctggtaccctagtaatagtgctcagatcatttagctgtctgtaacattcccggtcctgagcattccacattaaaagaaatacaaccaatacttgtggttgaaagtgcagggtgttcgaaaagtcagtcattttacgctgtctgcctttcatgtcccaagtcttctgagatacgaggagggcctactgggcaaagccacactccctggagatatggaccatgtgacaggcaaaggcagcaccagggacctaattataggcaagtgagaaataaccgcatcacacagataactgccaaagtgagatgaataaggtctggaattttccagaaagatgcagtgggtggggaagttggacttacatgaaagtggaaaactattaccaatgaggagcagaatttggcatccagagatgataaatacaccatttaggccaaaaagggagagtttggggaagcacctccatgctttgagattagtgttttggaaggactccgtggcatctacaaccctgcttcctgtgatcagttgtttgccccaacaacctcttgatactcctctctccaccctccgtccttccacttagataacaggaataggcagctcccagaatgcaccactgagagttcacttctgggaggcatctcagatttccctacctctgtggatctgcctagagctttcattcatccatactgcactaaaagaatctgccattccatggatagagattaagtgaccagaataaagccactgggcatgttcattcatctagtccatagttggtgctttaccgactcagtggcagatcagaggagggacagacttactcggcgttacagaaataggaatgaggataggactggagcttccttgttctcagccaagtatgccctacagtccattgcatgcctcctgaaagagacaaagggaggcgagtttcactcctggtctggactttctgcagtggatgagggattccagccaagcccacagctgagagatcaatccaaaagcagatggcggcagccagctctaactggagctccagagatgtgtgtttcaaagcaaggtgcatttgctaaatgcaaggccaacccccaataagtaggtggagctacattaacacagacttgtacttcaaccccactgaagcctttgcctaacttctttgaaccttgtttttcagttctatgatatggaagtagtattaatttctgctccataagtttgtcaggacagttaaacaatatagtgaagtatttaaaatggttcccactatgccgatcactgaataagtacggtaatattataatcattgtcttagctgttgtttacgtgaatggccttgaccaagttatttagactccaaatctcaatgtctccatgacaggagtaaacactccaccttccaacactggtttaataagatctcactagtaagcactaacacatgctcctccatggatgttctctagcagccgagaaatgatggaaacctttcatccctgattgacatcttgtcctgccaaaaggagggtctggatttgtctggctaaggggttttctttccagtggggttaaataaagcataatgataggaacatatctcagttccctagagagttaaaagaggccactagccccaataaataataaatgctctttttacatagaaaacaagtgcagcgttctgactgggtagcataggttttctgccactgaacacaccaaagaaacaaagccaagagaatactccgtatccaccaactcaaaccaggaggtacatccttcagcggtctcttactacagtaatgtgctcatgggctctttctgcaaagcccttcaaagagagagaaccagagagaaggacaggaaacacagatattgacttggaatagtgtcaactatgaataaggaaacaaaaacatcaataaggtgcacgttgaaatgcttttatggctcttataaattgcagttagacctagggaatgctagaaccaaaaaccacataggaacaacggccctcgctaattctgctgtgttcatctgcgttcttttgttgtttaaaataagcgtctggtttcaagtgattcagaaagaggtggaacctgcaaggccctcagccctgaaggcagcacagcagagcacatcacgaggcagcactaaacaatcatgctagctccggtctccttccctcttcttaaaaagacattaataaggcagccagggtgacagaagcctgcggcagagctgcacgtctgaggtctcctggcctacgcagggagacctatctcaaacaaacaaataaaaagctaccactaatgccacaataggagcccacctcatgatttcatcaaatcccaaccatctgccaaaccccacctccaagtatgtttaaggtctgtttgggaattacagctccagcacatgaatcttggggacgtgcattcaaaccatgacaggccctctctttggcggtagacagaggagtggcaggtatcagggaaagcactggctgggaaagcatcacaggaaagatacattacttctttctctttacatgaattccatgaaagactcggctccactgtgaaattttatacctttatacagtgtgcttccacagcactcagcctttcatttctttgtcctcctccccaggcccctccagtaggctgcttctcttttatacgtgtttttccctttttagattctgtaaatgagagaaaacatgtgctatttttctgagtctggtttatttttcttaacattgtgatcttcaattgcatacatcttccagcaaataacataatttcagtgtgtgtgtgtgtgtgtgtgcgtgtgtgtgtgtgtgtgtgtgtgtgtgtgtgtgtaagccactatgatagtcatcatttgggatctaggtcatttcacttatgatgctttatcccatccattttcctgactgatgtgattttgtccatcttgatgactgggtcaaatgtcattgtgtctgtgtatttcatttctttgttcgctcatgtctgggtacacagacaggatccatgccctggctgttgccatgatgagcatgggtgtgtaggtagcagtgtggcgcactgactttgatttgcttttatagatacaggaacagtcctgctggatctggctcactctggatctggttagaggtttaaggatcctccctgctgatttccatattggcctcctattctgtctttccatcaacaggagacaggtctagcgctggacattccgaagtgctgataggactcagattcatccagaagtatcttcctctctcgccagcttatcaactgacacattctgaaacattcacgctatttgtgacttgaaaagatgtaggcttttctttaataagttgcttctgataaatgctctactgggtggaattttccaggagccattaggctcttcagaattcaagttcaccctttattcagccctgtcattaagaaatgaaacaaaatgcaagatttaacttacacagcacatacctgcatgcagaaatacagatcttacataaactatagagccgatggcgtggtgtgccagcagactttctgaagagtcgaggttgaaaatgcttcagttttgtagatcaaccttagcttgtcataagcactgagctctattttggcagtgtgacagtgtgtgcagcaggatataagtgagcaggcatgggcacagtacagaaaacttgtatctaacaaaaacaggcaataaaacggatttttgctcaaacccttggtttgctagttctcaggctaagctgatctcaagcatacatttcaaatatattagagtcctgcacaccagtgtgggatatcacctgatgtaagccgggacccttcctctgtaagctccaaagtaattgaattagtgtggtggtttgttgggtaccaataaatgaggtgagcgaatactagaggaataaaaatcacactttccacgtagtttttgctctatgttgagcctaaaggaacctgggagagacaatgatgaattaagaattcctaagaaatgttcaggggtggaagggccacacaagcctggtgacctaaggtcaatgcctgtgacccccagtggaaggagtaaaccaactcacaaaaatattcctctgatggtgcttatatgcccacacgtgcatgcacacacacacacacacatacacacacacacacacacacacacacacacatacatattttaaaaaaggaagtaagttccagataattcagtaattccagcagagctgtatgtgcatgaaaccgtggttccttaaacaaagggtgagagcaagaaagaagaaacagagctctgccctgctaaaacctcttctctcacactaacttatatatttagagacctggccttctctacatgaacgagcccatcagtcatggaattggctgccatagggccacaggcatagctgaaggagcatacaccagtggttctcagcctgtgagtggcaacccctttataatcagacaacccttttacaggggtggaatatcagatgtctattcaaaatagtaacaaaatggctgttatgaagcagcaatgaaataatctgtggttggggaagagaggttcaccccagcattatgatctgtattaaagggtagcagcattagggtgagaatcattggtgtacagcaatagtgttataaaaggtttctatctctcctctgagctgtgttccctgtgtggtccctctttcctctggaagcaagatgcttactcctagcacttcatggatcacatttcatgatgtagtgactcaaacagaagtagtctcctaccccctgattgcagacatcctgtggttgatcttactgagtgaactgaattaggaacctaggggatgcagtgtccaaaacatccagttttcaatccaggaatgagatcatctttacctaaaacatgcacagagtaaagtaaaaagaggagattcccatggaagctctggaatactgtacccacaagaacatagagcaagcaacaacagatgcccatgaacatgtcatcaagttgccctgggcaactgcctgcctcctagtgatccattcatcttcacagacttggatctctaccctgcatacagtaactaagctggcctccctctacagacatcaacacttctgagagggcagctgataccagatgctaacgtggggatcctaagcagcctttcctctcattctgatatctcgtaggctcccatggtatacatttgctttgtaaagcagcatgcattcattgaacacagtgaaagatttcactatgacattttcataaatgtatatcatatcttttgttcatatggacacctccatccatgaacctcccttgtctctctgtccctgccttgctgccagtctaccttctcttcctggtgtgtgggtggggggaggaagggttcaaatgtgtgtgtgtgtgtgtgtgtgtgtgtgtgtgtgtgtgtgtagtgtagtgtagtgtagtgtagtatatgtatagtgtatatgtgcaagtgtatgtatgtgtagtgtggtgtatgtgtactgtatatgtgcaaatgtgtgtatgtgtagtatagtgtatatgtagtgtatatgtgcaagtatatatgtgtgtgcatatgtgcatgtgtggtatatttgtactgtatatgtgcaaatgtgtgtatgtgtagtatatgtgttgtgtgtatgggcaagtgtgtgtgtacttaagtgtgtatgtgcgtattcaagtgtgtgtgtgtgtgtgtgtgttgtggaaagggacaacctctgtgttgtgttggctatgatgcatgctggtctttatgcaggagtagtacttctgatttgagtcttttgaaaaactacactaatttccattctggctatagaaacaacatccctaccacccactgatgtattagggttccttcccccactccaccccaccccattctcagcttcttgatttgtttctttgatgttgaccatttagctagagtaacatggaatctcaatgtggttttgatttggatgttcctattggctaagaatgttgaggttttggtttttcccccctcatattcttctatgttctcctatgaccttctatgttcttctatgaccttctatgttcttctatgactttctatgttctcctatgaccttctatgttcttctatgaccttctatgttcccattgatcctcttcttttggatcagatggtgcacacctagttccctctgaagcttctgtaccagataatatgttctatgagagcagcacccacgcctgtaataactctaagaacaggaggcacttgatacatgattactggttcaaaaactgagtgcaaagcttaagattatcctaaaagcaaaggagagtcctgaaggatgctcagtggcttcctggaatacttctattatgcatctggtgaaattccctttctatactcattgcttccattgtatccatccttaccacccgctggagttgtgtcatggtgatggattcccatactatccaccaccactgcatccatcctgctctcctctgagccacagtgctcattatctctaccattcatttatcagcccattggaggcacccttgggacatttctggaactatattaaactgttaaggtgctctgtggaatgatttaattgttcagctgattactccatttctcaaatgaactaggagagaaactgtaaggtatacataacgcacttcctcttaactttgttatgtcttatacatggtagacaatccagtcacattaataatattaaagatggaacagtacatcttttcctggagttaccagggtatcataatattgtaaaatatggagaatcaataaagaattggatacaggaaggaggaggagaagacctgagttctaatgtaagctgcatgcaaagccccatctcagaaccaaaagaaaaagataaaatacatatggtagacgtcaggacaccatggctgagtggagatcccagtgtgaagcacatgcttgtccctcttctgacctccgtgttgaccctcgagcagccctggggttatcctgtccctgaaacctccatctagcctggcctccaacacaggaagtagaagccatggaggaatgctgctcactgcctcatttttcctgtaggattttactattttagtgttaaagggacatttaagtaaaacacgcatttttcttataaaatgagtccaattttactccattttaataaaatttaagcatcataacaatctacagaccatgcatcatgttaatctatgacactgagaaatgttaattagcatgtaaagaacagtcagacctatgacacaaagttgttgcaaggagtcaaaaagggagatgtgtgtagtgctggaatctgtctataggatatagtttctgttaatactgtgcacagtgacaccattgcatacactagcaagattttattgaaaggacccagatgtagctgtctcttgtgagagtatgccggggcctaacaaacacagaagtggatgctcacagtcagctaatggatggatcatagggctcccaatggaggagctagagaaagtagccaaggagctaaagggatctgcaaccctataggtggaacaacattatgaactaaccaataccccggagctcttgactctagctgcatatatatcaaaagatggcctagtcggccatcactggaaagagaggcccattggacttgcaaactttatatgccccagtacaggggaacaccagggccaaaaagggggagtgggtgggcaggggagtgggggtgggtggatatgggggacttttggtatagcattggaaatgtaaatgagttaaatacctaataaaaaatggaaaaaaaatggaaaaataaaataaaataaaataaaaatactgtgcacagatatagaaacacatctcagacacactgtaacatgatccatcactatagacctatcaacccaaggccattagacatggcatccaaatgacaatatgattctccatggaaaatagtgattgcaagtccaactttccctcaatcccattgctgcagaaaggctaagtatacatcagtcagacccttgcctcactcatcagattttttttggaatttttttctcattctgtcactcagagatacagctttattttatgctgccctctgttaataaaggagagactccttcaacaccctaaatatcattaacattgtgcctgacacaagcagaaggaggtgggaaaggtctgcccaaacagctctgaattgtcatgttagacacaaactgaatctttaatgatgcaaatattcataaaaatgtacaaatgatcataattggtaataaaattatcatcctctgcttaaagtgatgagactaatgaccacaattcggtgcgctttcttggatggttgatgggaagaataaacttgattttattgtgctcataatgaactgactgccaggagtcaaagctatggtagtcagcttggagagaggaagaagagttttaggcaacaaaaaacaaaatttttttgtaggcacacatttttctttaggggagaggaagctgaagtgtaatgggaaagtggttcagaatgtcgtataagaggtgaatccagggggcggtgcacagaatgcatagagctgctggtttcatagcctggaaattatgtgaggagggtataaaatacaagtgggaacaggatcttgattcccaacaaatgactttttttacttgccatgttctgttccctctccagtcccttcccttcccctctgttccccatcctcatatctgttggtcacaatattgtgagacagaaaatgacatgaagctagagcacccttcttactctggctgttttttcagcatggcatcctctggtatatttgggcatgcttcataagtcaagaacaactttggctgacctttgaccaactgagacatgtgggttgtgtcaagatactctgtccaatattaaataataaataataaaatggccccttcaacttgcttcctgtgtccatttgcatggagtatcctcttccacagttttattttaaggtgatgtctgtatttaatgatgagatgtgtttcttgaaagcatcagaaggatggatcctgcttccctatccaatctattagtctgtgtctttttcctgagaaccaagaccatggattttgagagctttcatgagtaatatttgttgactctttttattgtgctaaactctcacaattccctccatcagaggcaacttggaagtctcatgaaatgaggcaagatgtttggagatcagcccaagtcctgaatggccagttctgtacctcccaggagcttcatctctgtgtatctacctctacctgggcctttatttggacaaagccatagatagatattggggtcccatgtgtgatgctgtgcttattgctttcatgtaggaggattggttatgaatgtctttactgtgattaggttcctatgtgagctctggaccctgaggtttgagagacccaagttacctgtcttagccctggatggtgtcaatacacttggtcattagggaacctccacaatacttgaggcagccttagctgggtagtcaggctgcagtctagttctttatatggtggtcaactctaccacattataaaacagagaagccattttgaatacaacattttttatgtggatgttccttgagtggataccagatatttgtatcacagtgaagggaccttatgatgtgtctggattctatgggatgtgtttttctcatggaggcaacccagaccaatctacagagcatagaatggaagcaagatgtcttaattaggattactattgctgtgatgaaacaccatgaccaaagcaacttgcgggggggcaggggggagggtattcagcatatgcttccatatcacagttctctatcaaaggaagtcaggacactcaaacagggcagacacctggaggcaggaaatgatgcaaagactgtgaatgggtgcttcttactggattgatcctcatggcttgatcactctgctttttgtagaacccaggactaccagcccaagaaaagtaccacccacaatgagctgggcccttctccactaatcactagttaagaaaataccagatcctttcagataactcagtttgtatgtcaagttgacataagactagccagcacacaggatgacatgattaagtatcagagagaggactgtatcaatgagctatttctatgtaacaaactatccctttaaagacatggccattatctgcatttgcttatttttcaattagttgaggtcaattgatccaagataggttcagctgtcttgctctgcttcagtttgtaaacttggctagcttggctcctcgatttctgttgatcccaaatcttaactaaatagtccattctgaatcaagtctgtggggccagcagctatctggaagaagctttgtttattgtggcaatgagcacagggaaacaagtccacatttcaagcgcatgtaatgaccatgtttgtatcaccgctgattctccatggcccaagaaagtcaacaaagataatggcaagggcacagtgcagggatgtacatggtcagccagaaagagaacaaggtagcatccagatggacagagctgacattcagggaggaggaagtgtgtcttttggagaagccaagaaagtgtgaaattctctgaacagtaatcttgatctaccccagatccacttcagaaaagcacatcaaaggtaggtaagagagttggtgctaagggaaagcattcaggtgctcagggtagacactgtagaaaaggagatggttctgagactcatgaccttgccttcactgctaaaacttggggtaacttcaaaccccaattttattttgctcagagaaaaaacagaagctcagatggtttgggaagatttgtaaggtcagctcataccttgctgttctgtgtctcttgacaggtagctcttgcacttgctcgttgcatatctttgagatgccactagctgattgtcaccacaatctttgttatgaacattttgttgagaataaatatgaatgttttgttgagaataaatctgggaagcatttcttcatctaatccaagtaagagaaagttcagagagatgatccataaacacccttgtttacagaagttatggtttaaatatgaaattcacaccacacacacacacacacacacacacaagcttgtgtgatcaatgtttgtttcctgctggtgcttttgttttgacatattttggaaaacagggtgtagctggaggaagtaggtctctgggttcatgttctgggagtctctgcctttctccatctccttctccttatccctctcccttcctcctccttctcttcctctcacttcctctccctcttcatctctttctccctctctccctccctgttctttctctttcctatgaagtggaaaccccctttgccacacttttccccaccatgatgtcctgtccaaatgcacaggataaaacaaccatagactaaacccccgataataatttgattcagtaaataatttgtcagtgaagtaaagtaattcatccaacagagaagaaaagtaagccgtgcaagaaaatgaggcagcagagtatagacctaagttaccagactccatactctgcactcttggttctataatccatggaaaatgataaccaccttgaatcataaacgtgtttatacatctatgcacaagcacttacatatgtactaagtgtttctctcatttgtctgtgagaccagcagataggcaagtcaaggtagatgatctcagacataaaaactgagagttgaggttaacaaatttgtctggtttctgatagagataggaccttctggctttgcacctcatgtgtaaaagagagctaaggctgaagaaattcgctgggtctccatccctcccttttgtttttcctgctttgcttataagcagactagccaaggtgcatttataattctcaggaagccatgccctcttggcctaacttgtaatagagtgagctttgtattgccttgagtcttctggattccacatctaactgtggaatcttccagttatttccagtaattacaggctgcagccatgataactagctcagtttacaaaagccatcttaggaaaataaccagtgttaggaatgcataagggggtggctgtctgatacatcaagaggagaaaattatgtctgacttcttggcctctgctacttgcagaatgcattctctctctctctctctctctctctctctctctctctctctctctctctctctctctctctctcttttcctagtaagtacttacttaacacaagcatgtttacaggaaagcaattaacaggagttccctgaactatcaaggagaagaagcagtaattaccaatggtaaaaacactctctgtggtccagatcatgaccatacaactgttcttccccattaagagaacaggaccaaagatgggggatgagcagcgatgaagtcatttgacaaatcccaggaaatcttactctggaggccagcatcagggtacagatctgagtttattgcctagttcataagcttatatagagtgtttgaaccaatcccaaacccctaagtccttgaccaatcatatctccccacaccatcaccatgctccaatgaaagccatgctgatgtggtaactaagaaggaatgaggggaatattgtcacctgtgaggacttccttaaatatgggggaagtggccactgccctaacctctgttcttttttgctgtctcactagtgtgtcaagagccatcttagagctaatgccttgtgaggcagatcaggaatctccaagtagttgcaggaggctgtggagcctctctctctcaattctaccttttccttcacaatattgacttacttatcccacacaccccatactaacctgcttctttgctctgaccttgggtaatttggattttaggttgaccacctaagttctttcccatgagttaacctacagggagtaagcaatgtgacctaagttctcaaagctggagacagtttcatgatacctaggctgggtggaaattgtggtttccactgtggcatgtgaggagctaagcatccttctcagcctcacaagagaaaaggctgaacaaaatattcagcaactcctctgagcatcagcacagagctctgggtccatagcaagccagcaagccagcaagccagcaagccagcaagccagcaagccagcaagccagcaagccagcaagccagcaagccagcaagccagcaagccagcaagccagcaagccagcaagccagcaagccagcaagccagcaagccagcaagccagcaagccagcaagccagcaagccagcaagccagcaagctctgaccctgactgtagcttcagagactcagggcttgagggagaagggagaggaggatgaggtggcagctagggacagaagttgtgttggagcaaggcttgcactgagttccttgtccccaatacattaccaaactttgcttccaggaggaattacatgtgatactaagacaaacttgtggaaaaccttttcataaagagacagacaaagcttaagaaccagacacagggcaggtaagttggaattatcagactaggcattcctaactaatgttcatattcagattttttttcaaatttttttaatttatttttttaattaggtattttcttcatttacatttcaaatgctatccccatactcagaattctaagtcccaatgtaaggtaagttgcctctgttttcaacttcatagcagtgtgaaagcagcatgcatgtactcaatatgcactcagaaatgacactcaagttgtggcagtccaccagtgcctgggctattaatttgtagttctttctcaagacactcagaaatagtgatgaactctatggctcaggccgcgccatgatcttgagggaaagccatcaggaagccatagtataccacactgctgagcaatagccttcggtagttgacatattcagtgcattttcatcgtatactagtttcggcttccaaagcatttgttgtaacttctgtggtggagaagtgttgatataggtaagatgagatatttaatagtagcatagatagaaactttaactaaaaaggaataaaaaaataaataaaaatctctagcaatcaaatacccaggcacttgggttgtttgtttgtttgtttgtttgttttttcacaaaattagtagtgcctttcctgttgtatagtaaacgctgaatcacttgttagtgaggtctcttgtatttgcagtgttctgtatactatctcctccagccttggtcacatgggcattgattcagtgatccctaggcactgggcacagagctcagtattggcattaccacagtaggaagggtgggctcagtctctgcacttagggaacttgttgattttcttactccagcaaccatgccaaaggaatctaattggtagctgagtattgttatattttgctcataccttcaatcctacccatatatttacacgtgtgggggatttactgctagtgactgagttcccagtcctgatgcctgtgagtatgcctgtatgaggggcactgtgctaggtgctgggaattccgagatgaaggaaacagatggagaccttgcccttgccaatcttcagtcaagcccaaaaaagaccaagagaaatgaggccagaattaaagccagctgttaaggcttctgctgacctgccctccacccagcactctcaaccccaccttcactgctttcttcttcctagcaatgagcacactgtccacaagaggtctgaaggagaaaacaagacagatgtgtgggtggttggcacagtctgattggttaagccagggaaagtcttagaagaacagaggtaagggagccaagttcacactgatgcttggatacagtaagtctcagatcctgagagaggagaccctgcaagggaaatgccaaggaggcaaaaaaaaaaaaaaaaaaagctttcatctttcacctcccaacattgtggacgtggacggaactcttgccttctctatgtaaattaaggttagctttcctggtattccaaaggccctaaatccatcctatcaattagtccccatgggacacactatgatggcacaattgatttgcctggagtaagttatcacacaatcagctgaaaggcaggccaaaagattttaatgcagttgcttccaggcagttactaacattccctcttagcaacaggaccagggtacttttattcctcaaaatgatattcccctcttgttaaagcccaggtaattttatgaactacactgatttaacacccaggccacatgagccatataccttgaataaatgaaatccaatctctgtggcatgaattatggccttatgctgagcatcaccatggcaactaatgacatcaccccacccccaccctcagcccccacaccaacctgcacaaaatccatttccccaaggttctttatatgcctggcataggtatgttcttggcttacatgtgcattcataaatattactgttgtcaaaggttcgtagtggatgtttgctgtcatttggggaggtatattccctttgtggcaaatgtggggtttttttgttgttgtatttcatgtgggggaaattctaatgaaaattactgtgtgtatttgattagcaacatttgttgataacatatggtctaaagaggtttctgcaaataagaggctttaaatagtaaacagagatgtggctgagacggagcagatgctcttggcaaacacacagtacgaggttgctttactggggaaccctcccccaccctgcactgcctttcttcctagatcaaagtgtccattttcaaagcagcgggccccatgcagtacatttgcagaagtaatgtgctgtgactttagtgtcactcctgccccctaaaatatgaattgtctgctactcatgcttcttgctagatattagtaataatgtagtgtgagcaagtgagtcagcaggtccaggttgatctgaagcagcatttgggtaccatgtgtctgaaatgtgctgtgtgcataggcatgcctgtgcgtgcacgggtggaggctagcgaaagaggaagggtatcctgctccattacttgctgccttattccaatgagacagagtcttttactatactggctggatgttttctgctaggctaattagcaagcaagtggcagttgtcttccatctctagcctcacttctcacattgctggtattacaggtatacgtggttaggggccacgctcgggttttacctggatttgggtcctggtcctcatgcttatccagctgacagtctgtcccagagtctgatcttccagtgcactccatgaggaatggaggacatggactgagctgtcctggcaagtgttcatttagagttgctctggtgggtgtgctaggtgagaacacctttaaggtactgatgaaaataaacatggttctattaatgagcaggcaactccaccccttataatagggtttggcttttcagtaaggtccaagaggacatatttcaggctcatgggtcacatgatctgagccatagctacttaactatgatacaagggcagccttggacaccctgtagtgaataagcataggtatgtgctaataacactgctgttatgctttaaaacttgaatttcaatggagtcctcatgtatcacaaaatagtattcttatttaattgttttcggtcatttacaattgtgaatagtaggcttggtaagaccaccagctggataagcatgaggaccaggattcaaatccaggtaaaaagctgagcatgtccactaaccacatatacctgtaataagttcccacaatgtgagggggtgtgtgcagatgggaagatagctggaacttcatcttcctctagccatcacacaggtgttcatacacacaacacgtgaacatacaacacacatatgcatacacagaagaattcttgaatatgtaaaaaccattttggttcatgagctatatacacataagcaagtaaacagttggaactgacccttaaccacggctgcatccttaaagtgaaggctttgtgcacttcgcatgcacactattgacttaaacatagtatgttcaatatctctctcctgtaaatcccttaactagccttctggggtcaggactgctctctgtattattattttttatttatgtactttacttatatcccaactggttttatacacatatttgtataatatattatacatgtatcatacatgtacatatgtacctggtcctgtatgtatatatatcatatatataatttcctcccttagcctctcttgttccccttctaacttttagattcttacctctcctcttaccttctactttcatgtctctgtctctgtctctctctgtccctgtctgtctgtctgtctgtctctctctctctctctctctcacacacacacacatacacatagattatgcatatgaaagaaatatggtattcatgtttatgatcttggattattttgctttacatgataatctcaatcctatccattttccttcaagtgacataatttcattcttttttatggctgacttagaattctactatatgtatttctttttcttttttctttttttactagatattttctttatttacatttcaaatgctatcctgaaagctccctatacccttcccacccacgccctgctcccctacccacccactcccacttcttggccctggtgttcccgtgtactggggcttataaagtttgcaagacctagggacctctcttcccaatgatggccaactaggccatcttctgctacatatgcagctatagacacgagctctgggggtactggttagttcatattgttgttccacctatagggatgcagaccccttcagctccttgggtactttctctagctcctccattgggggccctgtgtttctactataggtattttctttattttgctaacgggcatctaggctggttccatatcttggctcctctgaagagtacagtagtaaacatagatgtgtccttacattaaggacttggggtccttcaggcttatgctaacactaggtcctgtgatgtttgtttggagaaagtccaaccctgatttctctagggtctacactgacttacattctaagcaacagtgtgcaggagtcctctatcccccaatcctcggtggctgttgttctttgcttatgctgatacccttctgactgtagtaaaatggaatctcaatcacatttgcatctggactctccccaaggagaacatggcacccgtgggaaaatagcctactggtgctgtacctaacagacctgatatggtgctaatttgcctgcaattggatacttaaaaatcatgtccccaaagaagaattaattaggcactggccctaagctgtggagcttaggaattactcaccttggttgtcctccaagttagactcttgtgcctccctacagaaggacttgagtgggtgtcccaccacacaagctttcatatggaagtacaactacaggagatagcttttctacactcttcagtatgtgctggtggcactgtctaatcttgctgtcactggtatctgtgttccttccagcccttagctgtgtgagccaaccattgtttgacctacaagcacccatgcccggctccccagaaagctgtcatatgctgtgctctgcatgctgtctgatatcatgggcactcagtcactgtgctccaaaacactgccatctccaacaagagatgaagacccaggtaaaggaggctcctacaggttacctcctgtctcatctccacagcccctgaacatacaaggtgatggttcccagcccattgctccttcctttttagttaaaaatcaaggatgtatttgtagcagttgacttactactgttcttggtgcaggcaataggatgcactgaaaatgtcactttcctcctaacacctcagtgtgtggagaggaagacacagatgtacctgtcagaccatggggcattaatgcattaggagtgcctgagagatagaggcctttgggttcaatagtgcggatttgaggggaaaaaaaaacctcaagagtttaaatcctctattggaagtggcctgatattcttgtgcagttacataacatcctcaagtgtaacttggcctatctataaaatcgtgatgcaactggggtgatctatcaggacgcttaaatgtgctgatccatacaaaatactagacaagggtcttggcaaacataagccctctgtaattggtggctttatcattttttgcaagctaaatgaacaggccactatggtgtcattggtgacagaatcacagagaaaggacaccttacccattgaattttatctaccttgtgtgcagatggaagtcaatcagttaaccttcccaaccttggcttgataaatattatcagcctctggtctttccaaataagagtgcagtggtattttcattctggaaagcttttaaaaggttttcatcttagcagctatagtcaattgcacagcaagggaaaaggacagagaaaaaacagcaaagagaaatagactcagttattgatgtgtggtccactagaacacaaaagtttataacacatctccaccagctaatttgtccatgtgtcaaatatagcattgtggaaaagtacattaaacatgggcaataaatccaaggctacagctcagcgagggcgattcagtgatggctactgcaggctgtcttctatcaagaaggcctaattctcagacctatgcctctatcctgtggtgggtggagtatgaaaatgtctaccctttgtctttttccagctctggcaagaactggctcctttatcataattggtacccagacagctccaggataactatttagaagcattatgagttatatttgcatatcatttttttaaaagcctgtaagctatcctgtgaaatgtctacacttatgaacccatagttacagaggaagaaactgagccacttcaaggtgactcaaaatcccaggagtctccaaatggagcttccccaaagataaagggataattgattaaagtacccaagaatgtatgtggaggatcgaagggaggacaggacatagccatgtgtaattagacttccatttacttcctatgagtgtcgtggcatgcagtacagaatctatgtgactatgggttcataagtatagacacttcatagattatctagcaggtttttaaaaaagataatatgtaaatataacttatagtgcttctaaaataggtaacatgcatggggctgtctgggtaacaattgtaattttaaaaagccagtccttgcccacgctgggaaaagacaaaaagtagacattttcataactctaggaagggcctgagaattaatcctccatgataggaaggagcctgcagtagccttcattgaacccaatccttccttcaggaagcacagaagtttcctgtcaacagcctgggatagcctattctcactgcacagccatctgccaccccagggcgattcacttagtgctggcttcagaggcctggggcaaggaatctgcagtgcctttggctcaggaagggcatattttgctttagtcttctcctgtggccatcttgcagttcatggtgattttatctctgaaggtatttgtgaaatgaagtcccccaacagagtggggcagagaaagtactgagggaaaaaaaatccttgatgttttcacatcattttaaacatgtttatgcttgtgtgtctatgagtctatccatgtgtgcctgtgtgtgtgtgtgtgtgtgtgtgtgtgtgtgtgtgtgtgtgtgtgtgtatttgtgtgcctatgtgtgcatgtgtatatgtgtctctgtctgtgtttggctctctgtgtgtgtgagtgtgtgtgcatgcacgaaagagagagaaggagggagagggagagattgagagagagagagagagagagagagagagagagagagagagagagagagagagacttctccctgaagatcatgtagctagtctttgttagaatagaatcttttatttcctctgcttcactgggccaggttactatttctaaagcctgataaataaatcggggttcatctgtgacctgactaccaaaactcccagtcggaaagcagttgactctaatggtttattcggttattcagcttctgggtctcttaagcaccatgctgccccccagtctgggttattttacacaccaatgagcaaggcatccttggggagcttcagaagtccaggcaaactgggttgctttctactaaacagcctaggatgtccctacggcccagtcaggtccagctgcacaggtgggacaggcctgaaatggagctcctgggaaggctgaagcagcagcagcttttgtagaccaatggccaccctggccaccaatgaactcattgtcacgcagagcaagtcagggagaaatctgagtccaactgaaatggaaagagacagtttgagatctagctcagtgggagaacagcatgggttttttgctcagcatgtgtgagagaccctggttcacccagtctagaaaagacagaccaagaagaggaggaggaggaaatggaggcaaaaggaagaggggcaggcccttaggcagcagtggttaggtcagagtcagtctctgttaaataagccagaaaatctctccagggaggtgtcagacaagcttggcgcagcagtgcaggcagcatccccatcgtatgaggttgaagggaccttagtgggatcctgcaaatgaatggactctatcttgagttttcttgtatgtaaaatgtctgctgaggtgaacattttcttagttacttagtagagttggaatagccatgattccacacattttcctactttgggaatggaaaaggagccaggatttactgggatctcattgtgtcccaggcctgcagctattacatttaaagttatggtgagatgaacttactttacatctgaggggcttgatggacttgcatgttagttagctcatcccaaaccctatgctttgtatgtgacttagccagggtttgagcaggaatattctggttcactttatcatggcatctttgctagggcagattcccccatcctcggtctttatgaaggcactgggaaccacagccagaagttcctggttggatgtacacggttttctattttgttgaaacctggttattttgtctcttctcatacccacctgtatcatctccctgaggcttctgtgtgtgtccagacttgcttcacacacgttgatcttccagacccaggtccttccttcccactactctggtgatttacccactcttcctagttcacggttcctcttagtttagtgcattgaatttaatttgtgaagtacaaaactgagactaacagtcctgtttctacagttttatgaaagaagaaacaaaagcagacataagacacagagtaaaatgtgacatgccctaatagtcaaacaaatacccctgagggctgaagagatagatcatcactccacaaacccattgttctagcagaggacccaggttcacttcccagcactccttggcagctcacaaccatccttaacacagttctcaaggacccaactctctcttctggcttgtgtatgccccaaacacacccgcacggcacatgcttacatgcaggcaaagaactcgtacacgtgaaaccaaaatatagaaatccttttaaagactacgcataaaacaataatgcccacataggccatagaagcaatgtcctgtgggaagtaacgacgacacccttggcttatactcaactccagatgtaggatggttgctctttttgcataaaacgcctgtggagtaggtatcacagaccttgagtatgttcaccactgtacataagtaatgaaggtgtttcctgatgaagaaccatctcccatctaagtctttaatctaggaaataatcagaggcaaattcttaaagtaccctctaaccaacttgtttgctataatagactaatagttatgtaagcctcaatgtacttatgcaacgtaacactgtagtcaataaaattagatattagcaaatgcctgacggtatgggaaattgatcacataatgcaaaaacaatctgtagatgaaagctgttgtctgtactattttctggccctttaaaagaacatatatttgacattatttattcattcaaaaatatttattccatgcctcctatgtatgaagcaccatgctaagttctaagggctgggatataaatgaacagcagaggcccggtgctcacagagctaaaagaaccaaagacaaacagggctgagttggttaacctcacatcactgtgggttggaatgcctgctgtactgaagacaggttgatacctgggcccagcttagactgtgagatcaaaatgacaagcagaacagaggtggcaaagaccgaagacccatgaaggaagcaggtgagaaggaggaccagggaagggtcagggttgtgccttttaacagtgcttggagtgccgtggaagggtaagacaggctcagtgcatatcacagcaagtccacaaggtactccatttgcaactacataatggatggaggcggggcggggatggtggagtggggatggtctctgagcatgatgcaggtgaataaagaaagcacaactgagagaccacgccccaatgcaggtcacgccctttgctccacccacatgctgagtaaaccagattctcttctgtgtctgagacttggctacagaaatcgtgagcagggaagagcacccctgtacttctgcagaccttcttgtaggtggagctccactcagtcctgttttccacttttcctggagagtagctccaacctgtgatccatgtatccccaagtctctctgtaaggtccaaaattccactgtctatgaagctggctttccagggccgagttgaaaggctggcgaatgtgtgctgtgtgctgtttgctgagaagggagctgcagtgggaaattctgatttcctccagtgctgagtgcaaggcactctgggaaggcccatggcagcttcgagagcatctgcctcttcttttttttttttttttttttcatcttacaagttaatcaacactttcctttgctctggcagctttgggggcactgggagtgggtgtgacagtctgctctgccttgggttaaccctgcgtttgctcttcttggggagacagagaagaactacccgttgttgaggggtgcctgtctacactgactctaatattctctccacagctggggcactcaaggcgacttctccacaacccatgcgctgccagctgttaaagtaaagctattcacagagagcactggtgtcctggccttggaagacaaggaactcgggcgggtgagtgcgcaagggcctcaggacagagcacagaccggggtatctgctgtgacctttctgccccaaagtcatgaagatgcagctctacaagtactgaggggcagacatttggaactacgttcacaagtactgaggggcagacatttggaactacgttccggactatgctgttagctgtgagaccttgaaccagtttctcaacctctctgagccacagggtctcctccataaactgtggacaacaagtgtgattcagatgacaggctggggagactcctgaactacacacttgggtattatttatagcaaagatgtgcaatgctgctgactagcttaacgtgaaattcattgctattaaactgtctaagctcctgacaacattaaaatcaacataataagataaaagaggagtaaaaagaaatcaatccatgttttaacagggacattcagaatataaataattgaagtgttctgattaccccagtgtggagaacattttgttaatggcaggttcgagacctgttgttggaggcagacccacaagcctgggtatcagtgaaccaagcaactgatccattaacaaccacaagcaaagtcctctttactgccctggaaacaggccacaatgcaatgctctaagatgtcacacatagttaggtgtagaatgaatatatacatacatatacatcatatgtgtgtgtgtgtgtgtgtgtgtgtgtgtgtgtgcgtgtgtgtgtgtgtgtgtgtgtgtgtgtgtgtgtgtgtgtgtggagagagagagagagagagggagagagatacatacacatacacatacacatacacatacacatacacatacatatacatatacatcaggaggagataacagagtaaagcaggctacagtgtgctcctgttcagaaggactcttccttcttagccactgctaaacacacccaccccatccattcagttgctgaggcacagagagcccagcaaccccaattaccagcccctaggatgctgagctaggcatgttattaggctcagccctccagggacttcatacatgttcccaaggcagaaactcatgaagcccacatgataaaggataaagtaacttgtcagaaaaggcatataggcagctcaccagtcatcttcagccgcattgcctctgtggagaaataaatatggcagggctctgctggggtgatggaggcctagagcttgttgctcttcacacagatacttgcatctaggtgcctagacattcactttttcctccctcatgcttcaggaactctctacttcctaatgtaggtcagcctggacctctactgactggccatgttctgttgggctggtgccctctgcaggtgacagctctgatggtgcaactgggggacatgatggcatcatctttttcaagttcagccattcagtagatcatatagagtgctctattgagacaactctaccaagctgagcataacctttctccagggacctggggttagcttcatccctttagccatatttcatgtattcacctgatttatgtctcatgtacatcaaatttttcttaaaaaatgaatcttttttaatatacttgaaagagagagagagagaaagagagagagagagagagagagagagagagagagagagagagagagagagagagagagagagagaaagaaagaaaggaagggtcccttaagggtagaagaggttgccaccccaggcctgccctcacctccagctccagcctccagtgtgtctgtgtgggaaggatttacacatttttccacagttttaaccaaatgaatcctatctaagtgaacaagagactcagagagatcacgctatatatgattatatatgagtatataccctttttaatagaacaggcacagtgtcaggcctgctgggtctgaccgttagtgctgcagacagggtaaacagaagcaaactcaggcagaaagctctcatctgcaacattacaggacacaggcatcaaagccagaagttacagctcagtgtgggaagtgttctgcctaagtcctgggaggaaagcacacagcaagaggtggtccctctgtgaagtggggatgccattctcaggagatgcaaacagatagggagagagagataggcccaggccagaaatcagcctgataaaaagccagggcgtggcagccccagcctgaggagaagtcctgatggcttacaagcagcctcctgaggggctgggttgtggctgccagttcacatccacacagcaaagcagatcacatatggcttcagcaaagaaaacagagtgcttagtctgcagcctgggatgcccaggtaagatgagaagtcaccctgtggctcccacacatccagaagggcccttgccctcccaaggtgctgacacacaggagggggactctagcccatcttgaacttggcgggctgcaggtggagacagaagaacctcatctctccaaccaccctgcagaggcttcaccagagagtgaatgcaaaggagtccaatagaaggctctgtggaatggccagtgaggaagtggccatctgcattttgaatggacaccatattgccagtgggaactgtacctagatctatgtggtggagggctgttaaccagctccccgtgtacaaggtgctgctcctgctatgactttaccaggcaagcaggaacataaggaagccaaggcctttcttgccactggcatggtcatggtcctcttgccagcatgctcctcccgaccctctctcccaccagactgactgaggatacagctggatggatagctcccttccctctgtctccaaacaaggacaaggatgcatttggagttacagagctccactgcagagatcagtgagatggacttaataccaagcttgacacccagatgtcaaccctcagatctcacagagtgggagaactgagttctgcactgttttttctgacctatgcatgcacacacacatgcacacacattatacacactacgcacaaacatacacatacataacccccacatacacatatatacaccaaacacacattactcacactacacatatatacactacacacacatacacaccacacactacgcccgtatacatacactgtatatacacaccacacatgcacacatacacacaatatgcatacctcgcacactatacactcatacatatgtactatatacacacactacacatatactgtatacacatacacacacacacacacataaataattaataaataagtaaactttaaaaatgtttcaaagaattctctagacatcactctcagaactggcctgtagatttcattagaaagctgagtcctggcaaatagcaaggaaacactgggaccatcccctggcctggtagcattgtgccctcagttcaaagggactgtcagtcagaatgtcaggcatggggtaatagagccctgtagctctctggttaggcacctgtccctaaagatagctgagtaacaccactgctgccaggaggccctgcagatcgcaaatcccaggtgctccatccattatgtacattggcgctgtactcacatgtcttctcatagtctttaaatcacctgtaggttcctcttatgtcaagtaacagatacaatataaaattctagcatgctgtattgggctatactttccagcagtggagtgtgatggagccctcggtatcctcctatctttgacccaccctccaagccctagagttaaggcagcacccagcaaagcgtatctgacatgctgccaaaaggcattttccaggggtagatggaggctacttggagcttcttcaacccaaagcacaatgaggagctggaagagaaaaatcccagtccaggtgctactgacctctgacccaaatgggacccaacatagactcctgccctgtctacgtctctcatttcccattattctatcgtcccccacaggctttgaggtgtttctcttcttgtaatgtgaaactgtagaaatggaaaaggaaggagtagctaagagctggctattacaaacacatctcttctcaataactgacatggttagtgggagatggacaatgttctctctcttaggttactctactacttctgaatttcagaaaaacaaaagtaggaccatgatatcaccatgatgtcaccatgacatcaccgtcctcgctcctacagacttagccagtgaggaaaaagaaagaaggcagagggcattttgtcccatcgatgtgactgtgtgatctcaaccacccacagttcataaaggagcagtctcagcaatggaacatgggctagcgttgcatggcttcacatcaaagtgtctaactctaacaagcatgactgtgtgttgcttttgtcttctgacagaaatgtatgctttctccctgcaggtgatcctccatcccaccccaaatagccccaaacaatctgagtggcacaaaatgacagtctccaaaaactgccccgatcaagacctcaaaatcaaacttgctgtccgaatggataagcctcaaaacatgaagcactctgggtaagtgtttctttcccaatctgagatatgggtacattcatttccagaggcagcaatagaacagaagaggggaacatacctcggggacagatcacttgcctggcatatataaggctcagttttggatctctagaagtgcagaaatgaattaagcaaaacccaaagggatttggagaactgtatgaaaggagctggaaggtgcctgctagcagcaattaaagaccatggcgctgacagttcccataggcttcttcagctgcagttactgtgtctccatttataccatcaagagagtaacttcctgctacctctaagcagactccctcaaaacagttaaaacatgctggacacagcatgttggggtttgtgcttggagaggtcttttggattctgtgttcctgccagaggccttcaggagtccctccctctcacctgtgtggacaaccaccttcatgaagtttaagcaagtgcctaactaggtcaaaagcgatgtcaggttgactgaaataataactctccaaaatggagtatgtgtgtggccttcattctgtgaaggtttgcatgaataatcagttgagtagctccacgcacagcaaaaagaatagggaaatgtggtttcactttacaaaacaaagcattgctttgtttgttttgttttgttttgttttgttttgttttgttttgtttttttaaccaaaagggttgtgaatgactggttttctgtggagccaccacctgctaaattatcttttaagatgtgattctttgcagaggagcaaggcagtataattatgaagagggaagagtctagacagcagaagaaactgggctctttgtcaaatgctctgaagtgccatttgtcgactggctgtcattctccatgaccttcaagtgactaggaagctttcctccaccctcttgaaaactcaagattgcatttgtggcctcgaagtctatggaagtaagaagccccacgctaagtgatagccagccataggtgccagtcgaaaagaagcctgcaagacgtctaaggaaacaaccaggacagcaagtggacatccttgcagagtagcagagcccacatcatgtggtcagtggctgcctgtgatgcctttcaaaggctgctcacaagctggataccactccatgaatgtcacccatgacttaaacctgtacaagctacacatgatattgttgaaaccaggctattcccaaagccagaggtgggattgaagtgtgagaagcctgtgaggaaagataccagctacttaacacttagtctgtactcagccatcactagtgagtgcagccaggttttccttatttcacttggtaccttatcatatggctaaggcacaagttcaaaaatcaacctgagctgaatgttcaaaccatgtaaaaaacaaaaaagttgtatcgaggaaatatccatatcaataaagtgcttattatgcaagtatgagtttgattgcttgctttgcaagcatgatcacatcttaaaagataatttggaagactgtggctccacagaaaccgtttcttgaagcagtattcatctgaaatcccaacattgggcaagcagaaacaggtggattcctggagcttactgggcaactagtctagtcagttgggtgagctccaagttcaatgtaaaaagctgtctcaaaaaataatctggagagtgattgaggaagatgcctcttgcacacacacacacacacacacacacacacacacacacacacacacacacagagtagtacctgcacatgaacacacacgtgtgtcaacacaaacatactacatgcatactcacaggtattttttattaggatttatttcatttacatttccaatgctatcccaaaagtcccccacatgctcccccacccactccctcacccacccactcccacttcttggccctggtgttcccctgtactgaggcagattaagtttgcacaaccaatgggcctctctttccactgatggccgactaggccatcttctgatacatatgcagctagagacatgagctctgggggggggggtactgggtagttcatattgttgttccacctatagggttgcagatccctttagctccttggttacttactttagctcctccattgggggccctgtgatccatcaaatagctgactgtgagcatccacttctgtgtttggcagtctcagctccaaactatgtttctgtatctccttcgatgggtgttttgttcccaattctaagaaggggcaaagtgtccacactttggtctttgttctttttgagtttcagttattaaggtcagtttttcctccttcctatctcactcccggtacatttttctgaaatataaagaacattttttttctccaatatcccttctctctccaagctacgtagtcctggtttcaagtctaatttcaactagtctagtcagttgggtgagctccaagttcaatgtaaaaagctgtctcaaaaaataatctggagagtgattattattaaaaagaactgaggattgatcttcaggctcctgtagtatttgaggaaatatcctccatctttaccacaacattgactcagaaacagtaaatatctattagaggaagcagagggtgagtaagcagaagaaggtggggaaggaagctgaccagaggatgtcagcgaacagaagcaccatcctcacatgacctttataacgtccttggtgaagttagtgcctcagcctgcaggccaggcttcttcaaacccctttccaaacactatcagtcactcccaagcagatactcaacacagtattgttctctgcattgaacagagcccagcttctcacattctcctcatatgctctgtagagagagctctacatgacttacattcaggaacctctctgtggactcactggtgggtgtgctagcatattctaggttaccttcacagtatgaatgatggaggagatacttagctcatatccatcaggctcctcaatgattgaaacactaggctgccattcaaaaattgctccttgccaagaatataccaagagaatttagaacagcctcaaagagtagacaaaggattcactaacatcaagtcagaaccaacatggcccaaactgggacaaatggccttagctgcataaggaatgagtcaggaacagtaaaagcatttctgttgggagctggggagatgacccattttataaaggatttgccatgcagggacaaggactgagttcattaccaatatccacataaccaggcttggtgaagtgacacactgtggtaatctcagtagtggggtgagagagacagcacggtctcaggaaattgcagccagcctccttggtgagctgcaggctactgagaacttgtcttaaaaaataaaaaaaggacaacacctgagaaatgatatatccagggggactatctgaactccagaggcccacacacctcacacacatgcatgcagctacacatgagcatgcacaatgtttatggacatttttttccatttaaacacgggtagtagggatgttaagccctatagcatggaagtcagagtaaagtcacagcttaaatagtggggggagagccttgaagatacacagtggagacttaggttatagctgctttagcatatgagcagaaagtcagaagtcttggggaatcttgattggatgctgtggtttcatgaacgagctaccgggccatgcagaataactctacagagttgtttctaaatgccagcgagttcaactcaacactgtttcttctgattttgagcattagcattagtgcgtgtgtgataattaagcaactccaggtagtttttggcttctcatcacccttctgtccctccacgtgtggaagttcaaggtcgagtacttcacatctctctccccattttatctctgaaacagccctacaggaagtagaaggtcccccatcccatgttaacagaccgcccctcccttcagccaggtgttcagacctacagccctgaagtcatgctgaacatcactcgcacactttttaaccaggaacacagcccatcatcaaattccttctactctgtttccaagccaaaccctgactccggctcctcagtcccactcctctctgctggactccaagcctcccttacttttcccctcttgttactcttgcctcataacctctcgcacattctttgcctccctgtagcctattccatcccctgaaattttctttttaaacttggtcctgttcctcaagtgctagaaaacatccagtgaccctccacctcactcagagctatgtcctggctgttgctatggtaacctctctgcattctcgtgagtactgctgcagccacattggcctcctccttgggtgttagagaagtacaggctacctcagagccttgtgccctcctgcccacccagctgacttggaatgtccccatccctgtgggaaagccttccttctctctcttcaatgacttaatgcttcttcctcctcttcttctccctcctgttttcatcacaaaataagactctgcatgatatagtacatggtttcctgttcatctgtttatatcatgtcttcccttctaaaaagttagttcttttccagtcggccacttgtcttctacaatcacagtacctagcataagttttataaaagcctcatgtattgtttggaatctcactgtatagacagagaaactgaggctcatcatggagaaaatccttccaagtccgagtaagcattgaagctgggcttagactctttttcagttaagtcccaacaaaaggcctgaaccttggctttctctgcatggcccacctcagaatttatccagagaaccactgaggacaccagggataacccacagcatctcagcccctccactgagttagcaaggagtgtggaggtttaaagccaatcattaagattggcccctttccttttcattgtcttgcttgggccagcacagccctcttgttcttcaaccccatcacagctctttgctatccatgggtcccccaaggcgaccaccattcctgccagcacaggctgtccaccatgctgccaggcagggctgttggagtactcacaggactctgagtttctttgctctgttttgagaactcctgcattcacagcttatgccaattaggttgggatgtgtgatgcttctcaggtgctctgtagcacaaccgagcttgcctctgtttctctgtccctgtccctgtccctgtccctgtccctgtccctgtccctgtccctgtccctctccctctccctctccctctccctctccttctccctctctctctgatctggagcctactgtgtagccatagatgatcctatgttctgctcgtcctacgctattgctggctcacaggtatgcaggaccacacacactgtgtgcgggcatataatgggacctagggctttgtacacatcagataagcactgagccggttaaggactcctcagccttcactgctgatttcctgtcagtaatttagtcataccaaactctggtggtcgccttagctttgctttccttgcatgtctgctcagttttgttcaatgtgtgttaaagctttttgagtagatgcagcaaatttcaaattattatagccacttgatgaattaagccactcattactatggaacaatctctctctctctctctctctctctctctctctctctctctctctctctctctctctctgtgtgtgtgtgtgtgtgtgtgtgtgtgtgtgtgtgtgtgtgtgtgccaatatttctgccttgagatttactttctgtgacagtaatgtggaacagtaacactttaaagaagatggctattggcaaggtacacccttttatagcattctatttttaacttacttttgagtttaaaggcatttcttgcttgctggatgtggtggcacaaacctctaatcttagcactcaagagtctgaggcaggaaaatagaaatctctaggctagcctgggctacaaaatgaaactttgtctctaaaacaatcttttcttgttgacaatacagaattaggtctggctcttaattctagccttttaattgagatattagcctatggatacttaatatgaaaactggtgtggcagatacagcattctgctacttattactgtaaaaatttatgtatatgagatgattaaaaaaaagaggagaggtagaaggaggggagggatggatagagggggaaggagacagacagacagacagacagagacacagatagacacacacactcgccagttgcaggcattgccacactgctgccctcccatacagtccttaagacagagggacaccgaggccaggggatttggctgtgacacgtctagttttggggattactgcaatgagtacagaccacatacacctctctcttctgtttggggttagtccttcgcagctcattccagcctcacctgtaactcagacaccttcgacaaataacaggaatagcaatgacccagagttctaacatcagatgtgtcacctcgatatttcttcctaatcagagaggtacccaaaagctaaatgtaaattcagatcaggccttatcaccattgttcttgctattgttagtagtggtgagcataagagcacctagcatttaccagacactacctgctctttccatgctatgcataggtgatgtgtgtctctacagtccatggtgttatccccatagactaactcaagaatagttggtgactgtgccacaatcccctcttaggcatcaccttcagtcccagacataagcactggactgtgccttcactcactacaccttggactgctgacttatctgatggtcagcccaggcttccagacagcaagaagaaagcactagagcattaatgctgcctcattgatcagtgtgctgggagtggggctcagagtgggaagccacctgtgtgtctgtagtctcatggcgtccatctgctccaggtactgtacattctgttccgggaggaagcgactccgggctcactagacagacacggtgcctcacagccctcagagtgtctcagttttgacaccttctggcatgtgccacattagtaatcctttctgaggaaagcctaggagggaaagccccacccttacacaaaccaaaggagaattgtgaatttcctctgatcccaccagctttttactctcagatgccttcaaacagaaacccctctccagttagaaaagcaattcacggagtttgtttcctcactctttaaatgtaaatgtatttaacggatatgtaaaataaaaaacatatgcacagttacaggataccaggttagtctccagtgcatgtaaacactgtattattgtgtgtgtgtgtgtgtgtgtgtgaaagaggatgtaggtatgtatgggtgcagaggccagaggccatcctcgggtgtcattcctctagagctctctaccttgctttaattttaagacaggatctgcattgattagtctggagcttacccattatgttgggctggctggctagcaagcccaaggatgtgtgcatctctgcctccccagtgctggggttacaagcatgtgccaccaaaccctgcttttgtatgtgcttctagcagaaacaaacgcagatcctcatgcttggatggcagacaccttactgactaagccatccctcaggcccacactgtaattgacatcaggatagacacacccatctcccccagcgtcgatcatttctccaacatgaaaacatttacacatgtttgctctcactgtttgaagtgtgtggtacacaacaattgtttctcgagaccttaccatgcagtacctctttttcctcccctctgtagttcctcactaaatctccccagccctcctatatagattcttattctttactggccctagatggggaggcagaccctagaagggcacagagaaaagctgttccacagtgagatgagtctgagtttaaatctcggtcatgtcacttagtggtggtgcgaactccatgcagaatggttccaaactccctccatgcagtagagttccttattcaaggtatcaattcctctccagggtcacagtaaatccatgccaagtgcctggaggaaggcagagttaaccattcaaagcaaatcctgttgtggattctagtgaacttctacaaaagctgcaactttcttgttacatacagtatcttgtgtatgtcagtacaacgatgctcataatttccgagcaatcattctttaaatgcagtgatgctctataacaaggatcacacttgatgtacatctattctttttttttctttctttttttctttctttcttttattttattattttgttgttgttgttgttgttgttgtccttgtttccttaaagttttgataaaataccctgaccggagcaacttaagaaagacagggtataccaatttacagtttcaaaggttttcaggtttttatgaaaggatgcataacagcaggagggaagccttgctggtcaaattgcatctacacttaagaagcagagagtgaacaagaaattgacactaaccctgaccctaaccctaaccccaaccccaaccccaaccccaaacctaaccctaacccttaccctaatcctaaccctaaccctaaccctaaccctaaccctaaccctaaccctaaccctaaccctaaaatgcatcaaggcttacacccagtgatccagttcctccagtgaaactcctcctgaaaattccacagccttgccaaatcaccaactgggagcttagcattgaaaccttgagcctgtggtaaacatttcacactcaaactacatttgtttgtttgtttatttacttatatattcatttgtcatttgtttgtttacttgtttgcttagtgtggtataggggtgggaggtgacgttctggacttcacaaatgctaaacaagccctctacaactgagcaccattcccagcgaatgccaagactcatgtttatacttcaacaaccttgtctaacagaatcctccagcagcaaacatcaaaattgaagccagttgcagcccccctctggatgattgatagaacaagaaccagaagattaaatgccaatgcatgccaggccccctctctctcccaagccctagctgagactctcttttatgtccataaattccatgaatatattgatatctgatcttagcacatagtgcaagaatgctgacaggatcaactgagtgatttacagaagcactactgactgaggtgacatctgccacagtgacctagggctcaccaagcctccggtgatctggcagccactctgcctcagttgtgctccagccaccgtctcttcctcacgtactgtcttgctccctttctatgtgcaacatcttctctacctgcagcaagtgtgcacatcttagataggacctttgcctaagtaccctgcccaacggcttcctaaccttatttaggagaaacttatgggctgatttgaccttttagaaaaccctgtggcttctgtgtaatgtctggagcagaggccaagactaaggagagcagatagaggttccatcatggtccaagatgttagtctttgccccatagactaagcctgccacaaatgtattcataaaatgagtaatttcatttcagtgttccacacaagcatggattattatgtattttagtgtgttctgtgtaatgagtatatcaaacccatgttataaagtttctttcaaaatgatttgattcatgatgtcatagacaattgaaagaaaatagcaattgtatcataggctgtgtcaatgtgggacgagctgtgaatgttgagaggagaaagtctagagcctggggcgtcccctcacactatctgggtgtgttgcagcctcttggtagatgagggctaggtttcctggggagtatggtaaagtgcatcaggcatattagtcaggcactaatgcagccctggtcttccttttccctgcaggtacttatggaccattggtaagaatgtgtggaagaggtggaagaagaggttctttgtgttggtgcaggtaacttttcaactctgtcatcagtctcaagagctatctgtattacagattcggcagtatgaatgcatgcttttgatctgaggtacggcatatggaggccacgaagcctgagcattgagttccatgctgttttccagattataaactcacagaaccacacagaggtctcttcctcccatacctgtaaaaccttccctttgtaatggacttctgggtttcaacagttagactattgctgacagtaccacaaaaaaaaaaaaaaaaaaaaatccgtagatacacagatgtatacacagaagtagagtcaaacacagagaccaataatgtgttgctaatgtttaaaataatatcttcactctcctagatgcatctaaaaatttccctacagacttataataaatgtcctcaaaacacttctccaaccccttttgctgttggtttgagcttcaacttttttcagttggccattaaatttgccttaactctatctggcacacagtctccaccagggcacagaagccataactcaatcttcaaaatgttcactgcagtgctctctgaaatacatctcaaagtgaggcaccttgtaatcgtgcttcctgagctatttcacctctctttggagccatgcctgcactgactctcactgtgtggcagctcccgcttggttctaagtaactgcaggagtttctggcaacacttgtcaagcctacaactatattcaagtatacccttgatgctttttcactgctttggggctaaattcattccaatccatcctaaggtgcttctgtgttgcccacaccacactcacaccttccaagtgtccacaaatgccttcaacagctgcgggaagataaaggaagagaggaaccattcctggcaatgacacgtggttctgaggaagtcagatcacggggtctaggcagtagttgatgacatcttcccagcagagtaagcaaacattctctcggcaggacatggggtccctctgcattctgagcacccaagagttcttcactcaacacgtagcttttctctgagaatgagtgtgaagatgaaaatgaaaggatgtttagaagcagctgatctcaggctaagagaatattccttcagcaaagtgcttgacattcaagcatttgattcctagaactaatataaaaattaattaaaataattgacactgctataaatcccagtgtcaaggaagcagagatgggaagttctctggggctcactggatagccagtctgaatgaattatcccttttcagtttctataaaggaccttatgtccaaaactaaagtggagaataatggcttccaggttcacgtgtgaacatagtacacatctgttcacatgtgtgtgcacacacacgtatacacactcatacaagtagctggcctctctctttagaaaaagaagctttagggaaagaaactgggtgggcagggaagggggagatttggaaaaaatgtaagagaaactgtctctgcatgctgtgtactgaacccaaaagaagagaatggctttttctgggctgtgcaactggaacacagatgttttggggccttcacacacagacttcctttaagaggagatgagaatcacaccatagctttaaaaaagaaagctgtatactgactttggaaaaaaacataaaagggcacaggctgtctgaggctctgtggcattcctagagagcaggagagatgcattgcaggatgccaagaggcttctcatgattaagaggtgctgcctgccttttttggtagcacacccacacactaatcaagcctctggctcattgagatcagacctttcatcccttaccagtctaacctctgaaggtgacatgtcagctcctttatcacagtgatggggaagccagcactaagcctctagtgtactgccttggtctcatggcattgaccatagactgcctgttcctattgttcatggaaccaaggatcaaaggaactaactgggtaattatatgcaaacagcacgccaaggcctcctcagccctggtccctgaaatccctatgcatgccctataagtttagctgtagcctataacccagaaatgacaggggtctttgacatcctaggtcagggagttccttgggactcactgtcagtctgtgggagcatggcaaagactacatgtgccttcatcactatgactgaccacactgagctctattcagtagtcagaatccctgacctgggtatatgaatgcagagtcaaagggaaatgtgtgcccattccagataataaagtctcatctcttctccattcatgtcttaaagttgattttcttggaggtgggaggatagctcagttggtatagtcaaactctaacatgcacgaggctttggagtctctcccccaacacatcatgaacaaactactctaacggattcctgggaggtgggggcagaaggatcagaagttaagggtcagccttggctaagcagcaagttcaaggccaaccttgaacctcgtgaacctgtctgaaaaagtgtattgttattctccaatatgaaaactatttcaacttttaaaagggaggtgtttggtttcccacttcttcaaagtatttcagcccaatgtcagcactgctaaattgtattttaaatgtcccctaaaatgctaataatagcatatttctatggttctgtgaagttcacaaagtgcttgagaaattggtctttgcagatatctatactacagtgaatatagattttctccaaatttaacattagggaaaactgaggctcagtgtgcttatgtgacctgttcaaagacagagcatgatggagctagagaggttgtccagtggtcttgagaagacccaggtttcattcccagaaaccatctggtggttcacacccagttgtaacttcagctccagggaactgatactctcttctggcctctacaaccatgtggttcacggacatacacataaataaaattaatttaaaaattaaagatggtgactgatgagcagctaactatgaagttcagcacaggtcttcaggctgcatctgtctcatccaactgagcacctaggtgggtctgatacgcagagaagtttatgcacacaaaagttcctaggattcatctacttttcattcatgaagtgtatgttccctaaacccacactctctgtttctggtttcctacaggcatcatgactgaaatttctcattattccagctttcagaacagatactaaagctgaataggataaatagcattcatagataaaatgacttgtcaagcagtattttaacaacccatccagattcactgttatttaaaaaatgagttgtaagacatgtaagtggtaagaatgtttccacacagttctgaaggatgtacatagagttacattctgattacaaatgacaggaaacagccaaactggctctctagtgattaccctcttcattgtctgtttttgtttgcttgtttgtttgtttgattgattgatcaaatagtttttgggtttttttaagaggctctgtatctctgtatctctgtatcctctctctctgtctctctgtctctctctgtctctctctgtctctctctctctctctctctctctctctctccatacacacaggctcttactgaatatatgcacacacacacacacacacacacacacacatatagtctgccttttaactggtggtcttcttgcttctgcctctcaagtgttgagattaaggttgtataacaccacacccaataccgtgatttgttttgctttgtcttatacctttgctttcaattatggggatcagacaagcgtcctgtacctaagcttgtactatcatgctctactgatgagcactcagacttcagccctctcaactaaggctctgattcactcgtctgatttcaaagaacttacctatttggacttttccctgacccaatacacacagagatgttggtaactgctgccctctccattataagcccctttctagagaggcccattggacttgcaaactttatatgccccagtacaggggaataccagggccaaaaagggggagtgggtgggcaggggagtgggggtgggtggatttgggggacttttggtatagcattggaaatgtaaatgagttaaatacctaataaaaatggaaaaaaaaagtaataacataaaaaaaaaataagcccctttctattttaaaaacggcagaaaatgagctaaagtagcaaaagtctggtcacctgtaaaatcaaactttgatcaaagcctagggaatcccaggagccaatcctcacttctacccagagggccactgcttggcataaaccaggatgctgcaagccctgtgcccatcactcgtgactattaaacctctactctgcattgcttgtactctctgacttcaaaatcacctctcaggctctggagcacgtggagaacacgtgcctaaagtgtgcaagaacttgagtccagtcccaaaacttgtcaaaatgaacacattggcagtttagggggaaacctgcatttcactgggaatagctttctattaataagatgtgacagctttaaaaatggaaagttcccaaatctctgtcagctccttggtgacctccaagcattctgggaaaactaagatgcatctataactcaggataatactccaaggatactctcccctcttctgaatcctaaagtaaattgtcagatcttaaagaaaaaacactcccagtgagccaactcaggtttgtctagtttgtgttgttgttgttattgttgttgttgttgttgttgttgttgttgctgctgctgctgctgttgctgttgctttggtttgggggcttgggggtggggtggggaggtgggagttgttttattttattttgtttctttttttaaccaagtcacacagcctcagcctgcagggcatgtcatcagtaattccagaagagggcagcagcagacagcactgcagagaggaagccactaaaacagggaagaaaaaagtgaagggctcagtagtagtagaagcatgcctctcagtatcacatgctttggctgttgtatttatgtggacctcaagtgcatattggcgcctttctggctgacctcactgacaaactctaccctgtctgctgttgccaggtgaaagaactaatccaaatcaccagagtagagatctagcagtgtctcctgtcattgttttgtggtgagggcatcatggaggattttttttgtgggtaggatcagccacaggttggaatggcctggtactatatgtggagagacactgtaaatcatggagaagggtgtcatggattaaacatatgtcccccatgtgtcagactcatttaacaaatgcctattgcttgtgaaactgtaaatagaacaaaagtactccttcaaaggactggtcacctacagggaagtcctctttgagctgaatgatggagccagatgcacagggactacttagttacgcacaccaatagagtgattgctgtatgggcctctcacatgatgtgggtacctcagtaactacccagtaacaagctgatgcacagggatgaggggagaggaggaggaagggagcacaacacagacgagaactttgaggttggaagatgacagtttactggacctggccaggaacccagcttctatgaccactcccatttgcactccgacatccattgtaggagaaggggaagtcttgggtgctctgcttgttataagaaactagatggtgttctcttatcaaagttctccttctggtctagcctgtgagacagtgcattcttcagaatcccaaactgggcaggaaaattctcatgagaaaccaacagagggcagcagcagacaaaccagccacgtgaatacgctcttgcctcttactctgaaccttcaggacgcgggacagcgaaacctattgtatagcctgaaagcaccagtttctcgtacttgcccttaaaaagagaccagtctcactgtggaggagactacagctgtccctggctgggttcaaagtcttagaattgtctctttcaataaaggaaagtaaggggtgaaggatgtggcagtccttcaccgaggcatttgacatacgtggatgacggtaaatgtgcctgtgagcttggctggaagctgggggtaggcctgttttgctacaggctccttgccaataggccagatgtagaaaagggaagcatcgtcgccagttctgcatacacagtgacaacagggtcctgaaggcaggcctgcagcttggagcaccaccctgcactgccatggaatgccaatatcagtaaagtgagggctgccatgtagggcaccagtgacaacggccatgccatcggggcttggggctgcctggctatgactggcacctagcagtcgagtgctcattgcttgtgacagcatgtcactgtggcacttgtctaagatggaggggggactctaccaagtcactgcaagtgccccctcaatagcagcaagtagccagaaaacaaaacgagaagctcaacactgacaaaagcagcgcttgttgtatgtgaatgcaaggttgggggggggcatagctttgtgtgaattcaagtgtatgagaggagaccatatctttgtgtgagttcaagtacagcttgttatatgtgaatgtgggggggggggatatagctttgtgtgagttcaagtgcataaatgccacagagcaggttaaaacccaaccttgggcgtcagtctttgattaccaccatgtttggaggcaggatcttttgttgctcttcactgtgtatggaagtttggccagcctgtgggcttctgggcatctcccatctctgcttctcttctctccatggggcatggtgattgcagatttgcactacccattttggctttatgtgagttctagggaagtgaacacgggtcctcgtgcttgcttagtgtcttacccaccaagtcatcttccaagccttttaaacaactgcaaagaaaagaatttttgttctctaactgctggccaagattatattgggtaacacgtgtagaactgttgccattcagtcagccttgtatcacaaaagtgtggcaatgtgtgtgtttaacccagttggtgttaagaacagcaatgtgggctgagctagtgcacagtgtaaccccagaacccacaatattggggaggagaatcagaaaatcaaggccaacctgagacataaggagacctgtctcaaaatagtagataggaggctggagagacagcccagaaaccacatcaaaagggacttgctggccagccagcgcagctgtgatttacaggctgatgagaagcactgtctcaaacaacagggtggatgaacgtcacctgaaactaacctctagccttcaaacacaggttcacattcatgtaaatataccctcacctctgccacatgcacaggtttacatgggcacccacatgaaatgcatacactagacaaaaatacaagtcaaacaaccataaagatagaaacagctgactgttcctaatcacctactaactgacagggacaaattcttacttccattctgcacatgaacccactctaacctcatgggccactgtcagatactatatccagtgtgaatgagaccatggagcaactggggcttcagttaaatgtagatggtttccaagggggcatgagtcttggtgggacagtctcacagtctgattttctgtcctgcaggtcagccagtacacttttgccatgtgcagctatcgagaaaagaaggcagagcctcaggaactcctacagctggacggctacaccgtggattacaccgaccctcagccaggtacccacctctgccttggccacgcactgacaaaagacaagctcgtgttagcaagatggtttatgctaggcaataacctgttacaccagagagtctctggttcaaagccaaaaagaaaacacatactttgtcatttatgcacctgggacatcaatgatgtactctacaatacgctgctgaggatatccataagaaagaatatatacttgtatacctaccagggaactgcatttgtatgggactatggtgtgtgtgtgtgtgtgtgtgtgtgtgtgtgtgtgtgtgtgtgtgtgtgtatacatatggagttgcatgtggagaccacaagttggaatcaggtgtattccattgctctcataattgaaccaggagctcagtgattggctaggctggagtgatgactatcaaatgccaaagtctctgccccctccagcagtagactgacaggtataagcccgactgttatatgggtgctggaaatgagaccctcgctctttcgtggtaagcactttacccgcagaggcaactcttcagcctctaagccatgacttcagcctcagtgtgtgtcattgttttggtgtccaagagaagctgcctcccagcacgcttgtcccctagacagagtccaaaactacacaaggttagctggtggaactagagaaagaaacttgtgctaccctatccactgtattccttacaagatgcctctctctgaattgaaacgttgatgcgcctgggcttaagtagcgaagagcgccttgcaagtggtggtatttcttgtaagttctacattgcatacattctacatcctgccccctcacacctctccccatacccattttattttttccccagaaaactgaatagaaatcagtttcaaagaaccttcagaatgggtggggggtgcgaaatcatttcagcatattaatgaacaacgagcaccagcagccctctcccggagttcatttttatgccaaatctgcactaggcttttccaaccacactgcatcatttggcccaaaacctttttttcaactcccatattgctcttccacgtgcaacaaaatacacaggagggaggggggaagcagaatttgagagaagatggggcattatagggtattaacccaaaaaggtacgacaaagaagacctggtccctgccttcctagggtcatctgtcctccctaaatcctggccctgaggggattcaagcaagtcagactctttccaatttctgtttgtaactacatcctgccagagtacccactgtacggcactgagttcgtgagatctgaattcaaattttgcccagaagttttcctaatgaacaggaaggagttcaaaatgaacattctatgcaacatgtcagaatgacaggattctgcactaaaagccagcaattgggacactgtgaggtggtttgtatttctctcaagtttcttttttctcacttagggtttctttttacaaaggaaaacagttgtacctaagatgtatatcttagagacagaggccagaagatcaatatgacaaaataaaccaaggccattctatacctgggattcctgctgagccaatgccctctccctcttttgtatgcccaccaatgctattgtatgtcaggaactcctgccaagtcagtgccaactctctctcttctgtgtgattacactggacccttgtcacaatcccacaagcaagcgggatcagaaatgtcattctgttttttcaaattaagaaacagattggagaggtctcaggctatctgtcaatggaataagaccctgggaccaacccatgtcaccctcttgcacttgtcactgaacaatcacagcaaagctacccatggactttacagattaaatcagggtttccatggcaggaagatggaggcagggagttctattccacatacaggaataacacctgaatattctcattttaaagtttatgcttattttcaccttctgtttatgagtgatttgcctgcatgtatgttaagtatagcacatgctgtagtactcacagaggtaagaagagggtttcagatcccctggaactagggttagatgtggttgtgatttgctgtgctgagcacttagtgctgagaactgaacctaggtcctctacaagagcatcaagagcttttaaccaccgagccagtgttccgtctctgcatttatattcttaaagcttgatttattatttccacgttgatctgatgagatttaatttcttcctgagaattgtaaataaaaagttaattgactgtggtcttgaaggtaacaagcagttgcttctctctgacttttcctgtcccatttatttcccaagtgacttttaattgaaaatggatatttaatattttctattgtcctaactcagattcttttttctttcttgtgatcttggagatggacactagggtcttatatggcaaacattcagccactgagttaatgccccagcctctaagctctgcatttgattgttaaaaatttctggttcttactaaggagccagaaagaggtgggggcaaaattttcatactctcctaagcattgggtggagcgcctgtatactatgcacttgcccaactttatctatggaggtgtaaacaaattaataacaacatagtcatgtcttcagagatcaggggatgctcttggacagtgagcctattagtcaaaaaagacaaaagagtctgtcttcactgtcctcctcttaatcttatgcaggctttataaagttggtgggctcagcgccatcatagcctattcttttttttttttttaccttaaggaaaggtgtaactggatgcaaggcttaaggcagtggggagtacctctcacgtgagactgtccttggtgtctactgattgcagcaaggtggcacatctccaaggtttgtgtgagcataggcacatgatctgttgactcactcttcatcttgtctccttgatgctcactgaggcattcttcaaagctcttcctccacttctaaattttccttctttttgtgtcattcaagttaagtgtgcactatccttgctagagcatccattttatacaagttatgagaaaccaacttaaatatctcctcagaatgaaagccaccagaaatctcttcttaaagctgttttgatgctaaatcactgggtcctctttgtaaagaagtagccagggctggagagattgtcctaacttaaggccctgctgctcttgcagagggacagcacccacatgagtggctcacaaccaattgtaactccagctgcagggaattgatggtctcttctggtcttcacaggcactcatatgcatatgaccacacaggtgtgtgtgtgtgtgtgtgtgtgtgtgtgtgtgtgtgtgtgtgtgtgtgacttaaaaataaaaagaaagtatctacttattgagcctagtccctgaccattatcaatgcaatatctccacaatatgtagtcacttgtaaaagagatacctggattaacatgatgagctcagggtagaagtcttcacaccattgcaatgacgcctagcactgctctgctgcaaacagactcctgactggccttgctggcagcttggagatgctaatcaatcattcctgcacctcttggctctcaactaatggggagatgacacacatatgacaaaggtatgacccttatatctagctagagaaatcccacctcattgaaaatgcaggctttggaatatgttgatagatatgagctaacttggccttgttttaaaagctgaccttgagagctacattcggaaaaaaactgagaccattatttcaacaaatatttttgaacacctactttgtgctgagttatgctagataccaaagaaatggaagaagttaagtcagataaaaccttggtccatataatgcaaagtccactaggaagcttagtagaagttaataagaacaatagatgactagagagatggcttagcaattaagagcacttcctgtacatgcagagaaccagagtttggttcccagaacacacattggtcagcataccacctgcaactccagatttgggggatcggacatcttctgttttccagtctgcatgagcgtgtgtgtgtgtgtgtgtgtgtgtgtgtgtgtgtgtgtgtgtgtgtgtgtgtgtgtgtgtgtgtaaagtaagtcttccaaagttaaatgagaaaaattagttgtttttatatatannnnnnnnnnnnnnnnnnnnnnnnnnnnnnnnnnnnnnnnnnnnnnnnnnnnnnnnnnnnnnnnnnnnnnnnnnnnnnnnnnnnnnnnnnnncatgtagctaatgcagggtgaaacttggggcaaaacacacacacacacacacacacacacacacacacactcacacaaataaaaacaaaataaaatttgtgttaaaagactaatataaaaaatagtcatggtaagagagattatcagagataattatcagagataaaagtcaaagaaggccttataagaatgtaacttctaattaaagataagtagaggagggtcatatctctctgcaagagctgcaaggagcctctgtgaattatgcagatataaagtgtacacactagagaagaaaggagagactgaaggtggcagagagtcaattgatgtggattgcaaaccttgacagaacctggggtctcgtttcaataggatggggcctcggtaagctaagcagaaaaacagcatgacctgttagattaggcattggctgggttcagtacagagaactgtcacaagaacacaagagtagatgttcttggttgagataggagattgcacaagttaattatagccagattcaggagccagaaccagtggcagaagaagggtccctgctctggtaacccatggcaccaacacccataggagaaattcatgaaagattctaaactagtcccaagattgcatgtgacactttctagctggatgggttcagctctcctaaggtggcaagaggttgagacaaaacccaggatgtcaacattgggtttgacatgtttgagatatccatccaagtgcacaagtcccaagaacccccctagtttaggtgtggagtggaaggagggactccaatgtgctgaggaaaatggaaagtacctctcagcacattcttaacacataaaagttaacaccaggaactataaatacaggagtgtaagacagaaccccaggagcttccacatttaaaaggtcaggaggaggaagaggagaagtagacagtaaactaaacagagtagccaccacgtgctgagaggttagtgggccataaggtttcctgaaagagaaaatttcagccagaaaagagtgaggattgctgctgatcgtgtgatacagtgagcagagttaggatttcacgttgaacattggatgcggcaaggttaataacattgatggctttgacaacaaagattttaggcaggcagcagctggattagaggcttgatggtcaaacggagagagctccttgctgctcaaagatgattctctgacctatagtatcagcatcttcagagaacttgttggaagctctggatctcaggcctcagtgcagacttgtggggtcagagactgcacttgatcaaatgcctaggtgtgctgcctatgcagaagcgatggagaagcctcagtagctatgttcttttcactggaaagagaagacgcacagaagagcagctgaagggagaaggggccaagagaagtgttttttgtgacagtggtggtgatggttgtgatggtggtggtgatgctgctggtgatagtactggtgatagtactggtgatagtactggtgataatactggtgatagtactggtgataatggtggtgctggtggtgataatgatgatttacgaaagaactgtgtttataagtagatgtttaatgtaacttttggcatattgtcaccagcaagacaaagaaagagatatgagccagccttaaaatgtttcttacataccgggtcctactcagtggccagctagtttacagccacctcatccagaagtcataaattgctcctccccattctggcccaaggaaaagcagtgggaattgctttctagggagtgctccctggagatgatctcacagctcagcttagatggtgggctttattttcttgcaggtttggagggtggccgagccttcttcaatgcagtcaaagaaggagacacggtgatatttgcaagtgatgatgaacaagatcgaattttgtgggtccaagctatgtacagggccactggccagtcgcacaaacctgttccccctacccaggtgcagaagctcaacgccaagggcggaaatgtgcctcagctggatgcccccatctcacaattttgtaagtacatatgccatttctttctttctttctttccttcttgctttcttttaaatagttctgtaaagtaagtcttccaaagttgaatgagaaaaattagttaattttatatataggatttgaaaatcagatttgctaggggcatgtagctaatgcagggtgaaacttggggcaaaatcttagatgaacgtaattttaaagtgcaatacttgagattctctaccaaggactaaacaaaggaatgtatattttatatctatgtctatcttttgattttgctgagagtttggaattcgcagccaaatgcatatttgtttgagtccctgaaatatagtagattccgtatatcggtgctccgtctcctcctattaaaaggaatttaaaaatagggatgatttgaaataaacttaaatctgcaatttagaaccatttaaaaataaatgatgacattatcacatgcagtgggaaaaaaaccccatgatacctaaaatcacattttgagcagagatatcagagacctgaaagcagccccagttcatctgcagtttccctctgcctctgtgtctccgtactctttgtattgccactttttgccccagatctcccaatacttccaaaattcaggatacagtgaaagccaaagctatattttttatttttagaaaagaaaaaaaaaagtaagagatctgcagattcattgtttactctgcacagagaccttcagctttgtctacagataactaaagtgtgtatccatccacggaactgtcatggtggtctcttattttagtaggaggttccctctttcagcataggttactgagcacttgtctagcaaggagacattaatgaggaagtcacacgagactctcttgctcttatggcttctccgtcccagtgaacattcaggttacccccaaatcagcctcccccaatgccaaccacttcacacactgacaaatagaacaaatataacaagctggcattagatcaagagggtattaggcacatagacaggcaaggaaggcttctcagaccttaagtccaaatgctagggctatgactcccagatctagaaggcatggatatgagagcagaggtctctgcaagaacagagagtccaaagcagaggctgcacttccctgggacgcttgctcatggctccactgttgctctagagccaaacccgagtgtatatgtagtgattttacagctatagaaactatagagggaaattacgttttcaatgagtcccattactgtgtatatttccatctggcaaaggtatggttttgggggggaaggaaaacccccagttccataccaatgatttcttaaaggaagatgtgttctttggttgaacctgacatacaactccatacagtagccttccacacagaaaactatgaaagaagacaaaatacatgaggctggaactagagtagagtggacagccctgcagtgactacccttgactgacataggatatccaatatttatttaatttctaaataaagagcatctgtgtgacaggtcccctgcccccctcacttcctgatagcctatagttagcacatctggaaaaggcattacccaccataccctcctgcattctctttgatgagaaaaatcctaattataatcaccattcaaatcaacttcatgaaagacctatttcaactgatatttggaaaattctcttctttccaaatggtctcctattctcccaagatcattccactttgcatctcgtgtctcttctgccatccacccacagtaagaaatggctgcttgacttgtgcttggccctacatttcttcactaatagaggaaagagaaaggacaaataggggtaaaagtgagtagagaaatggtgggagtgtccctcagtgatagagcatgtacttgaagcatgtcctcggattctagcatcacccccacaaagaaacttctaagacccatgatagaagctgttgaagagggatagcctttcatggaaatacatgaaggccacaggtagacaggatttatttcattcaacggaacgctctgtgagtcagacatgtaacaacgctatttgaaacatcttagatgggtcgtgcagcaaaatcctagaaggtagaattggaggataaggtcatccttgtagattatacaagctatgttgattatatcacaaagcaaatgtgatagcatgtgctataaaattatcagaacctcgggttgttcaccttctctagtgaccccttaaactctgcatggaagggaaggaccttcagagagtgtgaggtgccttcatagctacctggttctcaaaaaataaggctgccacatccagccattccaattacccactacaagaggctcctttctcacagacaataatatgaatggcgctcatttgattgtgcagtgcccagtcttcacagatgtacatcatgtccccatgactaatgcaacccagtaatactgatctccatgttcccactgttgctttgtttcatctgaagcagacgacccccccacggtgctttagactgtttattgcaaccacagtaccaccaggatacttctgttccccaaacttagaaaccagcagaggatgccagtgaagacgtaaacagctccttcagaccctgaacatttatggttaaggataaagaaacccacagaaagaccagaaaaggaaaccagggttctgcactcagtggtataacaaggcaattatgtctggcaagcacacagaaaaatatggctttaagtggggctcatgggtcttactggaacgtgctatagctctgtcacagtcacagctgcctatactgccttaaaccaaccctgtcgaacaggtcaaacactcgatataggaaacctgcccttatttgcctgaggcttccttacttgtagaaagcaagcccaataccccagaaacccctctgtacagggcaaactgaactacggttgtcactgagggcaacaaagcaggggaaaggaaggatcagtcccagtgaagttctaaatagcaaactttggtcatccacttctcatcacaagaactaatgaaagcacagattttctagctagaagcaaaaagggaaaggaagaaaaggttttaaaaggagagaaagaaaaagaaaatcaagtattgcattttaaaaaggtttccttaagttccaaaaggtcagggtcattgctacatactcgactgtgcacacacctaattaaatcttggttctgagtatttgttcaaagcacttaccattcttgccaggggatggtctcaatgacttttccatgacttcacttggtaattgctgcattagtttgtacacagatgacagaagctgcatagaaaaggaagccacataggaatgttttggggacggagggaaaaaaaaaataagaaacactccaatcttgtcctgtcgctgtcggttctgaggcatcctgggaactggacattctgcaggttgggagagctgagggtatctgtgattgggatgtttccaaattcagtttaactgacttttgggggaagttggcattttttttcaatgtcaaaagttcaatttcaaaatgaaaagacatgtctaaggaagaatggagtggagtatttatgtggaattggaaaaaaaactgggaaaatagatcctgctattcatttgtttgtgactgaagaggtctggggagggttccatcagccttgcaaaccttttgttcttctctggtttttatttgtatgtgtgctgttgatttaatttttccattttagttatttttttataagttggtacctagttccacaatttttgaacaaatacttgtaattctccattttctaaggccaatattgcacactttgaatatgtccaaatttggaattgagtattgccacagttcactgtgcagagtggctactcactgacatcttatccctgtctgtgagtattagagaaatcctacagagaaataatatagtgctcattttgtgtggggtgggaaaagaaggtatgttaagctttgccatttggtcaacgattgctgcatatagtgcttgcatttacttgttttattgtctatttctcaactaacaactgttaactacctcatgcaccccagagttggatgttgctgagaactgctctatttttatcactactgagataatcttcaacagttagagggattttgacgactgctggtttgggggaggttgatttttgttgttgttgttgtcgttttgtttcattttaagttttctcgttcaatctttgctcaaacccaagaactgtagctgctaggttagaactcctgtctgctttcctgagccttgttgctagtctttatgttattctggtttgttccttcttaccctgctaacttctagctggactgaagggtaagtgctcccccatagctagcacagctcagataatctgactcgattatctgacacctgcgatgtgcttcctctctccttttcaacctccctcatgtctagactttgtagtacaactctcgtgttctttccctggccttaggtttgaaacgtaagcttccatactgaagctaggatgcatgtcatgtgtgcataattgcctcctcttcttggctttcatattggcatcaaatgaacttttgagtaaagccaaccaggaacttctgatgtttttcattccaagaatattgattaatatcacaacgcaatggccagcaatgccactgtctcatggaatccacagttaactgactgctcgatgcctgaaaacagatcattttgcactttgacacaatgatgtgttgttgttgttgttgttggtcccctgccccattcaaaagatagaatggtcagctccgaatggtgtaaccatggatacgatacagtagcagatagaaagatgaggtaggaaatccactgatctcaactgagcaatatttggaatcaaaagctacaattaataaattatttgagccttagagaacgtattcaacttggcttactggtacatcctcaaataaaacccattgaggattgattttgaaagcagagctgtaaaacatagtccgtccacaacaatggcaagctaaagacatgaatgagtccatatgctctattcacaaaggtttttggtccaggatctcacagtgcccaggagggttttcagctctccgccattctgttcctcccccaggaacaatgacaacaataacttggtcaacttcatttgtatttctattaaattttctaaatataaacccctaagaaacagaaaatcaatactttaaaactttaggaaaagctttctctattctacttttaaccaaagagagtttacaatttccttattcatataggatcaagctgtctacatgaagtgtgttgcaagaagacgtaacattagagagagctagacaatttggtcaagagagcaggcaaatatgtatttgagttatctgaatgctaatttagaaaactgtaggtcataccattcctcctgatcatttaacagtagccttttcttactttttttttgttcggttgttttattttaatttgctttttctccctttctttctcttttattttgcatacatgtacccctggctagcagactgatgttttccaccactcccagaagattcttaacttttccttcttttgaatatctgatgaggcatcttagcagcttcctgtaggggagaagttagtgggaacgtaggactttgttctgctttggtttcggaatgagaagacggatgactagagggctgactggttctgttctgagtgaattgacatgtattttcacatgcattgctgtcctagtagattttctaatagtcatttgccttatttcttacagttttatttttgctacatcttctattgtcaacttgcaattgctacattgtaggaatgcaataccaaagaattattccaacagccatgtaatttgtatgaccccccccaccacactataaatcttactcttattgttaagactaaatggcttttaaaaggactctatagtaagtgaggtccaaatatttcaaaatatcataatccaatctaaagaaaataaattaaatgaagattcattcttattgactaatatttaacagattgttacctaatcacttgagtattatcatgtcagtaagatacattattaattggctatagaacatttatttctgtttatataggaagaaatataaaattaattaaaattaaatagttataagaggacaattcattgaaaatgtagtaattgcaatagggaaaattacaaaacatttgttattttggctttggattattgacaaaacaataatctctgttgtaatatgatttttactcaaagctactgtctttcaaagaactagaggaagtcagccctgaaataatgtccatgtttgcccttttgggcgttttgccgtggtggttttcaaatgccatgtgacctttggcctccaaagatgccatcttctcccagccattcacaatggagtgcttctagtcagagacaccaagaagtgaagccattcccaggcaagagatccacactgtacctcagggcagcaggcacgggagagccagtcttgtgctgtgcacagctcaggcagggcacaacattcccttgttccctgactataacaagaaagcacttctagaaagatgtgtaaacagccggctgccaccagtcattgtcagttcttgatgtcatgtcttctgatgaggctgacgactgtcattgttcgttactgtccagagcatacattcactccagtactgtcaagcagatatgacatgcacatttgccatataagaaagacacaaagtcaccttttaatttacagtttgagttcacagatgactttcgagttacattagctattcacttgcctccagcgcctatccagagcaacaagcatccggtgtgtgctccaaatttcagaaataaaacagctactgctgctttgtcgcagaatgagacacggagataaaagagccctcttagacaatttattagtaggctatcagaattatgtttagcagcataattctttctcattttcacataaagttccaaagcataacattacaaaataaagatattttttttacctttttttaatcccgaagctgttgtgataatagtggggggagaaattaaaaattagaaatttaaaaactactttatccattcaagcaaagtatatgtatttggtatacactctaaatgtacctaaaatatagttttctaaaagaagatcatataatatgctttctaataatagaaggtattatgaaaaactattacataattttctagtcatatcagctaaaaaaaaaaaaagacattagcaaccttgaactgctcccagacatcataaccacctaaggagcgacataaatgtcaggtagtctcctgggcactagtcacatgaatttcaataaaagagattaaatgaggatataaagtccataaaatgatagcactgtagaaaacagtattttttttaatttccttaaatgtcaaaccacagttgtttccagccacgctcaggtaaagttttgatgacgattcatctgatgagtatatatccgcttattgtaagcgtggattccgtcaccttgtctctgtgtatgagcaccaatgataggatttaagattcttaacatggtagaaatgccattcttaactttattcattaaagtataccttgaagtccatttctatcccataccacaaaggactttagacacccttacacaattaaacctcacaggtcagacgaccaagcatcatttgaaaggtgtggattccaccctagccatatagcctacataacccactttcagtatactacaaaccctcacagactaatgaacacttggagagaacttcctgaagccaagtctgggttgaagttaatactcaaagtctactaaatccgagatatctttaaattatttcacattaataatcacagcaacaaaggtggttaaaatgtatcaaccaaagcaagcagcattcaaaacagcactgggatttcacaaagcttcattgtcctcttgatgctattttgctcaacctaacattggaattcattttcattctctgacacacgcaggggaagtgaccccagtgtcctgagttcaggaagcgactctctagaactttcactctgagctgttttcctctggtgatgtcgacattggagttctcgctttctttaatctaccagttctcattgtttgcacaaagggaaagggagttgtttctcgtgctcagcgctgtaagagaccagactgggccagtgtaagaatgattacatggtgttgcttgggaagcacccacaagttctttgaaacagaattgacaacagctggaccactgcagtgttttattttaaaatagacaacatatgtaatgcatatggtcctagacatgtatggagacacaagcagacaatctgaatggtatccaaagacacctgcaactagaattctgtctccttctataagatttttccctaagaacacatgttcccacttttggatttgtgagatgccatctgaatccccatgtgtgtgtctccttaataaagctcatggggacctgcctaggatggaggtgtcagagtcattcgttcagttgatagccacctgctaagaatctggttcctgcagaggctaacaaggaaatagcagatcagggaatgctctcaaggagcagattacctgctcagagattctgctgtgtatattctgacaccagagaaattagaacatagccttgaaaagccaggccaagtataggaattggttatgtagggacagggcagagttatgaagtggagagacagggatgggctgatagcttcctaaaataatataagcaagcaagaagatatggcgcattagctataaatacagaggcatctttggctcacttatggctttgtaggcatatgaaatctgcccatttactcctagacaactactgagtgtttatatggcagatgcctttctggccagttattacatccagtcaacagttctatgacagggtctgtaaatactgaagacaatgaatcaatggaactttaaacatttggatataattcataccacacaactggtattccagttaatataaattctattctagcaccctgatgaactctctgctcttctaactaacagataaaccagagctcactctaagagtgttcctcagatcaaaaactagcagacactgagcctgggagatggctcagtgtatagagctgattgctgctaagcctaacaaccttggtttgatccccagaacccacatgatagaaggaaagacccaagagttggcttttaaattcaatatgctggccatggtaggaatttacacatgtgcacagagcacatggatgaactcacacaagatacaataaattattgaataaatgtaattttagaataaatagaaaacacttcctgaaaacatgggtttatttactttgatgaaataaacttaatattttaacaagtctgtaccaagtactctctgtgttctgggttctttgctggatacttggagtatagcagaagacagaaaaatcctagaatccctccttaaaactcagatgttttgagttgatacttcaggttagcactcccagctcatttttttttgttttgttttgttttttcttttcatagtataagcttggggaagcttttcaaactagtcccaagaatcaggcgccgtatacacattcttgagttataagaacaattaacataatgagcttacttctgagtagatggtaatgctatctttcttattagagctcactccattatgcaccatccctcatggataggtagacaaggattcgaaagatcactaaactgtagtccaagatagcagaaaagaaacagaaatgtcaactcatctgtcaaacatggaaactgaagcttagagataaacaatcccaccagcacatgactatttaaaaatggaggccagatgctgggaggatggcttaatcagtaaagtactggccgtgcaagcatgagaacctgagttcagatccccaggacacacagagaagcaagtcacatccagtaccttgaagatagtgatagcaagattcctgaggcatgctggctagccagtcttggtgactcagtgagctttggctttagtgagagaccttgtctatgtctggctgtctatgtccaggtctccctagaggaccaaactttctcttcagaccattttctgagtggccagaaaagcaaaacagatcaacagcaaaatgttcaagagactaaaacaactgaaaagtatgatgcttgaaacccatgccatcgttttaacagtttataaagtcaaaataagcaagattggaaaccatttaggaaggtaatccatgttaacctcctaccttcacatgcacacacactaaatgttaagctcaactccaagccacataaatcccagttctggatcattcttcatgtagacagaagaagagacatgaaggagggaaaagatgttttatttttatggttattgttgcaaagagaaaacttctgactttatttatattttttccataagccagcttcagactgtcagtagagaaggaagctatctctagatgtactctcagccaacatcagcaatcagcacagccagcaaagccctgtgacagcttagggacggggaggctgactgtgtccagacctccctagagggccaaaatgtctcttcagaccatttcctgaggggccagaaaagcaagacaggtcaacatcaaagtattctagaggctccaacaaataagaaacacaacatttgaaatccatgccatgcttagaagagcccccttctccacaagctgactgacttaggttgtactatcataattgaagagcagtgagttaactgagccaaactggcaaagtaaggtcctggccaacttgtcagctcacagcctttgctggataatccaagagcaagacactgaagctagccaagctgcccgatatatcattaaacttgagaggcggggagtgggtgtggctctccatgaggaagtaacaggtgagcaattcaagctctcctcatgctcactccttcctgaattgacctggtagtcacaggaaagatggtgagagcagtatctgtgacgggagatagaggagggcgacccaattgttgtaagggtctttctactggcaggggtccagaaagcagaagatacttccttgcctttggccacaagtagaacatccagaaaagcaagcttttcctgcagactttacggtcccaaagatcccaagcttagcaagcaaagcaaaggaaagccaaggccgtgcagcaggctcgatttcaaagcacttccccaaggatgagtctgagacaactaccatggcaagcttatagatcctcttatagatcctctaacagaatttctgcacaggtagtatcgcttcccaaagcctttgttttatcattttaatggacaatttgtctgttaaaatactattcttccacttgccttctagagacaatggttttgtatgtcttgggcataaacaacacatcataaccaaacactgaccactcactactcctatgcaaaatgccaaagattttaaaagtgtagaagctgacaagctgcacagttttgttcaaacgatagctgaagtcactgaaaactcatagtgttaaagtcccacagctaccaaaaaacaagctcacagcaataccctaagtgagggagagaaagaaaaaaaaacccttcctgggacagaggccacataggaaaatattattcaaacaccctctcaagtcagacatcaagtttcctttgccctgattgctccgctggctcctggcagctccctgcatcccgtaaaatgttgcattcgaagagatgagtaaaaccttgcttgattccctctgagattctaccttatcgtagttggatatctggagaggaaatgactcggtcaactgagcagatctctttatccttgaaaaatacccctgttcctaccttttgaggatttttttttcttagtggcacttgagctgaattctctgagttattttgccagctaaggatagactattttagttacacacgttgagattaattagttagcccttaggaggttttgcctacagtcttcaccctgtaaggaaaagtgtgaatacatggagactattaactcacaataactggcagaccgcagccctcacagcgtagtttctgtttactaatggagtatgtgccccacaggcaaagtccttgcctatccaacactaaacccacactaaacttattctcccagtttcaatgaaaatcttaaatttaaattaaaaaaaaaaacttttaattttggagggttgggaatcaaaccttttgtgacaccaaattggcaatgagaatttggaaggggatgacacaaatattgtcactctgctgaaaaccagcataagcctttccccagataattccaataagcacagagaaattactctaaacacaaccgctggaatggcagaatctattacgaactcaaaaacctagctagactgctatcagcaaagatccgatctgctttcagtgttcggtgagatgcaggcgaagttacggtctcatgcatggtttaaagagcaacacgaagcactggaattgtgatcatttgataaacatgttgatgccaatatatttttgcctaaatgcagtaaacttaccagtaagtgatgcaagttgacaatgggggcggggggtggggtcaaagactatctccggggtagcggggtggggcagcagggaggcagctgatgttcacaatgcctagtgaatcctgtgaatctgtaatgtcaaaaaaagcctgtgatgtgtttctctaaattgtgtctctctccacatgtgtaaatgaacagacgcagatagagctcagaagcatggcatggatgaatttatctcttccaacccctgtaactttgaccacgcttccctctttgagatggtgcagcggctgactttggatcacagacttaatgattcctattcttgcctggcaagtataccctttgatgtacagcaattgcagcgtgacattcctgaaaaacatcaaatacccctctacctttatgtcagaactctacccactccctacaaaacccctttaacaattataagcaagtctttaattttctgcatggcagaagttttatttactcaagagtcgatgtgagatggaggaagtgctcatgagagacatagccaattccccagccaccctatcttagccaccccatcttagctgctacgtgagaaatcttcctaaaaaagtggttgaacttggcacctgctcaaaatgaacttataaatattgcctgattgtaggtaccccaccctctttgtcctgtgcctgttattcctagctcattaagcaatacaatgcttttgtcacttctaaagatcgagacagttgctaatacactccactgccactgtaatggatttgggtttgtttatttgggtgacaccttctctgttatactcagaatcatgtttacccttgaggaaaaaattttaaaggtgcagtaggcatttagaagctcagctacccagcagggttttttacataccctgaaatctcattttaaaccctcagtcaaattagttcagtttaaagactgctgttacatatttatccaatttttgaaaacacatttttggtttacaactatcaagccccaaactatgacaaagattcagctcatttctgttttcagattctaaatgatgaatttatttaagcgtaaatattacttactaatcctactttgtagacagaaaagaaggagggagatgatcaaatgattttatgcagagagcagttcttctccttgacttcaaacatgaaagttaatatatttatgtaacattaatattatataattaactgacattagcataaacccttattctgaatgattattttaagttccccttttttgctgcttgaagataatgtgtgttttttaaagaggttaaaatcatcttaaaatagaagtgggattctgtaagataatttattaatctatggctcacagtgacacattatctcatttagaatctcgtcattggagactcttactttgccaagttggaaaggaacaccacactgacttgaaaaacaaaaacaaatcaaacaaataaaacaaaacaccttaccttgcattgcaagtccatttttctcagatttcctactattgtgtatctctaattacatttatgaccgtcgtgaggtgtgcctcagcactgccaccctttcagcaggaactcttctcacgtgatgaacactgtgagacatgtttacactttgagacggtttcaccttttatgacttttgttcacgtcagtgtttgaaaacaattttttttcattctgaaatttaccacgaaggagaattaatatatgccctctaaagatataaccggagatgacagactgatgcctgttccccattaatcactatacgcttaactacatagtccaaatttaaaaataataattatgagtgacccagaacaactccctttcctgattatatacctggatctattaattaaggccagagtttcagaaaataacagaaatgtaaagggccttatcccctatctctctattccatttttctcattagtacagtcttttttttttcagttggttttggagaccgaccagcagggatacataaatttttctgtgtcttcgactcagttcctaattgatatttcttcaactcttttcaaagcagctattttggcatctacaaaagacttggtgtcatctgagtcgtagaaaatatattttaatctttcacagcagtgttgtctctaagatttagcatttggggtagcagatggagtggcaaagaagttgcctataggggcagcccactgcctcaactactctcccgccctctggaggaacttataatttgaaataggaaagatgccgtctttcgttggatgcatcgctgagctgcacgttgccagttgaagatccccagatcctaatacaagatgagagccttgcaaagccctcccttccagactcctttggcctctccctgttccacatcactgactccctcatcccttcgatccaagctgcagtaatattaaaaaaaaaaaacaaacaaacctcataggagaccctcaaagaaaaatgaagtttgttaaaaagagcccaaatgtccaatctagaaactgccacctggactgatttattgcttgcttcaggtagtatggaaatgagacaacatggtttgattttagactctatccatactgaccctcaatgccaagtcacttggccttgctagggacctgtctttccagttacataagagagacacgggtttctatccatcacgatgctgaattactatcagagactccatctggattctcttttgcagcaaggtttggctggtctcatggtgagcaaatataaacaggaaaacaaataattgcagggggtagggtgggactatagatgcagtcctgagaaatctctctcttttgttcaattgaatccgaggcaacttacttactctagccatttagatgctatgttattaccttcatttcaaaatgcactgaaaatttcttctaaggtgtaatgatttacaaagtttagtctatgtgtaaaccagcttaaatttcctttatgcctgaagatagggaaacagacggacccagagtagaagctgggctgggtctggtgtgaatagcaggttccttacccagactctgtgccagtcctgtctacctcacgggcttactagaaggctcagctgaaagctatttgtcaagcacaagttgtctaccaactgaaggcatttgtatcccatttttcccttgccagactctgccccagcttcaccccctatagtacatgtcagagccctgcttgttctcttttcctagaagcatgctgcttgctgatacagctctaccaattgtgttgatatcccatggcatccctgagctcagttaatttacccacctgcaatcaaaagagttaacactggctgtttatcagtcccttcctctagccactcttgatactagcacctctccaaaaagcaacatttaaaagaaagtctctcctttatttccctacagggctggttcagtcctggccaggtgtttgtgttagatgagtattgcgccagaaatggagtccgaggatgtcaccggcatctctgctaccttagagacttgctggaacgagcagaaaatggcgcgatgattgaccccacgcttcttcactacagctttgccttctgcgcgtcccatgtccatggtaacaggtaagcatgggtctagcggtattcctaaaggataaaaaagaaacttccagtggtttgtaactagttctgcctgaaagagtgaccctaactcacaatatatccctatttacccagtagtgcacaaacagactggaggaggggaggaactacacatggggtgggtgggagagaggagagaggcatgctaaactaatttcctttccttagacaactgtgaagaaataccaaacagcccttctaggggagccccgagttaaatcagtctgggtagcaatcattatccgtggtgggctttggttttgtatttgctttttccttttttgtttttttaatcggtgaccttggttggtaattaaattctcaaaattacagttttctggtctataaaatgggaatgacagttttctcatggagttgagaggctacttgtgaacacacatatatatgtgtgtatatatgtgtgtgtgtgtgtgtgtgtgtgtgtgtgtgtatatatatatatatatatatatatatatatatatatataccctcagcccaacttggcaagaaactgatcgctattttgcctttgttgatactaccgttcatttcaggagtgtttgatggttgcttgcattttgtgtacgtgatgaaaaataaaaaccatgggagaagtcgggcgtggtggcgcaagcctttaatcccagcactcaagaggcagaggcaggcagatttctgagtttgaggccagcctggtctacagagtgagttccaggacagccagggctacacagagaaaccctgtcttgaaaaaaaaccaccaccaccaccaccaacaacaacaacaacaaaacataatagggaagatacattaagaaaaggaattcaattctgggtagaactcaataagaagcatgactcggatagtgcggcagagcagcagcagggggctgaggaaatggtgctggagccgagaactgactcgtggaggctctaggcaaaaggaacagcatgtactactgtcctgtgaaaacggaagccaagcacattgctagagctaaagcaagataggtaaagctggcagtcaagatgccaggaacactgaatatatcctcagaagtgggaagaactttggcgatcacaagctaaccaactccctcactttgtaggtttcacaaacaagaccagaatgtcaagtctcctgactctgtactaagtattctatttctttagaccttgcccagctcctgaaggggaaaaaaaatctatgttctgaataatgcaaagaagcaaataatttaagaacattgccatttggctctagaggcatggaataaatttccacgctgccacagccagcttaccatctcaatgtatgtagccacacgttagtataaagataagtctacgatattccaaagcacccctgccaacagccaggggaggcagcagaagacagctgggtggctttggaaaacaagcctcagatgagcaagttgtcactcgggagaaatccacgtcagggaagaagccagtccaggctacctggctttgaagctagggttgtgtcagccttcctcatctttgcaagccacacggtcctggaatatctatggaatttgttctgtgcttttcctgtctctagtactgatagacttttatgaaatgagactctatcatttatagctaggtagtaataacactgtagctttgaatattttaacagaaaataagattattctcatctcctattgttatggctccatagtccaacacatgaccttttattcgcataaaagatactcataaagactgtgatacctgggttgaagcatgcctaatttgcacttttataaatatgtacactttgatgattatctgttacagcctcttggactgaatttttatagagggtgagagagagagagagagagagagagagagagagagagagggagagagagaagttgcattatattctcttggttgtcacactgtattctacatatgttactgaataggaaagtgttataaaataatgaaatgtttttgtaaactccctcgtaaacatcatcatgaattatgatacacattgtctgggtttcatattgtaagactgccacttgattcacagttaggtttatacatcttgtcgtgggaacagtttgggatttcttatttccttttcagttttgattttccttatgcattttgcatcttttttttgcttattactttagcttgaatgcatttgcctttgctttttgatgcatccttctttttctttctttttgtttgcgcatgtgtgtgctcttggttttcctatggttggccaccctctatgcatgcctcctgccaccacaccctctccaaagtcaacaaatgcatgtgtatcttagtgggctgctatcaaacacagactttcaagggggcaaatctccaccttctcctgaaccagagattaaaaaagattcacgaagagaatcaaaaaaaagaaaagagtctaaacctcacccaagtcaagaacaaaaaaggtaagaagccatttgtgttagcttttgttttcagcccctttgacctgtccctgcatgcatgctaccatgtccatgtctgcaaacaacagctttgtgaatcccctaaatctgaatccttttccaaacatgcagtttttcataaaagatcttaaaaatgggaaaatgtgcattgggactaagtttgagccaggtgtttggtgtttgtattggaaagactgacctagcaataagcaaacagaagtgagtcagattgttttaggtggtgttgttgtgttttgttcttttgttttgtcttcatgtctagttttagtctgatgtcttacaagtcatttgtaattaaaaaaaaaaaggtatgcttggtaattttaaactaatgttcaagaggcaaataagatgggttaactgatgttagataagataggcccatacatttattatggatctaatttcttaagcaaatcttcctaattttcacactcatctgtttagaagaaacccagctgaaacagtgaattatgataaagcacaaagtaagcccatcactaaaccaacggctactagtagaaaaacaatgagatcatctttaaggcatgaagttctaagcttctgtctaccttatcctgtgttgaccgtcagcaatgctctcctctttcactggaaaattggtgccttcccccttagacttcctttattcactcttttcattctcttcttatttatattcttcctctgtctttgcctgcaattctggacagacttgtccaaatagatggtcataggcaaggatcctgtatgctttaatgttcatttatctactggccatttctaagccttgtgtatgcagtgaacttacagaagcttcaagtgcacctgggaaattctgctcactggagaatgaagcaggctgtcccttatagtaggcagagctattagtgagcatgcagagaactcccagaaccaccgagtcaccccctccctcctggcactgaatatggctgatggtgaggcagagttcctgcttgtgttttgctctgctgtccatatccacctgcaagaaaacagaaacttccagtcaggatcaagaagccactgtggaagctgtccagagtgctgcttttcgacctagcatcatccacacagagcagagcaagtcgtttctgttgaaaggcagctcccactggactgtggcccatttcctagcatataaagagctatgcaatggagctttcctacccaatgggagctttcctgtgtatttgacgggattaagcatggtgagttttccctccagaagacttttggtgaggtctggagatatttctgattggcgtgggggtggtattaaatacccagtaacattcaggcccaaatgccagtggcattgaggtacaggagtctcgtgttaaataatgttcccaaatgatgggctgatatgtttcccccttggatttgttgttgtttcttttacgtcgatgctgtacctatgtgttgctctgcaaaagcagcagtcttccccctctagggttcacatgagtcacatggaagagtctaataaaatatagagcatgtgttcctaccctcaaataattcagcagttcttacatggagccagaaagcttcttctaatatactctcatccgtgattctgacttcagaacacatctagccaagatcttggttgtttcattactgtatgtttgaaccacttgtggtaaggaaatgaaaataattctgattcctgaaccccatttgcagccaaaagccctctggggaatttttacctgaaccattaaagtttaataaggagataattaagcacgaggaataaaagaactcaagtgattctaatacatatcaaactttgagagtaattgaatgaatattagtttgggccaactctttataactaagcccattttctcaaaagagagagagagagagcaaactaaaggaaaatgtgaacatgttcagctggttgcatttggcgatcacaaaatccacagatgtaaattgctatatcttctcatttttaaatcagctcctaaggttgcagtacttaattttcaccataatatttttagtattctttctagatgacatttagattagcatcactttggtcactgtcccacagtgacaaggcaatcaaacagctccgacgattgcaagttgcgtcaatgttccttggatccctttattattgagattggaaatttttctcatttacattattatttaacatttcttgaatgccactgctgcttttcacatatggcctgcatagaaagtacattgtatcagcaattaacaaatccataatgccaaacgcctcaatccacagctcgctgcatagattaatgagtctgcagtcagatgtaagagggcatgaattctaaaacatctctgaaaatgtgtccaaagatcatctggggagatgtgctcgaagtcaaggttctgttcatcttcacagcccatgtgcatcctgtgggttcggatttgaactcattcttctccattcatccagcagggtccctagatcatccacccacttgcccaagacagaagctgagcagccatgccatgaactcccccttccttcatagcatgtgacaaatcaattcctggctctaccaatgctcttaagtttatctcaggtatttccatttctgtcattgattgaagccactactatagtcgaagtctctgtcttctctcccagggactgaacacttggcttatttatggtgtctttgcctcattcagttagtgtcatatggtggttattttattttgttttgctttgctttattttgttctgagttacatatttttttctttctttcaaccatatctctacctcttcatacacacacacacacacacacacacacacaattatgtttagtatattttatctcccccccccaaaaaaaaaacagtatcgcactaagtgggtatagatttgccttacagagaactctgaaaacagtgctttatgcagcaaacaagtatggatagagtctaacagtgaaatgtattcttggtctcatgttacagagagaaatgatacttttatgaacatgtcactggattgcatctagctctgtacaggtattggccttgtgcaaggatgaagcatccttatgttctaaacaccagactcacctaactggaagtgatcataagagagagagggtaaattacaaacaagtttcaaaagaaagtaagcatctcccacagctaaagaaaaatttcctttggacttgtcaccttcattaaaaccattcgactatcttcctggaggaagcttgcttccataggaatagcatgaagtcttgagaaatctgtgtagttggtagttcttacctaaaattccacagtgtgaccttaccctggagtcactgaagctatttgtacaaactatttgcagatttcacacactttgagcatgtatgtgatacaatttttaaaaaaacaacaacaagccgggcatggtggcacacgcctttaatcccagcacttgggaggcagaggcaggagggtttctgagtttgaggccagcctggtctacagagtgagttccaggacagccagggctacacagagaaaccctgtctcggaaaacaaaaacaaacaaacaaacaaacaaacaaagcagcagcagcaacaacaacaaaacctcacatacattactgttgtgaccagtccaaagtctaacgtagggtctccaatgtcaaatccaaatccatagcttctcagtcttcatcaatctgctcctattcctccaaggggagaatctatgaagttctggtccttttcttggtgaaacacatgctcttctatatcttgcgttatttcttcaatcatctttgagttctttgctcatccaacacccagatccaatgtgagccttccttactattgccgacattctaatagcatctatattcctggtgacggttcagtggggaaagcttcttcaccactcccatgcttaaaatagcttctatattgttgagtcataacttcagatgagacaggctgcaagcaagtcataaaagagccccttggaatagtgccctcttcaatactactctttttgaaattgcctattagccaacctaagaagttacaatgcccacttgtaattgtgtagaaactacttgtttttcttcctgttttgccatttgtgacacaaacatttttatatatttgttttagcagcatatctgagccccagggcatcagggcataattagaaaagggcatgagctgggagggaaggagtgggaaggggtaaggctggctttcataagtaagcagaggctatgggatatgaggggcctaattataaattataattaagctaggattataaaaagccatccagggagcaagcagggggacaggagtggctgcttttagagactgctggtggtttgaggctatcttgaatttatatctattaactgcccaaaagaaacaaaggaaaatactccacaatccaatcaaattttggggtaacatctaaaaattataaaaatgaagagtgccagatattacaaatatatttttaagtcaaaatttatcagagtatctgatgtaattgtcctatttagggagccttgcaaggaatgccaaacacactctgtcctgctctgttcctttaaatgctcatgtttctaggctggaacaatttagtagcaagtaagattcagttatcatgcttgtttaaggacattttcatggatccataatgcggtctgcaggcatgcatccatttggagagaaagattatatcgtgtttacagtgcctgtaccagcatatgtggacatttgcatttggagatgaagtatattccttcttcagcgggagttttaccccttgttggtactgattggaggctgaaagcttgttgtatgcagagctgtggagcaggcgctctttcctcttctggtgaattcatatgtttctctttacacctggatttggcacttaatcaccaaatcacatcaatcattgtatgctttggattaacttttcatcctgacgttttggaaaaaggcaccttacttttgaaaggttttgcaatccagatttccacatgctgaatagagccatgccctggggataattaaatgctagtaatctgggtgcttaccagagtggacggggacagtttagctaataggggggtcagtcaattaccaagatggttttacattacaagcccagtacatgcaattaatgaataattaattctccaggagatatcaattaatcatctttagcttggaaacaccatggtaaggggagagagtttatataactgatagcccaaaagattaatgctgggtttgatagctttgatttgataaaaaatgaaataggaaaaagagattgatgtgactctggatgtattattatttgtgacatggctcaagatgggagaccgtgaggagagtagagatgacagaactggtgctaaccacagtgataaggacttgaagagcagccgacatgacatctttcctatcatgctgctgagaatgtcagctttgtgaaggacagtgagaaaatggtttgccaaaaacttgaaaggtggattccggagatgccagccatgtcagatgcaatatagtctgctgtggctgcagaaacccacttctggctccagtgatggcctgcaggtgggagagcttctgatcttcggcaaggctccaaaaatgactacacttgacctgcatattgtctcacgtttccgggatcatgatatacaagaagtgaagctagccagtgtgcagttaggtggaatcagaggccaggggctctctctctctctctctctctctctctctctctctctctctctctctctgtgtgtgtgtgtgtgtgtgtgtgtgtgtgtgtgtgtgtgcatacaagtctgtgtacaagtgtgtgttcctaaagcatcgtttacaagcttccgagcttctgtttaaacctgatgtgtggggaaggagggaatgtatcttccgtgaaattacaatgtatgatcatcaagtaagctctgatgtagagaacacacagaatagaaaagaaaagggaatcaagaaagctaaagaagagtaggaaccaggtcagagcctgggctctgcatttgaatcacctgtgagctcccaacatgcccctctaagcccccactacacaaggctgatcacagctatcaggagaagtggtaatcgagatgaagaattcctagcctatgaaaactgtggtcatgacccaactgctgagatcagtacatgccatctgcttcttctcaatctgccctgctcatttaccattgagatttcagagaggatctgagctgaagagtccagctgagacatgcagtggctgagaaatgtaggtgctgccttcaaggaaacccttcagcattaataatggggtagtaaatacatctatttttctttcccccaagtctagagcagttagtgagcagtagatacctaagaagccagaacctaggctctgaggtagaggatatacagtcatgcataaaaaaggggacagccagtttcctggacatgcatcccatccagatgaagatacatcccagcctgggactttttaattaaaaacttagaaatctttccttttctcttcttctttgtgattcacaaagtcttaaatattgagaaaggaaaaaagacactgagctatattatgaaaattaaagaacactctccatgtttccgggggggggagtataaaagtctgtcctttgtgacacattagccccttgtgtgtctcctgtcaaggggttgctgggatggctcagccaatgaagcacactttgcaaacagaggtgggctagcactgggaaacaggagacagagcaattccctggggcttgattgctggccaaccagtccaagtaaactgacaaactgcaggtccagggaaaactctccatctcaaaggataaagtggacaacactgaggatcacccccaactcaaatccatcagccaaataccaaaagccatgtaccaagataaaagtatcctttcagacattggaagagcctccactgaggttctgtgtttgtatttgttactaaacacagacagacagaccgatgatagatagatagatagatagatagatagatagatagatagatagatagattcttagcatatgattcccaaaccagtggcaccacagaacccactgggtatactcagactcattctagacctattatttcaagaattctggatgaatccatgtaatccaggtttctgcaaggcttccaagtgatgttgaggcatagtcaaatttgaggactgctaaaagcatatattgcttctatagaaaacataactcctagatcaacaatatggcttaatgaaccaaagtgttcacctcaaatatgacaacccgagttcaatcccatgaaccaacagtagaaggtgggaacccacagaactgactctcagaaattatcttctgaccttcacatgcccatctctgagcatgccacctgtgcagtcgttaccactgaactatgcaagtcaatggaaaagaaaatggtatcccgcagagctaaatataaactaaagtgacttcttatctaatgttaagcttgtgatctttattgagctgaaaaccaatggatatttcaccaagtttgccaataccctaagaatacaaatatggcagtttataaatgagagagagggagagaaagagagagaggaatgggaagggaagggaagggaagggaagggaagggaagggaagggaagggaagggaagggaagggaaaggaaaggaaaggaaaggaaaggaaaggaaaggaaaggaaaggaaaggaaaggaaaggaaaggaaaggaaaggaaaggaaaggaaaggaaaggaaaggaaaggaaaggaaagggggagggagaaagaaagagaaaggaaggnnnnnnnnnnnnnnnnnnnnaaggaaggaaggaaggaaggaaggaagaaggtttggatttgctgtcaagacattgcattgtcttaacacctgattttgcaggtaaactctcaaagagagcttttcagacttaatgaggttcatttgctttgtttatgttaaaagtgaaactgttcacactagcattccgtgattaagaagcaaattaaagtgactataacaataaacatttacttggctggtgttcctgtggaggggccaggaagtaggagccctctgattctcttactatgcatcaccagaacagcaggtaggaggcaaagcagtttccatttgtggtagtgcccttcatcccaagaattagctaagaaggtgaaacacatcttatcattcagttttctatcatttcagcctcaagcaaaaatactgagtccaagaaggtttcttgggcaaaagatgacttgattcacagacaggcttatctcaggaccgaagacttatagctggggatgtacctcagtagtagaataattcccaagcaagcatgaggccctgctcagtcctcagcaccagagagagaattatacacacacacacacgcacgcacacgcacacacacacacacacacacacacaccgtgcgtgcgtgcgtgcatgtgtgtgtaaataaatcaccaaaaatgacaaacatctctgggatgtgcgctcataatttcaaatcttctagacagatgccaaagatcaagtcacaaggtttgttttgaaaatgttttgtaagaaatgtccctatttcggtcctcaaatcccaagataaacttgtcagcccccacagaatgcctattaggctgttcttgataatgttacatattgattcggttagaagtttaaatttccttcagttctggctgttgaatcttgtttacttcaaaaataacttactaaagtgtgatcggcatgtacacccactttttgattgtgcattaaatctattagattaaattgtagattaaatctattagattaaattagatctaaactaatagatttaatacacaattagcagagaagcccacagatactttcattactctgaacattttttacaaactgagtgattcaataatgagtgaaacagatgcttatatggtacctaatttttgtaggaattttcataactgaagagttccaaacccagagctagtgtggcaggtaatacaagctagagatatgatcaggtaaatagcacctcaggttagaaaaaaaggtgttggttgataactaccaactaatgttctgaatttccaaaagaggccagaaacccaaactacattgtaaaacttccctaatttaaaaaatgatgaaagggctggagagatggctcagtcagcaaagtgtttcctgcactggaccggttttgtccccagaacctgcatttaaaagcaaggtgtaggaatgagcagctgttctcccaagcactggggaatcagagatggaggagccttgctaaccagcaagcttctgactcagtgagaaatgctgtctaaacaattgaggtagagagcaattgggaaaaatacctgctatttgatctctggcaggcataaacatgcatgtgcgtgtttatgcacaggcatacacacatgcacacatgcacacagtagtggtacttcttcagatattttaagaatctatgaccagcaaaatcttgctagtgtttgcaatggtgtcagcgtttggaggctgattatggaatggatccctggatatggcagtctctaaatggtccatccttttgtctcagctccaaactttgtctctgtaactccttcccatgggtgttttgttcccaattctaagaaggggcaaagtgtccacactttggtcttcattcttcttgagtttcatgtgttttgcaaattgtaacttttatcttgggtattctaagtttctgggctactagccacttatcagtgagtacatatcatttgagttattttgtgattgggttacctcactcaggataatgccctccaagtccaaccatttgcctaggaatgtcataaattcattctttttaatagctgagtagtactccattgtgtaaatgtaccacattttttgtatccattcctctgttgaggggcatctgggttctttccagcttctggctattaaaaataaggatgctatgaacatagtggagcatgtttctttcttactagttggaacatcttctggatatatgcccaggagaggtattgcaggatcctccggtagtaccatgtccaattttctgaggaactgccagactgatttccagagtggttctacaagcttgcaatcccaccaacaatggaggagtgtccctctttctccactgtctcttgtgagacctgtgagactacgccggggcctagcaaacacagaagtagatgctcacagtcagctattggatggattacagggcccccaatggaggagctagagaaagtacccaaggaggtaaagggatctgcaaccctataggtggaacaacattatgaactaaccagtaccccggagctcttgactctagctgcatatgtatcaaaagatggcctagtcggccatcactggaaagagaggccctttggacttgcaaactttatatgccccagtacaggggaatgccagggccaaaaagtgggagtgggtgggtagggaattggggggggagagtatgggggacttttgggatagcgttggaaatgtaaatgaggaaaatacctaataaaaaaaagaaaaaaaaatctgagaaaatgttcagttgtctgaattcccatatagaaaaatgtaactgaaatgcgtgcctctgagagatacagctacaactactcagacttgatgataaatacagtctgaaatcaaatgtaactgtcaaagatattaagagatttaaaaatggataatgttttgcatgacaataaaattttggctagatgcaaaaaaaaaatttatgaccaatcagaaccagtggaacttaacctgtgagcagtttcactatctcacaagaacacgatccggttctatgctaaccccgaccaccttccacttgagcatctccccccacctccagccctgcacagcagggcttctgtggtcacagccatcatcatgctttttgccattaaggcagacagtttcctcctggtagagatttgatttggtggtgtcagcatatgaggttcccgtcactttacaacgtgtcttctttcaggcctgatggaatcggaactgtgactgttgaagaaaaagaacgctttgaagaaatcaaagagagactccgagttctgctggaaaatcaaattacacatttcaggtaagaatttaggtttaggggcctactgggttgagaacaaagctgcacaaaaaggctttgtttccccaaaactctaagtctagcagagacacataagatcattaaagcaaaatagctaaaggaagaggaagaaaaccaaccagttggctccagctctcatttgctacctgactttgtgttctttgtttgtctggtgtttgttaaggaagagtctaaaataggccaggctgtcctcaaattctctatgtacccaaaggttatcttgaagtcataatactacaaactctacaacttgaatactgggactataggtgtgtaccaacacataccagatttcatgctgtgctaggaattgaacacaggacttcagaaacgctaagaaaggcattctaccaactgaggtgtaatcccagctctggatttcaaattcaagagtgcattttagttgcttaaagaacaaagctttcgatggaccatctagagactgccatatccagggatccaccccataatcagcttccaaatgctgacactattgcatacactagcaagattttgctgaaaggacccagatatagctgtctcttgtgagactatgccggggcctagcaaacacagaagtggatgctcacagtcagctagtggatggatcacagggctcccaatggaggagctagagaaagtagccaaggagctaaagggctctgcaaccgtataggtggaacgacattatgaactaaccagtaccccagagctcttgactctagctgcatatgtatcaaaagatggcctagtcggccatcactggaaagagaggcccattggacaggcaaactttatatgccccagtacaggggaacgccagggccaaaaaaaatgggaatgggtgggtagggaagtggggggggggtatggtggacttttgggatagcattggaaatgtaattgaggaaaatacgtaataaaaaaatatttaaaaaaaagaagaacaaagctttcctcatgtgttctgactgataattcatgtcatataaaaagttgaagaatctttaaggttcctagataaaacagtttttaaaatcctacaatttgagtcagaatgaatgtggacaaaattaatggcatacataaatcatcctttctcccctcctactagctgtacataaaatagtggaaatttaggtgagccctgttggggcttgggatggaaacttgacatgcaggagcagcagcagcagcagcagcagatcacacactggaccttcacactatgcaatccacttcacctgtagagcatatggcacgtttctaatactataatgttggcttcacacatagactctgaggcagtaactccaagtgaggaagtgtgatcctaatggttcccatatactagttacagggttggaggctggaaaggtactgacttttgttttgaatctataaacaactgtgtaaaacaggtaacctccagttaaacaatgggcaaaatgaggctgggggagattccagaaagtgctcctggctgcccactgtagactgagtttaagcagcccatcccattctctacacttttgagaagtgttttgaagggctcttggccaccagagccattgatggcacctgtagcagtaagtgacatgcttctgactgtgctactggaattctccttatggaataagatttgatgatggtcctttaactgaccatacattatagcaaaacgtatcaccaatagaggaaaagatccagtaacagtgaaaaaatcctaagcaaattaggcagagtcaggaacttatcccaaatgcatgcctgcttcatgcttcaacccttcagggacctaaagaagtgtgtttgcattccagctggtttaactcctagttttccatgctgtcccctactctaacacatgaggtcatgtttttgctaactagtgttttccctcacaatggaaatccaagctgagctctgtgtcaccactctcaatattctgttctgttgcagacatttacagagttcctctacagtcattattcacacatatacatatatacgttatatatacatatatggtgtgaactaggattagcataacacagtgtgacaaaataaaaagcattttccattcctcggtataagttgctataggaatcaaactgcagcatgctttctgtgaaaatgtaatggtgtgggcaacctgagccttgcattttttctaggtactgctttccatttggtcgacctgaaggtgctttgaaagctactctctcactcttggaacgggtaagaatgaacgtgagacaagtaaagggacttgcaagttattacaatcaaacagtacagttggacgaccgagtcagtaattttcaaagggtttgtttaccactcatgaagtaccagaataaaagtgaggaaactgccaatattttggaagttttgttttcagatttccaactagttatattcaaatgtcactcggggcccttctctgatgcctgcacaagctttgtcaccgcagctgctctgtggttttctttctacctactgttatcatattagtcagcattaatggttttacacctgaggtctttggaaagcagaaatgagtaacacattgatttagaacttaatagtcccctttccttctgcttgaaggttttgatgaaagatattgtcactccagtaccacaagaagaggtcaaaactgtcatccgtaaatgcctagagcaggctgctctagtcaactactcacgcctatctgagtatgccaaaattgaaggtaagacttctatctgtcacttgttttgaatttgtattttgatatgcctccctgggaaaatctatctcttttcttaatggacaccagaaaacagcggtccatctgactacgttagactaaatatacttcaactgtggaaaatgccttggtcgtggccaaataaatagaagaaatctcagaagacagcctttagaggaaaaccaacaataaatgtggggcgttatgtagtaaccaggatccttctgagagtttgtgttgccctcagatattttctctaaggatgatgttaacctatgaaagagctgggatgcattgttaccttctttaagtagagaaaaaggaagctgtctgctgtctgttgccagtagtattggaagtaaaacaagagttgaagaatgcaatattcaggttctatttaactctttctgatgccttggaagtcttttgtctttagggaacatttcaaatttggtgacagcatagtgtggagccagcttcaggggctccaagttgactctggacttctttcttgtttccagggatgtagcaggtgcattgctcctgccatctcaaatgtcagggaaacagacattgatgactacataattagaaggcactttgagtaaattcaagaagctatggttctttaggacctattcactctcaaaggcattaatcacttttcattgttacccctgttggctgctatagggtgatttgaaaaccacacccaacttgaccagaggtgtaagtgtattcatgtggaagttctgtgtgcaagacttgatgtgtccacactctggaatctcatgttctctcacacacaaaacacatgacatccaaataaagcaagcaaaggcacactgtccaccttgggccatcagtgaggggaacacctgactagcatacacacgccatcacatatactgccaatgtcctgtttccttagaaaattagctgacaatcatgttaaattcccaatgttctgtacattacatgtcttcctcccctctcgattttgtctgtgtgacaatgcaaattgtgtaccagtggtaatgagttcattgttatgcatcgagggagaaacacttaagaattgggcactagaagggtgtttaccaactctagatttggtaataagtgacaaaaagagaggaacgagaagatcaatgattaaagggctttattaacaaataattgttccagcattcccagcccaggacataatggttggttggattgggtaaagtcaaccatgtaattactaatccgaaagccagagatgggataggatcacgaaatgaaatgttcagtttccacaactgctgcctcatgggtcttggtccagctattactagtcttttggtaagatctgctctcttctttcagataagtaaatttaaaaaataaataaaaacaaaaaacaaaaaactttgcgatctgtaagtaaaaatgcattcatttctgaagtagatcagctggtctgtagtctccttctgtgcctcaattcttcttggttgtgttaattatcttttgcactgtgacttttaggtctggggattctttgaagaaaccaatctttttattccaactctcttttcagagaagtacctcattccacactacttgctctcttctgcttttctccttccttgtccgtgattggctcagccactttttgacacaacctctgcaaaagtggctgagacgccaatttcaaagcatgctgggattgttaattcagacaaccccacattctctggctgcatgtgtcaggttttcttccatgaacatagtccactgtaggctgggatattgcagcttcaaagatattactaccagacagctttctttgaaaaaggctcaggtcctaccctcagaaaagaaatgcttttttgtttgtttttttgtttgtttctttgtttgtttgtttgtttgtttttacacttgagcctctctgaacattatccatctgagaattttggaaagaagttgtagtaatattgctgggagactatgtttatgaagaaatacctcaagagccttagatactaaagtctgaaatccttagtatcttggagccttaaaccaatgaaattctgtttctctctacccatgatgttttttggtcattgtattcttgccaacaactctaaagagatgtgtaaaatcatggtcacaatctctctcgtggctcatggcatgctgaatggttaatccagtagttcccaaatttcaaaactcctttttcttttatcctgtgtttaccccaaaatactctgtggctattttcccttgggctaatgtaacgttttcctctaacctatgaccttgaacctctttacctctgacctaagcctcttgcatgcccaaatcctcttttgtagggaaaaagagagaaatgtatgagcatcctgtcttctgcttggcctcccaagtgatggatttaaccattcgtgagtacccaccccctcctcgccatgctgccttcactctctctgttccattatttcaagaaactcagatccaaaccaactcactctccttgcttcaagttttttagcattggcttgtctgttggttctgtctgtgaaacccagtgtgagaagtccagtcactttgtatcagcctaaaacaggttagacaattaagccatttgtttgtgataaactcagatttgtctgtaagttttttcagttaccctgtctgtgacctgaatgcatttttactttgcttgtgtgtaaccctaatttgtaaagtacttgtcactggtacacaatcaaaaggtgtcagctaagctggggagtgatgtactaggtgtcagaaaaaggacatttgaggcaaagccatgccttctttatccatgtttaacatgtcaaactataaagggtatgagatcatacaaggtggtccatactctgaaagctagttcttctatgcttcctatctattctctctcaagctgggaaattttcctccttctctctgaagagctgtatttgcccttgtcctcaaagctctgctagaacacatgacttaattgtcattcgaagagtttgtgtatgtttcatagcttgatttcacattaaacttaatttactaattttctatttgtgcagccttttccacatctgtgaaggagccctttttttgctggcccccaaactttggggcggtgggaagccaagggcaagcttttctgtctgatatcatgtatcacgcataagtggggggcattttggtccacttgctcattaatcttgcatatgtgttcttgtttctccttctcttctctcctcgttgtgctctctctttcaaatagagaatcaaaaggatgcaggtgaactgattgtatatgccttatcaattaccaggactgtcgagttatattcagttgtttttttgttttgttttgttttttgttttctgtttttgttaagtagctccttaaagtatgcgctcccggagagcagtgtggagccgcagtaatacttaaggagttaatttgtgctgtctaaatgcatctcatgcccactcactgttggtcttcagagagtggcacttccgtaaaggtgtaagtttgttccttcaggaacagcgttctggtttgctgcagaacatcttttacccttggcttcagggtctcacaatttggcctcatgagtgtatggtgttttgttttgtagttttaaagacactgaaccaaatgaatcttcccttttactttttttctttctttctcctttctttcttctttctctcttactttctttctttcttctttcttcttttttctgttttctgccctatggagaagtttgtgttctttggtgagtgtttatagtcaagaggaagcaatggtgtccatagtgtgtgtgtgtgtgtgtgtgataggcagagggactaagcaggagctcttgtgagaaagttctctgactttagaaattttcttcttgtttcctctcaggtcttctgagcctatttagatgagagctctgaaatgaaatattaatgaatgtataatgtgtcttaaagagttaaaagattccataaggatttctcatttagacccacacagcagttgaacatatttcagaacaattcagagagcatttctaatgtgttccaagcaccaggttagcaataaatattccaagactcaaaactatgctcaagacatatgtactcccaaatagagaaggtactcatccatccatccatccatccatccatccatccacccaccaggcaaggacttggcagaggctaccttgaagcaagtgcagtgtgaagagccaggaagtatccaaatgaggaaaaacaactattagcttcatgaaacatgaatgcatatgtgtaaatttcaaattcaatacatctaaatccccactggttatgtgtcagaggaatatgacattgttagaaagctaaaaacacattcaagatattgggtttcatttgcacattggaagagatacattggaatcagttcatggaagctagagatttggggacatagcctacacagagcaaaatatacaaatgtaacaaactacacagctgataaaaataatattcttagataagatgttcatgacatgagtttcatcaactaggtgtggttttgtatgcatttaacgtatttaatcttcagaaaccttatgtagctcctcccattttacagatgaacaaacaaagattagagaaacacaaatgatgaacaaacacatcgatctagaagcctacacagagaccacatgcctatctactcagttcaacatggctgtaaaacagtgtcagattgcaaggcgagacattcagtacaagagctgtggcctggacacgccataaagacagagatctggctagaaatggtggcacactcctgtaatcctggtattcaggaggtggagacagtagcccaactgggaccagagtgactttaaggcaaaaagcaccattgcagcaagaccctgactttaacaaagaaagaagttatgactctgtcctggtacaaagtcccttacccaggaatctctgtgacttttatattcatatagatttttcaaaggataattccaacacatattatctctgcacgtgacagccattgaaggttccttaagcaaaattaaagattctctccagaataaccatattagagttgtaaagaaagtctgaagtccaggaatagagtaaaactgaactttaaatataatatgaaagcgaagatgaatatgaattttgggatacttgagccctcttctaagcaaagcaggtctcactgtcttcttccctggcctttaaatattcttatttctgttatgattaccctaccttttcaattttcctagggaataagatagatagatagatagatagatagatagatagatagatagatagatagatagatagatagacagacagatgatattacagacaggcaggtggcaggtggtggcaaggagttgtcagggttaagagtgcaaattggaatgcggtaaataagatgctagaagtagattacagagatctcctggtgtgtttgctcaaagcattctgggagagtctacaagactctgaccatggcttcctagctgacttcatgctttctatcttgtgaccatattagaaattaaatgttcagcttagttacggtatcaaaagaaaaatagaaattcaaaagatttcaaaagtctattaaagaaaatctgtgatcctatcaaagaattctattattttaaacattcccattaaactgtcacatattctaaaccaaacaaacactggggaattcaatattatcattgctgttttgcctccactcttggaatgcctgcataattttcagagcatcataatgattccactagacatttaaataaaactttttcttttaaatgtaccaaggatttgcaaagctttgtacagataatcttttagatggggataaatataataataggtaagtggaaagaaggaagaagaaaaaagacaggaagaaaaatagacacaaacaagaagaaaggagaggaaagaagggagggaggaaagaaggaagggacataaatagctagatagttacatgtatgaatagtgagtagatggataagcggggaaaatgcattatttttgcctggacactgggatgagaactatatgaatgattcaactggatctttaccttaaactcataaacatgccctcactgttgctccatttatagctcaggaagctatgtttcataaggttgagtggctttctcaagcagtacttggcttcatgtctaagcaagtgcaagtgatatgttttgtctccttttactatgcagaccacaagaaatcctgggcacttggacactatccattcagtgaggagggaagaggcacctatagaggcacctatagctttagtatgggaagaatacaaaatagcagacaagtgtcatgcagggtcagacagttgccaaatccttacattgtgaattcttatggcagtttttgtagatatttttcctctttggttgacagaagccttttagagcagctcaaatccaagaaagatacctgggaaaatagtaaagtactttatgtacacatgtaagagcctaattccagatcccccagaatccatgtaaaaagctacacatagtaacataatttcacagtaggggaggtggaaacattcacatcattgtcttgctggccagccagcctagcctcttcaatgagttgcaagccactaagagaccccatctcaaaaatgaaggcagaaaagaccaaggaatgacaccaaggttgacttcaaggctcctctttttttttttaaatacactgtagctgtcttcagacactccagaagagggagtcagatcttgttacggatggttgtgagccaccatgtggttgctgggatttgaactctggaccttcggaagagcagtcaggtgttcttacccactgagccatctcaccagcccaaggctcctctttttctctcttcctcctcccctccctacctccctccctcttacacacatgcacacacacacacacacacacacacacacacacacacacacacactcttacttcacataaggacttctagagtgtgttccgtaattccgtgcttctgcaatatccagtttagtttcccactgatctgtgaattattaaaagagaaaaaaacagccaagattacagtctcaccagaccactgtgcaaagccagtggcctccagtctcctcacaaggagccagtaagggtgaatcctattgtccaaggatccatgctgttgtagagtgatgagtatctcttgcttcatgtcttatacattagttgttaaatgtctctcttcccatctctcttgtttcaatgatgcctaaataaaccagtttctaagtcccaattattctatgagtagctcttcatttatactatacaaacagtaaggaagacaaggacaaacacatttatttcccagattgttatcaaaggggattttgaaggaagagaggatatactaaagtatgttgtgaagcaatgggcataaagccatctttcctaccagaaaaaaagccattatcagtagtaactgatcttcactgaaagtttaaaacatgcttagtggctacatggagatctcgcttagctctcttaagaattctaggagataaatgttttattgccatatttcattgactctaaatttaggccattgatcataaggtatagtattaattaaagaagaagaatatagtattggtatcagtcaactgatgacatgccatcaaatgtagtgatttgatcactacaaagtaagttcaatcctcaaatgcatcaaatgcatccagatttctgaaacagtccatgtgttttgtgcactgagataagaaattggtcgtttgttcatagaaatatttttcattatgagctttagcctttgatgtgtgtcccatctctcaagccctgttcatagaaatcttaaagcagaaagttgctgggcaatatgctcagaattaaactgggcaggtacagctatgatccagacttaatctggagtctttctagtgcccacagctcacggtttctgtttctgcatcacgaagagcttgtgatgtatgagcaataaaattgaaagatcacaaagtagcttctcaaagaaaaaataaaaatataggaaattattaggtaagcctgaacctcatttgacaaacaagaaatcaagtcctggagaaaagcacttagatttcaaacaaatgaaatggtcatcttcaagtctgatgtcccaggcactcgctttcctttcacttgagaggaaggcactgtccacagtccattgatgagcctacacttccaaccctgctgatgctatcctacagccaagtatttgagtcacaggatagcagatctcagaaaacactggctagaaccaatctgaacactcattcaaggtagacattaaatcccatgttgatattatgtctctttgatgactaagatgtcactttcattttctggtggaaatgctaatcatagttactctctcagaagataacttttaaaaagtacaggagattccagaaagctagctcaaccagtaaagggcttgacttatatgcatgagaatgtaagttcaatcctcagagcttccatttaaaactaatggcatagtgacacattcttataatcccagcactagaaaagcagggacagatggatccccagggcttgtctaaacagccaacctagcctttttgacaagtttcaggctaacaagagaacctatctcaaagaaaataaaagataaatggcacttctaaggaatgacaccaaggctgatttctggcctccacatgaatgcaaacatgcacatgcgcgcgcgcgcgcacacacacacacacacacacacacacacatgcacacacacaatagccccacacaatttccaaataaggattttagcactgcttcatagtaaccactcgttgttatacagagaactacatatgtatatctattaacttatttattattatttaaagggctatgcatctaaatcccagccttccttgtgctttcagcaatggaacgtaaaaacagtgttgcataaaactatcaaaatgaatccctgggaatcttgttgaaatgtgattgtggttgaggaagtgcaggcagagcctaggaatctatatttctagtgagtgccctagcaaagctacagctactaatccaggaattattcttcacatgggtatttagaagaaattatattttagtcaaaattctaaataagaataacaacctagtctaaagttagctaaacccacaatttcaattctgtgagctatctatgaagttccatgagctatgccaggtaccagggaactatgcagtaatcaatagtaaaaaccagttcccatcctaaaggaagctatcactaagtaaagaacgtgggagtggatcaagcgagtgaagtccaatgactacagtaatgaggagattcaagatgctataagaatatagttctacaggagtgtgcccaggccagaatctacgatgcatcacagagtcagggtaagcagcagaggaggacatcatggagtacagagctgaaaccccataaactgacttgggggtgtgtgtctggctttgttgcagtgtttcatctattaatgatgtcccctcccccattctccaagatgctgtccaagaaagttgtgactatatacaaagattctaaaagggctttaacaagtccttaatagtaccactaagtccatggtcttcctatagcatgtaaatatttgtgaaataagaagtaagaaaaagaaacttttgccagtgtatctggaagaactttgaaggaaatagccttagagatgaagatgttgagtatatttcttacatctaaatagggacagaaagctttaacataagttgtggtgatatgagtttgacgagagacacggccacaaggcttttatcctagctgccaacactagaagaaacagtttccctctctaagcaaccatgtgaaattttaaaggagtttctcagtggctcatcataggtcatatagaatagagacagtcatgtctccaaaggaaaaaaatggggaaaatgattcatgatatacatgtcaatctttgttaacatactggttaggacatggaatcctctgaagagggttaaatggagattcaagggatccactatatgtaatgagcactgccactaaaaaagtagtatgttttaaccccacagtcattagttcatgtatccatcactataagggggcaaagtaccttacaaaacactgtatgtctaaccaatcaactctgttccccctccggctttatccactctccttctcccaaatcttagcaacgatctacaggctgggtgttttcagtaaagcgtactacaggctccggcatcttcctcaacacatcaatgactggaacttggtaataagtgggttttccctcagtcatatctatccctcgtgtgatatttcaggggctggcagttcgcttgctggaaccaaatatggtcaggttatttaagggctaattggggtgtctctccctcctggatgcttctcttccttggcttagctatgcctgtagaggaattctcttttttgtttttctgcagtcacatttaactctctttctggaagccaaatggaattaattgtgtaaacatgagcaatggtaattgggtaaatgaagttggaaaccaaggtatgatgtttttgttttgctctgtgaggagcagaaagggaagcttgtttttctatggtggcaaaccttacagtaaaaattctggacagagagttggcaggaggaaatttatgaatttctccccaggactcattgagatgaaacatgtgtctgacgcctcacaggttacagatcaaccacaggtctgctctgtgttgtggggagccccagatcaagcactttgatacatataatcagtccctaggtgtaaatgagcatagagtttccatgagaattacacgctaaggtatcaaacattcaccacatgagccataaacatgcgtgcctgagatgtccccagctttacagaatgctcttagccacgtgctttttaaaaataagcctttctttaaatagctttatttttaaatgatttctactaattctgtggtcatatgatctttcccaaaggattcaaattaactgataaagattgtttcaggttgtgtgctcaaaaacactgagagtccagcaaggtcagtcttgaagacccccacaagtcttgctttgccggaacatggcatttattcatgaccttgctccctttctctatcaatgtgactataattgtattttctctgtacctcagtaaaattcatttgcccagctgaaaatccacgcaaactcagaagcaagcctggaaaaggagtgtgtccctcagcactcagatcactctctaacccagaactattagaaaggagaggtctgaggctaatgagacactcaccaaagagagaattgtagaagctgctggtactctgtgcttgtgcggaagaagaaactattgtcaaaggacgtttgaagcactgatattgtaaaccacatgacagatgggtcaagtgctgattacggtattctaacatttggaatagcgagtaacatattcgataagctggcaagtttttatatatgattcaacccacaatataaaagccatgagaattccaaattgaaaataattaaatgagctggaaacaatcagataccacacattttccccccaaatgacagattttgacatgttgaaattccacaaagggagcatgaatattccctagctcacttgaactaatgacggccttttatctgtgcttgcaaagaaattaacttcagccttctcacaattcggaagctaacagtggccatttgtaggtactttgacttgaggaagacctatcccatgccttgtttgatttgttctagtcagcaatcctgtcaaatacagggaaaattcttgactctgtctcattcatatgataagaaaccaaattacagagggtacaaaattagttaaaaggcaagtagcctatgaaagataagaatccacatcaccaaccgttcatgtaccatactctgtctctggtcgcgtggaggggagaatctgttaatgacctgtgcttgttcttcgtgataaaaaagtgtatcttctttcggttgctgatacagcagctgccattcgtgtttgtccatcttgatagagcattttttttgcatttggcctctgagtgtctgggtagggtgtggtgagatgctggttagagtccttatcaaaccccatcacatctccaggacaccaaagctgctgagggagcagcatctctggttgtcgtttgtcacgtttgcttgtcggggtgttcttttcagagttccttgtcacttgtcactctttgtgaaagtcactttgtctctttacttttttttttctgcctctctcctaactgaacagctccccagccagctcctgagcctccttctttattcacacaattgcagaccagcatgttatctcagaggctcgcaagcatgcctaggccaatatcaagtactgtaaaccttctatcttctgtcacttggctttctagctttctagctttctagctttctagcttagttggcttttctattcactcttgaaattctgttttagttttgaatactaagctgaggcacaggctctcaagtgtgatgtcgtaggttttgagatactcagaagagagcatttatttccaaatgtccacattttttttttgtctagcaatgtctgacatatgcaacattttcaaatctcaatgtcagcacaaaataacattgttgttgcataacattttgcatgatggtttttcctatgttatgagcttcaattctgttgaatgaaatgtctcctaactatactgtattttcggttctttttccatcagtgctccagctactgcaaaattgggtcaggggaaggaatatctcagtacattttatgactgcagaggtgatcaatgagccagactcatttctaaacaaaacttctttgcgccctttggggaatgggttgctgaaggcatttacacagtattttctttaaagacaacatcctacagaattcatggctagtatagtttttgccattgagttagcaaatcagctgtttgagcaagtagggaaaaggtagctgtgcctcactaaagtggcttaagctacagataatggagccacaactaattagcaataagtagaagttgagctacatgggttaattggcagtcaagtagtctagattaaagactcatagcccatgtacttcagtggtcacatgttcaagtcaaattatacgaggtttattaaacatactgttggtatatataatacataccagacatacacatacctgtgtacatttgcacacactcatcaatgactgcatgcacatgtacacataatgtgtatctattgctgtttattgtagtcaatcgaaaagtcttgcatttcaaaaaaaatcacaaatcttcaggcagtccttacttaagcatcttagatttcttaaaacatttaaaaaaaaaagcatttgcacttcataggtaaattgaataaaaatactggtggaaattactttatttctatctctgatgtcatgtacagccagaattccctttaatttggtgagtatttcatccaaaagaacaatgctctctattttgaaagtgaaagatttcaaagatgtggtccaagtgggatttcctgcagatctgtataatgtgcaggcttgtctggttataagaaaatgtgtgtacatgtgtgatgtatatatgtggatgtatgtgttgaatgggtaataagcataggataaggaatttgcaaattgatgtgtaaatgtgaatatcaactaatgaaaagtagccactgtgcatatttactatcagaatgcaaatccctcactctatgtatagtacccaaacatatatacacagtatgtttgtagaaatgccagaaagtctactaaggaaattctgatagtctacttgtaaaaatgacaaataggtcaagtgtcaacaaaatagacaagtcaatcttgcttctcatttttttccaagaatgttttctctagaccaggccatcagctgttaccagctatcctcccacatctgctgactaggtgttggctgtcctttacctaccctgaaaactcccccaaactcctacattctagctccaactagttccactcaccttgccatttagctacagtaaagataaagatgataatattgactgcatacagaaagtccatctccatacctgcagttgtctaattgaactgaaatttaaaacctagtcatctgagttggtcccatttgtcagtctgtctcccaggggataaaaacattcccctttgcatagtgttttatggagtttgttttctattattaaattctaaatactaatgacgtgtatcacttaagaaatgcctatctttttaagtagctattttctatccttatatttaaatacaaccaagtgtgtagggagtattaagaaattctatttagtgctggggatatagtttaataataataaaattgcctagcatgtatgaagcccttggttcaaccctcccagcaccataaaaaggaaaaaaaatgcaaagaaattatatttagcaaggcacattctaacaccctaagctgaatcagtcaagaaatgacactgtccacgggtgtgagctcaaggtgtggcgaaggcaagagttctgttcctgctaaaatataggttatagccatccctgtaacaacctatccttaataccctttaataacctgccctgaacttctacataagcacccaagaatgttttgttttcttctcatcttttccccgggtgacttgaaacaaagaggccttgaatgttcatctccaaagtgatcatcgaagtacccagtcaacacgtaggcctgaaataaaaacaattttgtcatgttgaacagttagtggcccacatagaaaacaaaccgtgccaatcaatatgaagcctggagtctcttgccccatgccaggtaggctgagcacaatgtagagagtgatctgaggtagtccatgtatgctgtctttaaagaatgtgtattgtatacaaaacaccactaaattagcatgggctattgtagacctcacattagcttcatctgcaactcgggagctggagcactgttctcgtaagtgtttcataatgacaatgacaaggtggctttatggtttgctcacttaacatttgcatgaaacttttttttatatattttgataaccattcagaatttctcacccactagttctattggccacaaaactagcctgctgctttcgttgaatcttaccacaaattcttatactccagaaaatgtaggccgcttaatcactcccgccaaaaagctcgaagacacaatccgtcttgctgaactagtcatcgaagtactgcaacaaaacgaggagcaccacgccgaggtgagcaggcaggggaagatggcacagtgtccattagctgaggtgccagcccgggctgcagctgccttgctgtgagcaagatgccttaacttgagttttctcttaattgggctgaagggaatgaaagtagaagttttggaaggagacgtctttagaaagttgtctaagtgaccaagaggtggttgtatgttgtgcatttcagcctaagttttcagacatttctctgaacgcgggactgaggtgagtgtaactcaaggctctgtggcatccagcatgcagcacagatccattatccggagaaacagaaaactctccagtcttttgtggttgttttgttgccagcactgttgttctgattggttctttggtgtgtggaccctaggtcatctttttattttttattttttaaagcttgagtttttctctgtatcttactctgataatgtagtccctctccctttatgaccttagattgcccagcttgctgagcacagtgacagagacaataataagtctatgctgtttgacttggcatttccatgacacaaacccagataaatacagcttctttcattgtattttgacaaacctctattaaaatgattttgaaggaattataaatggaagggcttcaaaccaactagatgtcaaacctataaggacctaaatgccccagatctcccagggaagagcagaggattaaactctgaaactgttccaaattcgaactttaaaatcatttctctcaacataatctggtttttaaaatgaagctgattctccctttaaattggtgtttacagaaaggggacgaaagggctctgtaaaagtcatttcttagacccctaaactgaccattcccatgactaagaaaacagtgacagatgggtaaatgatagagcatacgctgtaaacccagccatcccaactaatgctgattgcatattgaaatttcctccctgtttctctactgttccggtcaaccttggctgatcgtggcaggggaaagaggtatgtgactcaatcgaatgaagtggccacctgctctcatactctgtgcatgccctggtagtaccatgtcttctaatgggattttcctggtgctcctgctttctaacactgaccccaggaatgtaacagcaactttgagtggactgcttgtgacatgggtgactctccacagcagggtaaatgtggggtgattctcttgtgcgtgcatgaggcaactgatagacttacgaggactgcggttacatcctgacacacgcctcccacctgccttgattctgcccctggcctgtcgtagtttcctgtgcccatctgtatttacctttattacagaaggggagttccaagcttagtaaccagtagccccttggagtgatactaacctttttctacagctgtctgtatgtgagtcatatatacagtatttatatatagagagagtgttgaagactcctgaattccctgcagaccctcatgaatggggggaagacccatgactgggtgttactaacccatatagcgcttagcaatggacacacagcctgaagggaaaaggggtgccaagtagcacccgcctaccacacaaacttaagagtgacttctagacagatgcaaggaagttggattgcatttttcttctacttttattttgtaaggtattctttttagattgaggggttggatgttccagtgatgacaactttcttctttctgggtgtcttccaaaccatctcctgggacttgggggattctggccttcttttcctggctttgagaggtaaaggcttgaccaagtgcacgtatttgtgaagccatggatatgaagaggatgcagctgtgcgtttaagtgaataacagaaggaataaacggcagacatactcgattagtaatcaagctactctctaaggctactcccagatcacagagaatgtgtatgttccttggccacaccaaagaggcaccaccacagcaaagaaatcccagaactgcacaacaaaaatatatttttggaaacccaacttccaaaaaaggcatttcttcttaccttacccaaaagttggggtttgggcaaatgtcaatcatcatccaaatgataatctctcataagcaatgttttcatcttacagatttagaagtcaggcagggtaaacaaacatggtgactttaatcttgttctcaacaccggtttttgaaattagaaataaaaaaaaaacctcaaatgtaaataaagaaaatatccaataagagaaaaaaaaccctcagcatattttaaattcccaaagaccaaaaattattttaggtatatatacaggattacccatcatgagatcttacaacttaatcaaacctacccattggacctacccattggacctctcctatctcctgctctaagtcaaggaattcagtgctccttgaaagacaatgaaaaataaaatgtcctgggccataaaggataaataaagtacgttgcagccagagcttagaatccagagcagagaagtttgggcttgaattctaccccaacatgttcatcacgtgactatggtccagttacttacccagccggacggatgatcactggctagatggaaggtgatattaagcaagggctcagatgatattgtgccggacacatggtaagcgctctacaaagtttagctattgttatatgaagaaaataatccccaagaagtcaaaatatctcatgaatttttttttaaaaagctgatttctaggtgaaaactacacaatgtctgagaaccaatgcgctgagttggaaggagaggggatcctctcttggaggcgtgggctcatcctgaaagacaccccacctgccctcagttgctgcatacagataataatacctgaagcatttcacagatatttgaattctcctgtttggtgccagccccctaactggactctctagggagttatagaaccttgttctctttcaaaagctgcccgggtaattcctatgtgtagccaagtcactgactaggatgtaataaaaaaggttgacttgacgcaacacattgtacactttttcttcccgaaaggatgaggatttgtttacccagaattcactttctggttgctccctaagctttgacaactaaaaaaggcactaaatcttcactacagatgttaacttttgtggccatactattcatagatacatcacaaataaaagtaacaatacacctgccaccaccaccacccccccaaaaaaaacttcatctttttaaaagctgttttaagttccagtatagtaaatgtcccaagatggaaatgtctctcaagcaagagcccatccttcccttcccattcacacatgctttgtgtggaagctcgtgtcacgttttgctttcatatgcaacagaattttcttctcagaacatgacctactaatagtcacacagatttgatcttcatgtactcccccttctcaatctctctctatgtatatgtatgtatatgtatatatgtattttggtgcacagaggggtacatatatacatgttagtttgtgtgcaaaatatataatgtgttcagtgtagtgaattgtaccccctaaagctcacagcttttgtctttgaataataaaaacatctggtaagtattaatactctactgtgtaactctatattttctatgagaaaagtttactgaacctctagatgccttttagcatatattacttcatgagcaaaagtggttctcacctatcagagccaacctaaaataaagaatagcttttgatcagcacacttattcagattgttcatctgatcagaattttcctttaactgtttagtattcctaacctatctaaactctttattcacttcttagagagtgctaaaaagaaagatgttggtttttatttcttcattcactgtaccagcccccctagtgataatacttctctttgtggggctcccagtctctctagcctgtatgactacaattgcaaaaactaagagttgctcagtaacacattacttagaatctggttctctatagcggagagatacttcgctccccgtgctctcttgcttacaaattctttaaattaaaaacataagagccacaactgcagttgggttaagaatcttttttaatttcatacattttgactgggttttggtttgacttggctttctgtttttattccttgtcatcttagaacaaagttgtatatgggaacataatacagtcttccccaacatatcttcttggccatgccctaaagatgtaatgttgatcaatcaactgaagaataagtgccagccaacttgctgtgcctttctgaacgttacagataccctggatgaggagagaggagtcaccctgtataggctcagggctgtggacaggactctctgcctaagtggcaacaggctacaaaagctctgactcagggagaggaaggcttccttcccccactggcctatcagtagagcaaggcccatgccccagggctctcatctccaggtggtaaagctacaataaaacctcattaattcaggacaaatacttagaatctgtgatgacttggttgcacctatggctattttcattattcttaagtaaaatatttagcataacaccaacactatggtaattaagaagtcgtttcttataacttggagccatgcagttcttagacctacaaagttaaacttcccatctttttaagtaacaggccagtttatcaacaaatacttagaagttgggaaaatttttaagcattctgatacattcacatactaaactcactctgtgagtgccatctactttactacccagtcacaggcttccttcagaagcaataaaatagctctagaaagtccaacaacttgagctttttggctaacggaacagcttctgcccactcccattgctctgaatcagtgaggttttactgtatattacgttggaaacaggaggtgtctagttccaaccaagccatccttaaagaatggtacatgacttgattttttccatttaatttgcaaaccagccacatgttgataaaggagaagtaagtaatatgaaatctcatgaaagaagagaggtagaccctctgctctgcctcctagtggctgttagaatcccccctcaaataaggaatagattctcacagaagagcttggccattgaacaaacccttccatgtatagaactatttccataatcatccttcatatttccaaacactttcccatcttttttggtgaatgctccggaaagtgtttccagtgtgaatactttacagcattgagtgggggggtggggggacaagaaaaggctggcaatgtttgtttttctgctctctttgaaatcagcaaaacagggcctattgacaccaccactcattctgcatgcctcctgccagaaattattagacgacatgcatgcatgcctttgaactgcattcacatctggcccaggctgatgtgaatgtcacccctgagaccctgcacagtgatttccaagggctcatgtgcatgaaaatgagttacttcactgatattttttggttttcaatgtacatatgtctaagccccacagaagtaagttctaactttcttccatgttccttaggctaagcctgatatttcctctcgaccagaagcaaaaagcaaaggctccctactgagatagactttttactcaacagttctgtagtaattctaataatggcttgctttgacttagtttgagggaggactaatggtttcagggtataggaaaactggaatttctggggtttgaagagaccacagacaactaatccccagatagagaaatggaaatgtacagtaattacaaattttcaagttagaccagcagaaaacccataaacacagtgaagaaactcccaaattttataccttagagcaagaaccagccagcagcaatgacacagagcatgacccaagcctactgagttattgtaaattgagcagaagttcatccgtgacctctgacctctgggtcaggatcaaggctttctacacagagtagtgccttggacactgaaaggcccactcatatccaaactgctgttctctttacaataaagtgaccacgccccgctgggtgtccagccagtcttaaggagtgagggttggagcacgcagccttcatcctggggagatactcacccctctctgtctattgtttttctgccacatttcaaaggcctttgcgtggtggtcagacttaatggtggagcatgcggagacgttcctgtcactctttgcagtggacatggatgcagccttagaggtgcaacccccagacacgtgggacagtttcccactcttccagctgctgaatgactttctccgtacagactgtatgtatcaccctagactactggcctttactgaatagtatgcagataaacttgttgctaagatatctttatttcatataaactgtgggttagatcaagctcttctttgttttactgttaaaaacatacatatacacataaacactccacacacatacacacatatacatgcacatacatacatacacacactccacacagacacacacaaactacacttcacacacaccctctgtacacacacaaacacacacacacaccacatacatacatacatacatacatacatacatacatacatacatactccacatacacacaaatcctaaacacacacacacatactacactctacacacaccatttgtacacacaccacatacacatacatacatacacactatacacacatatggagagagagagagagagagagagagagagagagagagagagagagagagagagagagagagagagacttaactgtggatagcagttctcttgcctgtctttgagaagaatccaagagctgtgtgggaagaggtattcatttcttgtgttttatttactcttcataaaattggttagtttaacctctttaagcttttcaatttttaccagatgatacttcctggataaaagatacctctggccaaattacactgcaagcatcttgtagcaatgtcaaccataaagcagtccttcttacgggagaatgatgaaggaggggaggagacaaggaacgttttttttctttctagtacctagccagcagaggagaagtaagaggaaccatttacaaatgctgtgggttgatgcttttcatagaaatgcacacatgggcaacatgactttggttcacatttcccttccacgtggattcaagtacgatttgtttcctgcttttgtctttttgtttctttcagtctcctttgaagcagggtgttgtatatagaagacaatactctctgtgtgtacactgtacttcgaaaaaattgctctgggttctgacggagattttgcttatctgttctagataatttgtgcaatggaaagtttcacaaacacctgcaggacctgttcgccccacttgttgttagatatgtggatctgatggagtcctccattgcacaatctatccacaggggctttgagcgggagtcatgggagccagtcaagtaaggaaaactgcttttaataccatcggaattggggtacaaatccatatagaaatggattaacgatggcacatggctatcactgttagtgtgaatagaaagcaagcactgttttatttcttaacatggtactggtggcttccctgactgaatgggataaggagaggggtagaagtatgtttttatgaattgaaacctttgtgtcacaaaagatacagaggactgagagatgtaaccatgggtgtgttattcattctgttcgtcttactcaaacgctacttcccacagtgttttccacaaggtactcaggagagaggaagccccgaccacagtatacaagtttttatgggttgcacatcacacaggacaaatcatgagagagtctgtatgttgtaagcttgttactttccactgctgctgggcaacctcagctattgagtgtatttggcagacccagagaacagaggagcaggctgtgcctgtggacttccaagtgccggtccaaatatcctggaaatgacacccctatatgaagggtgtgtgatatggtttgaaaagctctagtaaaccctggctctgcctttgccctggtagacactagttgtttgggcacccaccaccaccacttctctaacaaatgattttgtgctctgcagcactttacatctttgagatgtaccaacctagaacaaaacaggcatatatgctagaatttttaagaaacccagaccttttctctcaattggaaagaactcaagagactttcctcaatacagaatccttttctgaagtaggtttttaaatgaatattcctataatgtcaatctctaggcaaccctgactgacacagttccttttgtcccctcccatagttaagtcacaggacaattgctttgatttgcccccaactgaacgcaggtcaatagcccaaagctcttggtttgaaggaaaagagaagtaacggttctggtgacttttacctcaggtgtctaaaactaggttaagcgggtaaggtattcacaagggggaatttatttatttattggtcatagtaatcatggccattgtgctttggagaagagctgtgaagagaaaaaggcttaaaggagtgatatccgtgttttgaaaatagcaatggtcttgaaatagcatttccttgcttgggttgaaatgtggaaggttctattgccaacccagaggaggggaatgatatcaccctaggctcttaaagagccatagatctggggccttgccctagcaggaaggcaaggggttgacttctaggaatgtgttttctcatcattaaaattgattctttaaaaagttcctacccagggcctgagacttgtcataaatttctgtgaaaatgtcactaaagtcattttataatctgttaacttcttcagaagccaaacatatgactgctattcatttggaagcattcagtgttctgagtacttactaccagcagtagagatagaattaaaatcactttcacaattggagtcatagtctggaattttttttaactgatgatattggactcatggatccataatttaaatgcctgaaactttcaaaagagtaagtgttatgaataatcacctgagacagatgtggatgtggatgttggtgggagctgagggggaaggaagtgaatgttttactgtccaaattgtgctattgttagtctgtggtttgttcagctcatattcaagcgtgtcgtcctttgagagtacctggaggtgtttgaaaaggccgtgtgaagcataagctcgattaacactccttttaaccacacaccaattggcttagttttagacagcatggatgctgtgtggaagttctgatgcacagcagggcagtaagagtaaaggtagattaggacatatgggtatatagagacaaagctctctattcctctaacaatgcaaagagaaaacagggagaacacctttgatacttgaagaagatcatccctcttccttaaacaaagatgcctctttcaactaggtgttttatcaaaagtaataccaacaaaaactttcagaatcctctccatcaggctccttcctaaactaagaactgtcttctcagttcctgtcacatgactataagacacacaaacatccatacttgtgcacacacgtatgcatacacacagagatgaacgtgcatacacacatacaatgaatacaagagataaaaagaaaatacatgacaaacagtattcatctttcatatttctttgtatgcaactatttccctatttaaaaaattaagtacaattgtctgagcttaatataatggaagttatttggtagtataggtaaatagctaagtcttaagtttgtttactttgaaaactgagaagagagagattgtatcttactcactcactctattattctgtggatgctgatgtggaagcccattgcacagcttccaactatacccaaagactctttcaagatgcgctcaagtgttcaatggaacctcaagccatagcccttcctgagcacccatcagggcataccatagggtcattatctagagttgggagggtagtttgcaagtctggcagccctggatgtgaagtttgatctctgtacatgggtgggcaacacctcacccagccatatagtgatagctcattactaataagccataaaggtcttcaaagtagaagaatccaggaattcttttctgtgtgtgggtgacccctctgtcttttcttggattcttctaagagtagggctttgtggtttttttgtgtcaggttagggaggctaagaagagtaaagcaaatgctactttttgataaataccataaattctggtttcctagtagtcaaaatacttgctgctcctctgggcctgggatatacaaattaaaagtaccttttaattaatacccactcccaataatgaagatgtgatagtaacagaaagtacctcctctagggacttcagcagtttgtgggggactagctgtcaaatatacagacagatattattgaagctagatctcttgactctggggccagtgaaatgactcaggagatatgatcctgtgaacccagaaagtttgttggccagaccccagggaaagacagaaggagagctagttctacaaagttgttccctgatctccagacacattgcctggtacaaggggacacaaaatattgatcataatcacaataaaattaaaaaagaagtcttaagacaatacttcaattcaaaagtgtctctgaattaagatcctttctcagttgactttcccaagactcagtgcccccctttataaaacaatggcttttgataaccataaaatttccattgctaggattcgtggtaataggatgtggacatgcttatgcatgccctctcacaactacgcactctcttctctccagcatctagaacagagcagggcttggcacatagccaggctcagctgtatcagcagagtgtgggcaacctgtacaggccagggattataagaatacaagagcaaagaaccatagagatgggtgaggaaaagatgcaatctccagattggcgatttatatctagatgggtctattaatatatagagaagaaaaatggctttaaatattaccaaagtatgtatgcacaaatcgtacaaagagttgtaagaatgtgggtcgtaggggcatgagcttccactgaagggtggggatcgaactgacttcaagagtagtatttcaaaaggggctgggctccccaggagcatacaggggagcagaacgcaacaacacaatactgagtatttggtgtgggccagcatgggctatcagtgatggggcaagcctcaaggatgcttgagggttctcaaatcctaggacatttagggtttattctgtaaaggatgctttctcaatggggcttaatagtcccaaagctgtggtaaatgatcttacagttgtcatatagaaaatgtaggtctacatacaatacataagtagataaatagtatatctgtggcattaaaactttcatagagataggttaaagagatgatatctccgcagttaagaacaccagctgcttttccagaggtcctgagttcaattcccagtaaccacatggtgacttataaccatctatgatggttctaatgctcccttctgacatgcaggcatacacgcagatagagcactcatatacataaaataaataaatcttttttaaaaaaaagagcctacagacattcatagagaaggaagtttgaggctgggcagttatgaataacaggttaggagacattactctgggctctaggaaggtatcaagtaatacccgtatccctgagtgggattagacctaagggcaaacacagagaggagcttcaatgtgagaccaccaggaaaagacagatgtacttcatatattcatgcaacaaatggcttgtaaaagtagaacatgttctgtatctaaaagtctacccccatccataagcttaaaccagaaatacttgagggatgatgtaaccatatcccttccacattgaaacagtcttgattaaaaacaatgttatgaaaagggcctcacctatattcactgccatcgtagaaataagatgcacacatatctctaacgtaaattgacatgagagagagcaggtgagaattttgtaatctcaagctctagagagttaaatgaaagcaatcctttccgttaaggtccctggattagatgaggataatttttaacgtgtatcagttactaggattctaattctcacttcttgtcctacccagagacatctacttagagttcttacagaaaagcatgaatagctagctgcttgtccagcagtcactggagggctctctttgaaaataatgattcattatagctatcagcagctcgcagagcagtgcatcgtaactgagtgctatgcaaaatcttcctttaaatatgtgatagtgaaatattatgcttagaaattacctctggttgttactcttttagtgtcccagataaaatataagtaacattaaaaatatgctttattattctgataaaactagaaatgtcctattttatcgttttaaaactaaatcattaataatatgtgctatataggatacaggtctatttaagcccaagttcacagccaaaatgctgtattttataaggaaacaatttgttttgattactatgagtatttttattttgtatgcaaagcgaaagtctcttcccatttgtgtactcaccatgcactaatatgtttaaattaagttgcttttgcagacacttgtatgttattcatttctagctacttataatttgctcagaattgacattttaactttccaggctgccatctctaagatctcctaattccttgatcattattcagtgtgtgtatcgtttaatgatcacatttgcttatataggcttacacatgtctcagtggaaatcgcccatggatttgtttcatggcagtgtttaagaccgagaaccaccagggactgaattcaaaggcaaattccccaattaaacagagacacatggaagagaaagttccttttttttcccccttctatttaatagtaatatttagctccatttctcttgagttctccccacccccacgcccaaggcatcgtcccaccacaggaagtcatgggtctgtgaaacacctatctccctgaaagaagaggatagtgggttggcaatcgtgcattctagggttttcagtttataatccagggctgagttgccatagggaacatttaaatgacttatttgtggaggaagacaggcatctaagccattcaccagggccagcgccttcgctgccgctttgccctgcagagcgtgcccagaggcagcctgtcctccaggagtcctgctaggcaaacagctcacccagcgctgctttggcgaaacttcctccttccctacaagatccaaaaagagaacctcaagtcctctgccaaagtgctgtcaattcccccttaaacaggaaggctcctttcagatgcggagctaggctgggctctaccatgccagtgactttggctgcatggaacacccttcaaaagcctctgcaagatgttcagtgccagtgtttggagcagtacatgacacagaccctccaaagaaatatagttgatttgactcaaatctctgaacatgttctctctctctctctctctctctctctnnnnnnnnnnnnnnnnnnnncctttctctctctctttctctctgcctctctcccctcatacaaaccatccatctctcattcatcactcaattgaactttatacctccttagaaaccaaaaaactgataaaagcatcgctatttcatttgttttcacaaattttaaactttctatagaaaaaaataaacagctcatgaaattttcacacacactctggagctcccagtcctgtgaaagccatgccgaggagaagggtcagggtgcctggctgcttcaccagcccagagcttttgtccagttcctagaatccccataaaaatgctggagcactgtggaaaagcatgggtcagtccatggcactggcaggctaagtgctctcatctaactggtaaacatcaagccaatgggagagtttgtttcaaaggcgttggacagcaatccttggttgaccattctctctctctctctctctctctctctctctctctctctctctctctccctttcccatgcacatatatgtatttaaaaaaaaacaacaacaacaggaaaaaatagccttcccagaagcctctgtcaggcattatttattcctggctgtattccattccccggggcagctactataatattaaatgatactgtaaatctatttatttgacccaagggttctaagaaagacctcaatctgggctccttttctttccatgtgtgtctgtctctgtgtggtggcatatttccattttaataagtctgagtttggggaagaaagcatccattttccttcagcattccacaaaattccctggggataatcattcttctatatgagttcttcatgtttcccatccattctgacaccccttgtatgaattcctgtctttagaagtagcagttggaagacattcaatttctatatatcactattacaacacattcaaatcagtgagccttcctttcccatttggtgtctaatgtctgcctgaagaaatcttcccttgacagtaagttacaaataaaagtgggcacagctaatgccctgcaccacttatattcttaagtattttggtagttttcgtttttccttaaatatctttattctttgaaaattccatacatgtacacactgtataaatgtattttgggttgcaatctactacgtacacacatttagaaggtgctgtacaatatgtggcttcatgtgtgtattggtcagaggaccaagtgcgtcagctatctttcactgtgatcagtgttttttgatgagcacactcctttcctttccattgggaaatgtgacaaattatcaattatatccactgcactacagtatgaacgtgagtgctggtccaccgcacccctttaccttctctcctgcctcgccattctatcaatcccactgtctcatggcaccccagttccagccatggtcagccagaattcctccaacatcaactcttctgataagacaagctctagactcttttgaaagtggtcttgaagacaagagttctctgagacatttcggttatgtgatcattgtgcactcatgctccatcagtgtccacacttttaagtttaccattcactttactaattccctctggataccaagtcccatcccagcctgtaacctgcttacaaagtgtgttgctcaagtctccaccattgtcttctgtgtacttagccagtttatttacagctgttgtgtgcttctgccgcatctacattgtcactgtgatggtatttttctttctgtctgtttcttccacaggagtttaaccagtaacctacccaatgtgaacctacccaatgtgaacctacccaaagtaccaaatctaccagttaacatccctctaggcatcccacagatgcccactttttcggcaccgtcatggatggctgctatatatgatgctgagtgtgtattcagttcacattagatctcatttaaatttaagtgatcttggcatggatatgtattgcttatttctatacatcctatataacagagacggagatggataattagacatattttgctgatcatgcagagacaatattgtttatttctggcattcatcgtgtttataagacatttgctatatatatgcagtaacgatttgtctaacacccactgaacacttgaggactgtgttttacttcctgaattactttgtaagagaatttctaccccccagttttgaatgcaggggtctttgtgcaggactttatgcttttcaaatgtaggactttaggaattattcatccccaaataatcaaagaaaattctttgatgggcttaccagtcacttctgatctggagcaagtctacaaaagaagcttgctgacctaagagcatgttttgttttgtttaatatttaaatatttttcaaggctgattaaagccataaagcattttcctggtgccagtaaatagcagaatatccgaatggaatgttcagggccacatgaaaatttgtgaatggacctcccagactaggtatattataggtatagacatttcccaaagtcaaagtacagtaggaagctttgacatctaggcagcaaggcttctgaacttgaatgtgagagtcaagccactcacaattacagttgggcagcgatgtgtctgcgttctcagtacagactcatgttttgcttccttcatagaaagtcagggatgtgggaggtatttttgcctagagcctcttcttccaaacaagcggtttaaaggacattgggattgagtggatatttctcctcacttaggaagtgaatcttctctccgttttccttagcaagaagatccagtgcccctcagttctacctcggtgagatgaaatgaaaaccatgtgggtgatttaataagtgaaatgaggtttaccagttctccaccttcctttgatcctccgctttgaccacagctaattataggccagataagcttttccttggaagaataaattggcacattttcaaagggaagtgttattatcaaaggaataaaaaatgacctgaaactggcagggatgttttgaaatctccagttctcattcatcaaggtggcccttggccatttcagatccacagttaatccagaaggagaatgggacagtaaaatgacttctcaacccagtgccccaaaagctccctactattttttaaaactagtcacacaaaagcccaaagtgaaatcttgagaccaatgggtctgattctcttctagatacaaattcaaacttccaaattgttcatatttgaggaaaaattttcctgaaaaaaatacatcatattcatgctaagatgacaatattacaagttcaattagttagtgtctgtttattagattagatagtgtctgtttcaaattaaaaccaaatagatgaaagcttctcttagcttgtcccgtgcatgttctgtgatactgtttttgaaaagatatgaatcaagacattgtgataaagcagataatagcctccattcaattaattaaggcatgggtgggaacacattttggtaactgctcagcaatcaaaataatcttggtgctattgccttaacattaacagtttatcttaaaaataaaaagaaaatattcttttcctcatgtcaaaacttaataataagctcttcaaagaaaaaaaatgctacaagaattttttgaaactctgaaaccagatgggtgtcaaaatgttgttgtaataaataccaattattgcattcatatgtacttaatgatttaaaacataaaccatgcagttccaaaacggggcttagactagacaaagttggggtttcttttttcccaagcatggggtggggtggaggaaggctgaactttcatgaagaggagtgcattcccccactttcaaatgaagttcactgtagtatctaaaaaaaaaaaaagtcatagatcctcagtcgcccactaggaaatgcctgattcgatatcttttcatgatcctggctctttcctctgccacctttcattttaaggacgtgtttccatgtcacttgctccttcgtgtcagatacatctccgtactgacctcgaactggtctgttctgaaagcattgccctgttggtgcaggccgtaggctctggctccctctcggcatgctgggaatttgtcccctccccaccctgcagtagctgtggatgcatctctgcactagctatatttctctctgaggcattaattcaatgcagctggcatctgtcacaatagaaacacccactctcgtctgtttctatagacgatgtcagaagaagtggtaatgcatggtgtgttggacactttataaattactgtgttagcattagtggtatgcgaggaagggggtagggggttggccacccctcagagttccaaatggggtgattacaaaggagaaagccagcccaagaaggctcagaatggaagaggtggaacacttcccatgtgcaggccttccatggatgtaccaggtaaaagtctcttggaagtcatagtacaaaaaggaatcaaatcccatttccccagatctagagaggactgggaacaatggggagagcgctcaggtttggagacctgaagtatcagagatccactgtctactcactttgtctgccccaactcccttcatcctagagctgcctatgtaacaggctggtctaggaaaattggaaggctagccactggacaggactttgggattcaaggtatccaagtgtccctgtctctatcagagtctcctcagtttttttccagctcttcaagagagaaagaaggtcctcgctcaccactttgttagcactgtccttttgaaacccaagtcttgtgccatttccaagaggtctccattctggaggagaactggggaaatgcatgaagccctggatcctaataactgcatgttatcatgtagttcttacccatggagacttactcctccccctggtccatagccttcgtctgaatcatcacatatgctaatgtggttattaaaagaaggctgatttttaccatacgatatcttcctactcataaggagacaacaacctcttcagacatctcgctggtctgaagcaattggctgagcaaagtgaactgggtcctgtatggtaaaactcaagttctgccagtggagattgccccccttctgccaccaacacacgttgtttcgtatgtggaagccactgtttgccttaagcctggagccccaagttgtctctatgttagtttctctcaagcccaagacaactgggtgactttttatttctaatttttttatcctaccagtaatggatcaggtacatcagaagatttgttctggaaacttgatgcccttcagactttcatccgtgacctacactggcctgaggaagagtttggaaaacacttagagcagcggctaaaactgatggcaagtgacatgattgagtcctgcgtcaaaaggtaggaatgagtggctggaaagcctcagtctgtccttcccattgtgcagccctggaaagaccagtgagcccatgacaatgggctgtgatttgtaaagttctagagaaggaaatcgctagtccaagtcagctcccgtaaagacgggtatagtgtaaccccagcactgaggaggcagaggtggctctaagttcaaagcaagcctgggctacatagcaagaccctgtctttaaatatgaacaatttttaaaagtgactgccatatgcagggatccatcccataatcagcttccaaatgctgacaccattgcatacactagcaagattttgctgaaaggacccagctatagctctctcttgtgagactatgccggggcctagcaaacacagaagtggatgatcacagtcagctattggatgggtcacacgccccctaatggaggagctagagaaattacccaaggagctatagggaactgcaaccctataggtggaacaacaatatgaactaaccagtacccgggagctcttgtctttagctgcatatgtatcaaaagatggcctagtcggccatcactgcaaagagaggcccattggacttgcaaactttatatgccccagtacaggggaacgccagggtcaaaaagggggagtgggtgggtaggggattgggggggtgggtatgggcgacctttgggatagcattgaaaatgtaaatgaggaaaatacctaattaaaaaaaaagttagctggaatgcttagctgcccacactgaacatctactaatctgctctgtatccagcaataaaactgtttggctgccaatttgtcccattgcaagtcccatgaggaaaggaggctcaaacccatactttttcattcctatattcctgacatctagcatgtctgccacaaaatagccacacagtaaacatttataagtaaatgggcatggagaatgcacagagaaaaaaagaaaatggacaggaagagaaaaaatgtgcaattctagaaatctaggtgactgaatttccaacaaaagctaagcatcatcattcactctgtgcatgtgagccgagcacctggcatgtgcaccaggggttaattttcttgccctcattctaaccaagaatcatcatgaagtcacgagacactgcacatgtgctttagcctccacagagttccctttttgccactagggcttagggtagaaagtgaatccctctgcatgcaggcctgaagctggctggtgtgagctggagaagagaagaggattaaaaaagtctttatccattaagcaaaatccactggtctgatatcatagagcaggcccagtgctgagtccttggcatataatggagaaagaaatacacctgtcaaaccagcagaattcacatctgtatttgatatcatcaccaccctgcctatccctcaacacacatccaagtttcttttctggtttaaaagtatcccatttgttttcctctttccaaaaagaaaagaacaagggaaaaattagaggaagaaaggggaaggagggagaaactaacccgtaagcaatcttggcttccccgggtctccagatgttatgtactttagttgatgaataagttgtgtgtggtggtggctgggcttgcttaaaagtgctatgaatccagcatttgataccctggaagaagaaaagagaaataatgcatcaatcctgaaactgctcaaggcaggagagcagtacgactgcaggtaggtaaccagcaactcagtggacccaggaaagagccctgagcttgggggagactgagcaggacttgcccttctgcagattgaaagcctgtgcgattcaggcagcagattttcttcttttctgcccacctgtagaaccaagtacaggtctgattttcaactatatggtcaaatttttccagtttttaattctataacctctaatagtctgtattaattttaggcaaagcaattgctgttcatgtgaccaaaatctcttcacagggcaactttttgaggccatctattccttcctactatctcatacaggagccaaagtgagttagtttaagaccttgcctctcttgatctttgttccccatctattcagaaaggtatttatgtccgtcagtctgaagccaatctgctgaataggggagaaataagagaaatacagagaatatctgaggatgggaagtggtctcattcctcacagaccacatcattgttatgttcaggcatagaaagaaggtaggtgactaagaggcagacaatggacctgaatccctgaacactcctcacccccaagccacagaagtctaccaggaacatagtagctaagtcatcttccaatgtcaggactcctatctaagtatgggcacataagtatgggcaactctaacattcagacattcctgctgcttcttgctgtcaaggctccaaacataaacacaaatgctgctggaaacatcccctgacttggcttttaaggcatagaatatatgttggaataacatattatttctttggggcagaataaataacctttgttctagagccacatggtaaggacagtgggccatggctttctgacactcaccagacagtgacagtgcctctggtctctatccagtctaggtgcaaagcataggcgctctaccctcaaggagtcaattgggttaagtgacgtctctattcctggctttgtggacccgtagaactctctcagtcacattcattttccacatctgccttcctcttttcacagccctgcactctacaggctaggaacagttctcctgtgaagagaaatgtgaaaagggaagacgcttgcttcattggaaaggagagctttagcatttccatttctcagattgggccggaactagcacataagcctcagaagatcatcacagggcccagtccaactcagtacccatcaggcctccttttcacagagctagaaaatgatgtattttcagcagagcttaaaatgatcatcatgattagaaagctacttcagtgcactgagtctttaggagccaagatacatttaactttaacatgatcatataatctataggggtgttttgagggtgttttttccccttaggaactgggcttccaaccttagaaattatacttggcttccctacatgcacccagggtgtgctagcgagctggcatcctttcctgagctaactagctgtgtggtcctcctatgcaccaatagaaaatagctcctgattcctcttaaagccgtgccatcctggtggctgcatgagctctggaaggtggcagtgggcaatgcagagaagcaaccaatgtgctagataacgggcagacgttaatgaagccacttatttactgagtgctttcccaaaggatatgtgaggatgcgacccacttctctgaaacctttaaaacagagctgggtccccttgcgaaatagcagtgccaagacctatatcaacattatgttaaaaaaaaaatggtcgcatggagtttctgtaatatagttgtatgccaaagaaattactattgctatttaattatgtaaaagaatatctacttactaaaaaatagtaacaatggtaacgaaaacaaaacaaagccaaaagctacgccgtgagtggccatggacatggcttcccatccatccccaaaggcagccgtttccatggattgatacattttcttctaatgattctttagcaagctcaatctatttttttctactttttcaaccaatataataacaattttggacttcaagaatttttaaatttcttttcaaaaccaaaagaaaaaggaaacaatagtaagggtcatttaagctttttctccacactggagttttgaagatgagaaactgcctgcttgtgtttggttttttaagtgaagtgctcgaggtaggcacttgccaatgtgagagaagctgcatatgttgtaatgctataatcagggctttttttttaattcatttattctcctacaattagggctctccataccatgtaatctatagatagcacatagagctacaggtgttctgtgaactgctgaggaagagtgggtttaaagaagccctccttagatgcacagagatctgtccacacaaagaagcccttctaagaaagggaaagtcacttgaaaaagaacgtgtatggagtcattttgggttacttactacaaccttcaactttcttttgcactagcctctcaggaagtgtctcctctacctcctgccatctgaatgctgaattattctatccctcctttgttttaatagaaccaggattgcatttgaagttaagctgcaaaaaaccagtcgatcaacagattttcgagtcccacagtcaatatgcaccatgtttaatgttatggttgatgccaaagctcaatcaacaaaactttgcagcatggaaatgggccaagaggtaaaaataataataataataaaatccttccccctccctcactcctcccccctcttctctctccattgatcatatacaagaaaacgtcacaaatttcttcccaagtctgctagttttagaaatacattcttaatatttgcagattaagccatggataagtgttcagtatctgtcaagtcaatttctgaggcacgtgctgatgagcgtgccagtcacttggaagtagttcttggctggagttcaagtggttgtaaggtttctttaagctaaaggatgtttgatgaccttatttattaggccattctctgtactagatatgggagtgtccgaatgctagtctctttccatgagtagtacatcttagcccatgaacatgtggctagcaggagaaatccaaccaacttcaagccactcccaagctatgccagtaggttctgcaagtccaaagcaattttcaggctttcagttttccctagaatgaattgattgtgaatctgccctgaccagaagtttattcctttgcagagtttctgattctaaagtcagatttaaaacgtgaaggagaaggaagcagcaacttggacttgatcaaagacgatcatgatcattttcctccgatggccttaagccagctagatattcatataccaatttagaattaattcagtaacatttctggcaactctatactgttgccaattggcataaattgctcctaaatcagatctttcgataccagccttacatgctcagaatttttactaaattatatttgctccttgttcgttatttattttctctttcggcaccttccattttatatgtgggttggtggtgttctcttctggcaagatctcctccaaccttgtttcccccacaagtgagcttcctcagccacccctgctagcttctgctctagctgatttcctttgagcctcccccatgaagttaaagctctaggcaccagagtcaatacagagccctgggttctcattcccaaagcacctgtgcaaaagagtcagaaaacttctctacaaattcattgtgcatcaaccatccagaattccctggagattcatatcatagtatttcagcttgtctgggctgtgttaaaagaatctaaacttctggaggacaattcttgaggaatgacatccaagatatcctctggcatcccccacacatgcatgcaccagcacacagatacaaaaatgagcacatatgtaccacacacgtacacacatgcaccttcatagatacataaatgcacatgttaccaaaattaaaaaaaaacaccccacttacacacaggaatttaggcttctgtggctatctctgatgaggatacccacattggtggcaatcctagaagacacaacctagaagcactgatctgaggctcccagttgtctgaaaatgagacacagagagagagatgttgaaacaatgggaagggtatcctaggttgccagtcacctggaaaagtgtcttgagttgtgctgcaaactggacttggataatcctggcagcctctttgagcctcagttttcccacctgtaaaatgatatcactggtgtacttttatctggcctactctagctgcagaatcagtttttcatactttatgcagaagcataacacataaaaatatagaaatagagttgatctggagggggggtcactttcctctccaccctagagcctctacacactatcacttgcccacgtttacctgaaggattctgaagttcatggttttcacagagtccaccttgcaaatcttactgtgagatctctaaatcatcaaatctctctaagtcattaaagataccgtttcagtttatgcttctgggatggtatcactctggaacctctctccccttaaagcctccactgcttgtgttgttgttgttgttgctgctgctgctgctactactactactactactactactactactactactactactattactgttgctactgcttcttaaatcatggaggtataaatcacattcatataggatttatccttcaaaagtatacattcccatagctgtcttcccatagcagccatcacagtcaattgtatgccatgttcatggtcttaaaaagaaaccaatcatacatcaatagccagtgttctacctatattcccagttctacgttatcttcaacctatattcttcagatgtgcctgtttctgtttattgccttttacataataaaaaccaagcaataggtgggtggtaggtgtctgccttctttcacttagcataatattttcaagatccatgcatgttgtagcatgcactgttctttctatttgtgattaaataatattccaggatatatatctttgaccaattgttagcttggttatttggtatatatatatatacatatatgtagagagagagagtttttctaggcataatgtacatgtatttgcctctcttccattctgtttcaatattttttaatatatacatcttctgtgtgctatagtatccttcaaaacaagaacaaaaagaaagcaaagggttttttcttttaaggttggagtccaatttgtaaatttcatctcagagcttttgagtatacatcatgtctgagattcacaagaatgacgccccccacccccgccaccgccacaggagaagagagtgaatatcataggtctgacctctctgcagtcataggaggtccaaggtccaggtttatttgctactgccttgttaaggtgccacactccttgaacaggtagctaaacaagccatgtcactctgagctcaggacaattgagagaatggggagacggtgagtttgtttaaactctgctaagaatctcatcaaagctatggatccatttcccaggaagcatttataaacaatattcccgtgcagtttcagggaactgatagagtttcttagtccaaaccataaatctttgataaagacagttgatacaatacaataaagacagttgatacaatacaataagctcacccttgtcacaaagactctgactctcatgatcaccatgaattatttcttgcctaaactaaaatgatctcggcttaatgttggagtgttgttttcaccaattgtccagggattaaatcactagatcctatgacccttcagcttatctctcaaactgtgcactcttgaacaaaccagttaccgttgtttattgagtaacacataggatccagcatgcaatgcattgctatttaaaactattccggcttttgacagtggagatccattcccacaacttctaggtataagattaaaaagttgtgacacttagcggttaaacactggaatgtatttattgtaggcatagagtttaaaagcaggaaagactgcacattttttctaactcagcacttgttagatgaaaatcataactggtttgtacatattttccccagaaataatacgcaaatacccaagattaaagacccatctaacactgtattctaatcttttgttctttacctaaggatatttgctcccatacaataaggcctatcgggattttcttctaaatataatgagccagcagcacctaagtcaccagtgtgtgggaagtgaagcctcctagtgtagcccaaaatggtcaggatgaaaccatctgtaattttattgcatctccatggtctgatatgtcaactgtggcctgaagtggtccatagtatacaaaatggtaacacttatctttaaagtgaaaggaggatttgagcaaagattgactggcaacattctaaaactgagataagcatacttggaaaccatttgacttccattcccatgtgctgtgcactctggaataccaaccattaagcctgtattacagacctagtttctaattctggctgccacctggattccgtctccctcaacctgttttggactaggcactagtgagcggatacagtctccagttttacaatcacttcctgagtttcatcactgggataaagtctcatctaaaggcagctgttgagacatttgttcaccatacttttccatcttaaatatttattttttcattaaaatttgtgaaataccaatagagaggaaattgtgtattaaatagtttctcacttggcctagtgtgttttcatctcgtttccaaggtcagatggtcttaacagaaagataacgtacacacaatctgttccatgacaaggcaaaatgtgcagcgcaggaagtcaagtgggatgcttttcccgtagcaggcctggattcacagtcacttaagcccatccgatgcaaaagccaactccccattcttctcatgccactgaaaacctgtgcttcccttagttactactgccatgacttcagggtgtgggccaagtgaaaccaaagaagccacagagagaattgaaagatgcaaaatctgctaggtagcaagtagaatgggataaagaggcaatttacaatgggtttcatgacaacagctagcggggaattgggaacttagaaagtccctatgcacatgtgcccacatgttatgaagcttcctgtttgcccagaacaataagttacccatagagaacagagtaatggaggaggctcactgtggttccagaaaagcaagttagtcaaataattcacctatggcaggaaactctggcaaaacaaggatggattttgtcattacctaaatagcaatggggaattctttgatatctagcacttagcaacatgatttacacagctagtatcaaggcataattgctgtgcagtatatagagctgagatgtgtttagaaaaatgtgtacagccatgtgaccacatgctaatggactttaatgtgagtcctgcgggaaatagtaatatgaccatgttgtaattctctctctctctctctctctctctctctctctctctctctctctctctctctctctctctctctctcatcaaattcttactctatatcccaggctatcctcagactaaaaattctcttgccttaaccttctcccaccaaatgttaggattataggcatgagccaccaggccagttctacctagcttctacactgtgtgttcatgtatattcgtgtactatgccagtgtttgggtaggtctatgtcaattctatatccagaatataattctcattccactgcaatggtgggaaagctaagcagcagagacactgtgctcaagttaaccctgaaaaagagaggcagactaactataacaaaacacttcactttagggtagaggatgcttcaggccagagagtggttgctgtgcaagcctaagaacctaaattcaatcctcattatccacataaaaagctggatgtttgtgtgtgtgtgtgtgtgtgtgtgtgtgtctgtctgtgtgtgtgtgtgtgtctgtgtgtgtgtgtgagtgtgtgtgtctgtgagtgtgtgtgtgtgtgtgtgtgagtgtgtgtgtgtctctgtctgtgagtgtgtgtgtgtctgtgagtgtgtgtgtgtgtctgggagtgtgtgtgtgagtgtatctgtgtgtatgtgtgtgtatgtgtgtgtgagtgtgtgtctgtgtgtgtgtgtctgtgtgtttatgtgtgtgtatgagtgtgtgtgtctgtgcctgtgagtgtatgtaagtgtgtctgtgtgcgtgtgtgtgtgtgtgtgtgtgtctgtgtatttatgtgtgtgtatgagtgtgtgtgtctgtgcctgtgagtgtatgtaagtgtgtctgtgtgtttgtgtgtgtgtgcaagtatgtgtgtgttagtgtgtgtgtctgtgcctgtgagtgtatgtaagtgtgtctgtgtgtgtgtgtgtgtctgtccccctatgtgtgtgtgcaagtatgtgtgtgtgtgagtgtgtctgtgtgagagagagtgtgtgtgtgtgagagagagagagagagaggagagagagagagagtgtgtgtgtgtgtgtgtaatcccagcactagggaggcagtcataggaggctacacttgccttcttagcaaatcaagactgatgagagaccttgtggacagctcctgagaaatgacacccaagtagtcctctggcctccacaaacaaacatttatgagggtacacacacaccatactttattttataagcaggtgaagatattttttataccatggaggtcataatatttatgcacagcaaaagggagagatagtgggtctacatactaatcgatgcatgaaggcatactgtgcctcaataagtcacagggtctctgcctcatgtccaaacggaaggacatgttcctcttaagagacagattatccccaatgaccccttagacacaaaacccgggcctgaccctgtcttcatatacaaagaacaaggcagtctgtttttaccctctccaccaaggtttttaaaagaacatgtttaatctcattggtactttttgcttggttagaagccccttgtgtggtatttcatcttgtgctaactttcatatagcagctcttctggataagcataatatcctagttattttaataaatgtgactcaattacagcaatccaaagaaagtctagtgaaacaactctgtcacgtgacaacagaaagtaggaatatgattctggatcctatttcaatagctaaaaatgaatttggaaccctgtcagtattcccgtattcttttgatttaacattcttctttgtgactctagtacagaattctgtgaatttctttttttttttttttaaattcagctttggtttatgctatttactagtaaactgtcttggagctagcaatgtggtcaacaagggttctgattcgtcaggacaaaacgccttgggccatttgttttgctttttctccagtcaactggaaggaggggaggatgccttggtgatggtgtcctctgcttctctaccctttgtgacttcttgaggcacttgaatacgtgataatgtttgcattgcatttacagtaggcaaaaaatgttttcacatctagatcctcactagatcttcaaagtcaatgtacgaatctgatgtgctcagggccagaaaggggcttgggcccttagttcttaagggacataagtaaaacaaacaacagaccaggaaagagcttgtcattaagtttccttcttctttattgtcatatttttatgacccattattgatacactggatgtcttcatatgtgaagatatagagaaatacatggaatagtcaagttgaggcacttaatgtgtccactgctttaaacacacagagagagagagagagagaaagagagagagagagagagccattcaactatgtctcttgtctctcctggttattttgagacatggagctaaagacatattcaccaggacttgcctctcctcttctggagatcagtatctgtattggtcccaggctcccccaggttcaggtcttagtgctattacctgtttacagataaggaaactgagctcaatatgtaggcagtatggcttctggcccttgcactaggattttatccagttcttccaagtctaaaacaatgcctcatctgcttgcttctgcccagtcaccctgcttgccagcaagcacgtttgcagcacattcctcctgtcttatttctgtatgtctgcacagccttgtaatgctttatttaattttcatctttctgtgtgtccttttgtcctgatttttatttgcactgttgctttttcttttttgttcctaattaatcctcctcctgaaagtttgctaaagagtgggtaagtgcatttttctttccaaataacaatgtttttgtattgttgtttttgtgtaacggaaatacaaaataattcaaatggatactaaaatgttctaataaatgtcaaggagctggcatataataacttgtgttgaaattgcttttccttctcccctggcatttatagcagatttttgtttgtgtgggggtgtgtttttacattactatttaaatttaatcgacagtgccagtttgaaaaaactggaaaaacttagcttcagtctaagcagaaggtcgaacctgggtctgcttattgatgaacagaataaaagggaaggggaaaagtgtggcttgtagcgatggttcagaaagagactctacctggcctctgggtcaagactgtagctaaaactgatgggctctgaggcatataccaaaaaataaaataaaataaataaaataaaatacttagcaggtttttataaaattggtgtcttagtcaagttccctttggagggatcccactgtttaaactacatcccccatcagatccccagaaataccattcctctcccagtgtactagattgctattgaatcaagctttgtataatccagttcaacacactgctaggccaattaggccagccatgtgtgctggggtgtatgtgtgtttgtgtgtgtgtgtgtgtgtgtgtgtgtgtgtgtgtgtgtgtgtgtatacatcaaaggctatctaaagccttagacgagaaacaatgagcctgctgattttttaagtgcttcgggtctctctatcaaagagaagtcagaatcttattgctgcttctaggactatggaaacagactggatctgcaggccaggctttatttatagattctgatctaaagccagggacacaatgcccactgtcaactccctgacatgctaatgtgtgtctttctgtcttctttagcatcaataccattcaaaaatagatgaactaattgaagaaaccgttaaagaaatgatcacacttttggtggcaaaggtaaccttcagcttcaggtggaagggggcactgtcaatgttgctttgttgtgtctgcttttccattaaaatgtaacacactaaaaagttgctctggacactcacagctcccaaggaacaggactgcacatcacccagccccagcttgcgaggattttctgatgtgcgtgagctgtgtgaagatcaattgatgaagcggcatatgttaacttaataagaatgtgtccctaaacgcagcactaggttatgcgggaaatgtttgttttgtttctcagcactgacaaagttagattttaaaatacataaaatgaagcggtaataaggaattctgccatcctgaaaacccctttccctctagtttcacatgcagtgagagtcataataacacagaaaagtcagataaagctatttcagtcaccctcatgaattatagaattttaactaagtaatgctgaatgggaagacatttatatttgccagtgctaaacttctgtttctcccaaattactgataaaatacaaataaaaatagattggattaaatgtagtgctaatatgtaatgtaaagactgctttgcgcagtttgggatttcgaaaagtgcatttaatattatcgcatgctatatgcaactcaataatattttgtcactttgcacttctgtaacactccgtatttgcaatcacataataatgaagagaaagccggataagtcaaatattgccgtacaacggcagtcttttccttcctccaagtgagagtttaaaagatggaatgcagaaacgaacagggggctgagtcctagcctctaggtggctgggacatgctgttctttcttgtaaacaactacaatttgaaataatactttttcctttgtactgttttactagtttgtaactatattggaaggcgtactggcaaagttatccagatatgacgaggggactttgttttcttcgtttctgtcattcacggtgagtaaagcgtatcctgctctcccggttgttggtctggttcagttctggttctgcttgggtgagaggtaatgtgtggttttgcgcggcagtggcaaggtgtgttaattacattcaagcgctagtgtaacgtgttaacactggagaagaggcggggcattcattgccattaggccggtatgctgtccagttccacggcacttgtgaatagcctaccttcaactgccttggctatgacaggaaatgtagtgtgggccacgatttttaccagtaaatacttttagtaattgtatatggtgaccttcaggtcagttgtaactgcaaataccttttttatggcctttactctacgtaagttctggttttcttaactgagttagttgtatacagttcaagtccaggaaacctcatagagaaaggagtctccatctctaagtgagtgtgcttggtacacagcctcaggcgctgggagttgaagtaccgggcctttatagactgaaagtgcttgcagctagcgagcctccttaggaaaaggaattctctcattctgcctgcctgagctcaggagctgtttgcatttatagcttcctgagctgttgacatgtcctttccaaattctttgaagctccaattcagtgctaaacttgtgtaagaccaagggcaaaggtaaaagaaaaagaaaagcaggaggcagcagatttctgtggatgggtggtcagaggagagagccattcatcctgcttcactcccagttcctgccaagtaggtacagtaaaagtggtattggttctaggctgttttaacaacagtacaagaacagcaggcagcctaggagcctgtgtctgtagtaatctcccagtgagaatcagatgccagacaaggcccagaacatcagcatcatgggtacaaatccttatctttggaatccctaggagctgagttcaaatcctgatacaacactagccaactatgtgagcctgagtaggtctctgagcccaagtttcctcctgtaagggtatgagagatggataatatctcccacaatgccatagaatgagatgaaaccctcatggtctgagtttgtagtcggactcaattaaataacatcttttacaagtaatgaatatgattgtgataagatacaatcatacatgcatacaacttctttccagacatgtcctaaaaaggagtaaatttatgaacaaatataccctattttggcttttcctcagcctatagattctccttctatttaggcagatgttagctgataacatttcaagccattgctagatagcgttcgtcttcagcacacccagcttgttatgctgtttaactctgaccttcccaaatataaagataaatttaatccagaagtatgatgcccttcatgcctgctattcactgacaaagtgagttgattgggaaggggacaatgcaaagaaacattgaatccaatttcactctgaaaacatatgtgtaatgtgtcattctctgcaaagaaacctatctagcccactcctttgacaaagaaagtatcccagagacggggagtcatttgtctgaggtgataccgcaatatgtagagtggagactagaagccaactcccctgccagtttccaaccgctgagtggcctctggagagagtgggattctgctggtaaatgcctgatgctggaaggcagatgggcttgtgagtgggcaagattcacagagaaggatccagggcacatgagttggagacagacaaggcctcattcttcattgcaacagtggagatgacaaggaagtgggtgggataaagtgcactatctctgcaaacttctccgagtgcccagagactagtgctttgagacttcattttgagccagtgttttcacagcagtgtgcttgaacccatgacccaagaaggccccttttttgtttatggattccacttttgttcctggcaagaccctcctctgggatgaactctccaaaagatttgttagcaactggcccagcagcagccagatgaagaattcaggattccaggaattcccggggagagtgagaaacccagaccaaagtgtcccatgatgacttcccatctttctcacctagcctacgacattgtacagcctagaggcatgcccagcaatggtgccaccataccgagccttccagctctgttgctgggcctggaacttccctccttatgatactcctcccacacacttggccacctcatggccacaagcacccacttctcatttgcagcctatgatctcattgcctgccaggattccagtattagagatgagaactgaacttaggggtagtgagaatctctccacacatggattctgagttcctgcccaaattgcagaggacctctgaaggatgctggcagcccggtgatgttaacgtcccaggaacggaatagaggtggaagaggatagaggtggaagggtgggggctgtggtgaggggtggagtaaacaagatatgtgagaacaagtacaggaaccagcggagtgtgttcgggctcggacagaggtgcgcagcctgtgcggagtctggcatacttgcctttaactctgctcctattttctgattcctttctttgtgcacttaccacatccccacctcagcagggctgccaaagatgagccatgtgctcggccccccagaaagctgacgcatatcgacaaatatgccaccctgtcccccctctttctcctgctgagcgcctcctttgctgggtgggcttgattttgtggtccaagccagacattttggaaaacgtctgcagtggcgcagagcaggcaggaatatttatttctcatctccatctgcattgcttcctctcttggagaggagctgggggaggagggcggatgagatgtggcttctcctgccagcccaagaggcgcccaagcgcaccctcctttcctccctcaggggcctcagcagcagtagcagcctgggactgagggaggcaggcgcctctcgaacttttcaaagatcagcccagttggaagatatagttagcaaccatccacccattttccttgcctgcaagatgtgcttttatggcggatgactatttggaaaggactctgccttgtgggtagtctcatgctgttcttttaggaggccaaaaggcagggcaaacaggtgcccaggtccctctcccatagcatttaaatgcatcactcacccttgtccagggtttggcaagagcgctgctcctgaaatgaattcattttcccagtcagtcaccccaaattccttacaaagtacctctatgtcaggtgttgtgatggtgccggggtcacagcagtgctccaaaggatgttctctgccctttgggaggttacatttatccgaggagccagacaatcagaaagagaaagaatgaatgatcaagtggaaggaaacattgcctgggacataagctggagaaaaagggagggttgaggagatagtatttaagccaggacaacccctcaagatccttccagggaaccatgatcagagatttctggggccagctgtgaacaaagaggaagggaagggactatttcagagacagcagcagccaccaatggccacaaaacagggaagcaagagacatttctgcatcatgaccctgtaaggtggagtagggaggttttagagatggaaattggtttggagaggtcgaaggggaaactttggtgtggtatgttgtgctgaagactttaagggaaatgagtcccaagcttaattcagattcggaaagaaaggcaaccctaaatacataggaaggaagctcagctctgccccttagcatagacctaggtgacctggagcaatgtcccattccctacattttaattgccttagctgtggtaaataaattcaaacatctaaaataagtacaaaggcataacttgtgttcctcacgtcctcgctgagtgcctggcacagagctaaatgctctgaaagtatgtttctgggactctcagagcagctccgttctaccaacgctgtttagaaaatgttggaagcaaggctcagagaggttgggctccacctcaactccacctgagcagtcctgtacagccttcacggtggggtgaagacagacatgggaaggtctaactctcaccccacccccacaggtcaggaacagcagcccttccaaggcatcaggatttcagccagctacagttctccttccaaacacatcatttgttacttacagaacacgaggaataaagcccatgtcaaggcttccaggaacctaatccctactgtgtgtcctgtcttctgggtttctaattgctcacatcgactgttgtcattatcattgtcattgtcatcgtcagctctcttcctcgtcttcctcctcctcctcctcctcaccaagattatagttgtttttccacttgagagtgaaacaaagttgaaatggttgatccctctaaaagttgtgaccaaggctagagccagttcacatcgtcagcagtgactgcatttttcttttttgttttctgctttttttttccagagcaccctgaaacatgtctgtcactttggtaatgatcagaaatggagcaaagagttaacctctgtccagaaggaactgtggttgcagaagcaattggaggcatagagtagggtgagattttagaatagcttgctaatgtttccccggacagtattctgtttttgctttggcattagaaagcacccaggagaggaaaggtttttatgttgtgagctggtgataggacagagactatcattaaaggctaacagcatcaggctatcggctgctggattcctgtgctaaccagttagctaatacattctgagtggaaagtcctgcctcagatgctgtagcagcaggcgtgcctgtcaagactaacttactgacactatgaaatgatttctatgcatttttcttgagacatccttacagccagactctgccataggttcagttcatattataaataaagcacacttagttactctctaagccatatgactcttttattatggccagtataattgcctacatgtacagaactcatcaatgaaatcacctggtgatgcttttaaaaccaatccactgttactttattcctaagtgggaaaaataactatttggggggctgaaaagatacttagtgagtaaggacacttgctacacaacctggaggatgtgagttcatgtcccagcacccttgcagcaagcccagaatgggctggggacagaaacaggaggatttctggagcttgctatataaaatcttagccaagaaacatgacctctaggttcatggagagactctgcttcaaataaataagacaatgaaaaaggaaatcccatgcctttacacacacatacacacgcatacatataccacatgcaatgctcacactaaatgaataaaataaaatatgacaggcacaattattttatgaataacttagcctaattattccattttggaataacacccaggcaagagacttccatttccccactgcctttgtgcttctacataattaccagttttattttagtcctttcgtaaacacatttcttaatacatgctaacacactaagtactggggctcagtattaaataagagaaactattgctcttactctgtgtttacatgctggagatatattcccaacaagtaattagaaacatcattacttttcagagaaagaggaaattagtcagtgcagtggaattacagggcaaagattctcaacctcctcctctagaggccagcgaagaaaattacttggagggagtggacatgatcctgtgtgtacagttgtgtctgtagataaatatgcccatatgtgcatgtacatatggaagccacaagacaagcaggtgcctaggtaggctggccaaaacatgactatctctgccttctctatcaattgggttaggaatgagcactaccacacccatctttgtatatatgcatgatgggggtcaaacttaggtctccatgcttccatcacttcttaagccatctccccagccccagaagtgactcaaactagacctacaggagaattagcatttgacctggcaaggaagggatatggttaagacaaggcagagaggccagctccctggtataagtcagtggcaagctgtggtcttttgacactgaagctgtgagctgccattagaaggtgacttgaagagcctttcatattttcctaattcattttcctcatagccaactagccaagttcctgtgctcagaagcactggtctctagcctgcgctagtctctttcatcagccaccgccaaacatttcagaatgtggcatgggctttggggtctgtgatataatatttcatcacctatttggataccctcatttcagattgctgccatgacaattaacatgcctgctgactagagcaacatagagaagaaaaagacaagcatctgaaatcagctgtttcctttaatgttcttttgtaaaaacagctatctttgaaagcgaacatgagatagacacagtattttgttcagactctcaggtgctgatcaagctgctcacagaaactcaattgtgaaagaaatacctacaacatttgtatgcagtttcacatgagctataattaaaggtcgttgagtccaccttgacctccaaccagacacagtgggcccttattgacagaaacttaaagagagctggtgaaacccaggttgagagaatttgacaggttgttggccacttctgagatccggttcagttatctgcagagtaaggctgctgacgtcagtattggatctaggaaccatggactttttgtggtatcttgtatgtagcaggtgccctgtgaatagcacttctagagctgagctcagtttcctcagaagagtgaggaagttgaaatgaccccatctaaacatttaaacagctttcattagtgtagtagccagttctcctctaaggccagacttacctgcacacagggtgaagcaagtgattcgatagatttctgtgtccagaatttagaccccaaagatacttttcattacacttactacatagttagcattttctcttttattactcataatctttaggatgcttctttgtccattagaatattagttagggctatgagatagattcaatgttaaaagtcttgcctaccatgtatgtgaccctgtgttttatcctccaaaagagatgagagagagagnnnnnnnnnnnnnnnnnnnnnnnnnnnnnnnnnnnnnnnnnnnnnnnnnnnnngagagggagagggaggagagggagagagagagagagagattaccatgtctaacattgacatcgcttattcaatcagccatcatgttttgaatgagtgctataagtaaattactgaaccaaaagatgtagacacaagactttttagctaggcatggtggcatatgtctttattcccagtacatgagaggcaaagacaagggtatttctgtgagttcaaggccagcctattctacatagcgaattacaggatagtcagagctacatagaacctgtctcaaaaaaaatttctaaatgatgtatctgacatcatttctcacacacacacacacacacacacacacacacacacacacacacacacatcctataagttactacctagagtacattaataaaaggaacatttgagactttctgactttgtgttttcaatgattggcattgtctagttggttcctattgcctgtaagatccagttctctgttttgcttccaaatctccatgtttatattatatgttaggagcttgaaattgatcgtggtggggtttctctatactatcaaatttaaccaacataccaagaagaaaattggttcttgttgtttgaggggtttgttactgttgtctttttagagggaggcagaaatgagtcaagcataggatgtaaccacattgtatctaaggtgatgtcaatgttagatgttataaaaattctgctttaagtacccaaccacatgggagaaggtcattctttctgaactctcttttcatctttatttttacatcaagggataatgtttctatttaggccacattttgtactttctgacatgtatcctggggggcctcagctcaaccctctcaacaggtaaccatgtctgcctagatttaataaattcctgttatatatatcccttcccttatctagagtggtacaatgcattttccatgtagtcacgcaagttgtctgtctctttacctacctgaaaagaggaaagaaaaaaaaaaactccattacgcaacagagctagactgatatggtatccacatcagtgatggcttacatggtccgttgcttgaggactgaggagatggctcagtccgtactgaggggacctgctttcaatctccaggatccatgaaaaaagccagaggtgcgtccacacgcttatcagccccagagaattgatatctctggggttcattgaccaacaagcagagcctaatcaatgaactccaagtcccagtgagatagctgatctctggcacttatcacaaaccctagcaagaagggaaacttcagggacaacgttggtcccttcactcagaaggtgactatacgcaagagctcagtgaaagcactggactagaatgctccatggttagaaagaaaatgtttattggagctcaaactactaaggcttgtcggggtggggcagggacaaaatggggtggggggaagcaggtagattctatttgacaatcagggtgaagtctttgagctgaaccaggaactagatgcccttgcaggacttgttggcttttaagtgtgtattaaggtggggtcttggtaaacagaaatctgccttataatactcctgaggaaaactgaatttactcttcagcttacccagttacaattcttctatttgccaagtcagagttctttttgtttaggacattgtcaccagcactgccattttggaaaaccctctttggacataacatccccaactggagtccatcaacagagtccgtagccactcagcactagagcaagagcaagcattgacctcttggaatttgagttctggtcaacttcttgttgagagatgttcaaggcagaaaagtaaggcccacaggtgtgaggggcagcaaaaggagcttgcctgcttgcctggagagtcttcataattacaactttgcaattcacagctgagttttctctaaagatgcaagtatgtcatataaacaaacaaactgggaagcagtacactgtgacctttaggagggcaagccattaggtcagcccacactgtggctagttgtgggccttctgaggaagtgacattaaggaatgtcactgagcctggtctcctcatctgtcagtgtgatgtctgtcaagctcagcagtggcactgtgctcagcctcaactaggatagactaagcattcaagcatccttcaggcttaggggtatggagacaggctggctctaaaggaatccttgaggcttgtcaaattcctgtctcagaacagaggattagaacagaagtgaggaaaacttccagtttttaccagatgtctgttcagaaggttgagaccatactctccatagatgtaggtctctgagcacagcattccagcaaaggagacagaactgttctaaccattctccagcaaatgaggatgcagctgctgagcagggcgtggaacatgatgcttctgcttaaggagagacaaggtttcctaccatctgcccagctttccagcagtgctacagcccttttcttaaagaaaggcaggggctctgagtggtctgttggcatggcccgtggtacactcacattggtatcctttatctcaccacagcagttgacttagtatttgcattgctgcagtgaaacactaggaccaaaaagcaaactggagatgcaaaggtttattcggcgtacacttctacattgtagtccatcattgaaggaagccagacaggacaggaagctagaggcaggagtgattgatgcagaggccatgtaggggtactgcttactgctttgctcttcttagcctgctcagcatgctttcttatgaacccaggactcagggatgctaccactgataatcactaattaagaaaatgccctacaggcttgcctacaactagatcttatgggggcattttcttaattgaggtccctccattcagatgacttcagcatgtatcaaattgacataaaactattcagcacagtagttaaatcacagacgatcttatgaacatgcacaaaagccgagcaaccactgacagtcctgtagccaggacttggtgctcttgtctacagataggtggggaaagccaggaagtgctcctaccttccctggccctctagaaatctgcagtcatcctccatggggcaattcagagtgtccatgatagttacacaactatttatgaagttctatttgtggtggataaaacaatagtgatttctgttaccacagtcaccatttaatggttacctgcaagttatctcaaggaaaacatgacagtggccacactaataaccatcactcacagataaggaaaccggtgcttagagaagcagtctacacagaagtatgttacagcagtagatcctttgctgccagaccagagaagttccaaccccacctcttttccttcccagctgtgcttctgtggaagtgccttagcttcctggagcccggtctcgtattccccaaatcaggaaacaggaactcaagaattaagcgtgcacattaggcatccaggtaaacacatgtaggtaaatctgtccatatttcctgtatgacaaggtatcagtgcccagtgcatccatgttgcttatgatacaacagcaactaacttgtccccaaaagacagagtggcagaaagcaggagcagaagtgaaaatgtgccaactgttctcttttctattatctgaactttttaagatacttcccatatgtaggccatttcaggaaactttctgaaaacaatacaatacttcacctctcttctcaagcaccaattccaaaggccactgatcacttttttgagccatgagctacttatgagaaactgccaatgttcacagttgccacacctgtgaaaacagcacccagtagcactatgagaggattttccctctttttaattgtggccagatacacatgaccaaatgtactattttaactcttttgaagcattcaattggatggcaagattttcacggtgttaggcagccatctccctttctgtctgcaaagctcttttcatcttgaagagctcagctccgcactcctttatgccacattcgattcagggatcacatggactagaacacttcacaattggcccagtatgcccttgatctttggcaagcaataaagacatttcatcccctctggtggcacagttctgagaatccatcctgctgtctgtgattccacatacacttcaagggtaatgtttttttttttttcctccagtcctcagaaagcattggaagggattctcactgtcattgtcacttggccccaggcaggagccactgagacttgctcaactgctcacccgcacacacagtcccagtacaacccgcccactcgcacattctgtctcacccagtcaatcctcggctggcacttagctcacattcctcttcccaagacacactaagagcatgcagactagggctgggggatggccaagtgttgctttagccttagaagagggcatacattccatccaaaccatgactccgttgaagagatccaccaagaaagttgcctttcagaaagagacacacttcccacaaaaggcctttctccactggagtgttaaccattctacactcattttaccctttttaacaattcatcataaaataaaggtaaaaacatctcaaaaaataaaatagggaggctggcaacatagcttttactgccaagtccgaaagcctgagtgcagaccttagaagtacatatcattggagccatatttagggatatgccatccctttccattccgtttgtgccctgaagtgaaagtatgaaaactggaaattggggtgaatatggacaaatgtaggaagtcttgaaaaattagcagatgggcttcctaggaaacaggaaacttgtttctttgagctagtaattccagcagcaatgggacatcagccagcatgcctctatacccatactatcctgaaggcatctagcctcggccagtcttggaagccaagcaggataggacctggatagtgctgagatggaagagcagctaggatgtgatgagaggtcagcatgcccctttggaatagcctttgagcaacccctaaataacaaaagaggttagatgagtagcttgaagctagaaggttgctaggatagtcaatgtggtgactccttagagatagatacctaaatctctgcctggctgggagcatgtgccccacataggctgcgtgtctaattccgttatgcctttgcgaagtctccccactggtcatgctttattgtctggctcctactagatgctctttatcttgaactattttcttcccctgctactatagtttctcctagatacttatttccagaacttatatgaatactgaactattaatagtatttttcttttacccctagagtatttataaccctttcaaggtttgagaaatgtttcctgtctcacattcttactagaacctgagtcatatgccctctgagagtcccatttttcaaatctggaaggactctaagaagaaagcaactagtctgatcctcattgtaatagataaggaaatgaagccaacaaactaggccgctagccaaagcctaccaagtagttaatggtcaacacaggatgggaaattgatgctttctaattcttttcacacactaaactatcttccccttaagtctgtcctaatctacaagagggaaaattccatctgaaaattggaacataataagtatttctgactttggaagctacatggcctctgccacaactactcagctctcccctttgagtacaaatacagcaatggataatgtgtagataaacagacacacatgtgttcaaataaagctttatttctggatgttgaattatcagtttcaataattttcatctaatatagtattattctctttcaaccacttaaaaatgaaaaagccatctcaacttattgaacagtgaaaatcagacagtggactcaatttggcccatggaccatcttagccattggaaatgtatctggaatagccaattcccttgcagataagcatgagtgagttaaaccataataataatttagaaagatggttttgagttcttactgcatgccaggtgctctgctagcaccgtgtgtgatgccaacctgctgagtctcacaagcaccctcagaagaagatactgtttgtcctcatgtttcacagttgaagatgagatcatagaaactatggaaggctaagtgatttcaaaggccatggaactactaatgagtgtagttggtgttcgagctatatattttcctgtagtaactgctgagaattgtttaggctttctgagcctcagtattccaatctacaattaattggattaattagatataaagtgccctggctagtattatagtatatagtattatagtatgcccccagatacctgtagttgatacctctccatagtcttgagtgtttgaatacttggtccccagtcagtagcagagtttgggtgtgtttaggaagtatatcatggggaagtatagatgtttcaaaagccacatgctactgcaaaatcctatcctagactatcagacctttcccatagtccttctggggaatgtgtgcaagggatagcattgaggaactagaacaaaaggtggcactttattcaatggcttagttagctatcattgcaaagcatcctatgccagaaccattgatttaaagtgatcattgcacccagaaatgttgaagtgcatcttgtaatcctggaaattgggaagtagagatggtaagactgggagttcatgattaactaacaacatagtaagtttgaatccagcctggagtatgctagatcctatctcaaaaggaaatagaataattaatatattttgctaacagtttgttgggtttgtagtctcaggagagctgggacagaaagttgtttggctctgtccctgagttgtacccttagctgcatttggcagtggctgagctgggctgctactggatgtctgctaatgtggccgctttcttcattgggcttccttcccctagtgagggatgtcatccccgccaggtttttccaagcgatttgagcttctccacagtgtggcagccttctgatcgactcatttaaatggcagctcgctttctagagtgagaacacagacacctccaatcagaaaggacactgtgccacctctatcacaatctgtctgtcaatgctgtcaccggccagcctggtctcatggagaataggggaacagaatccaattctcagtggaggaggagtgaccatggagagggaggagcagaacctgggacaggaatgtttgaaaaggagtaacacaaagtgaactggacctcaggactgtgatccaatgtgaagatccatctacagtcagccaatctgtataacctttgtgagcttatacacaaggaggagagtcggagggaaggacgagtcctcaacctggggtatgctggtggaaagggggagataatcaggcccctttcatacctgaaatattctcactgtgagctggaagcaaccacattccagcacaggacaatgtaagggcccatgatccagttctctagcacacataaccaactgtgccaataactcacctccattacttctttaatgttttacctgaactaagagaattgatgcaagtgacatgcttgcaaccgtttcctgcatgtgccaggcacttaagaaatccctctcctaggctgcagagagggctcagtagagacttcaaatgaagagtcctgagttcaagtcctcagaacctgtataaggagcctggcataatgtcttgtacatataaacccaagcatagtgagatggcagaggcagaaccctgaagctcaaaggccatctagcctaacctacatgatgacattctaggccaatgaaagacctggcaaacaaaaaggtttgaagatgccttcaacaaccaaagttgtcctctatctactgggatacactcacatgcacacatgttcacacatatacatacacacataaacacacacacacatacagagacagacagacagacagacagacagacagactatgtacctctgcacctgcaagtgcacccatgcccatacacatgttaatatgtttttaaattaataaaccacaggacacactcacacatgaactgggctatgtattaccattacttctcttcctttaccagggagaaaattgatgtctggcccaccggggcagggacagaaccagatgacagccaaggcaatcaacctcctgatccccactttaagggaacagggaccctaaccccttctcatatgtgtggcgagtactagctcccttatatctaagacaccctcttttttttcttaatcatccactcagaatgctgggactcaaacacccacttctaaaaacttcaggaaacctctagcttaagtaaagtgtatcataccaaattccttctgatagttttttttttcttcaggcaacactgtgtgcctggaggtgaggaaagagaagagatattctgttccttgacatggtctattttctagggccaatgagatggttcagggaatagagagactgcagccaaatccaaggacctgggtttgatccctggaacatacatagtggagaaagagaacggactcagaaagtcatcctctgagtatacaggcaccttggcaccatgcatgcacacaggcacacacaaagagcgagagagacagagagatagagagacagagacagaaagacagagagactcaatgaaccaaccaatataataaaagttttttttttaaagaacctgtattccatagacgaagaaaatgatggatgaaaactgagctaggaagagagcttagctgaagaatggagttgattgaccaaagcactgttttactgaactgcctttacttaagtctcatccctcggatggtctgttttgaagacatgagaagaaggcaccaaatcctggcagctagccctggcactccatggtgctcgaactttgagatggtagggtggtcagcagtttcaaagcaaaggaagcctgacaggcaggggtggagtccactcacacagagactgtggggagaaagaacagcctaggcaatagctaatgcagttgtctgtgttcagatttctttttttcttccatctttgagtcttgtccaccagatttctgtatgaaaaaaaaaagacctaatccacttcttttttttttttctggtctgtgcattgatttaatagtatcaaaccctgaggtcctcatggtctgcacctgggttgcttttttcccctaatgaagcaggagaagtggtttaagcccctgcggggatcgctgtcaaagctacacaatgattaactcaggtccccttattaggaatggactgaagaaaatcccttagtcatcagcattggtgagtgttcaatgaaaagattaccttgggcacctgaaaaataatggcagtgctcaatagagggaccattaaaccggctacacacaccaagtcaggtgggagttgagggaattagctggaacacggaggcctaagaaacacttttggaccttctgccctgcccaagttagccctatgattatttaaacctctatgtgttctcctggagaggcattttagtttgtatctacacataaacatagatgtgtgtgtgtgtgtatgtgtgtgtgtgtgtgtgtgagagagagagagagagagagagagagagagagagaacacagctgaatgacaagtccaaatttctgtgacttcaagtcctattgtttattctcttagccttagttttttcaactgtaaaatgggaatattaataaggtccctgttcagaaggttcatgcatgaattaaatacacaacactcaacaattccaactcattaataagaagtaaacactcaaaactgggttttaacttattgttagttgttaaaaagcagctgagtatttgaagcttttgtgtgtttggatgtcatcaaagaagtgttggactcatggcctttgttctatcgctgtggcctttgttctttagctgcagcctttgttctatagtgactaagttgcaggcctgtggatgtgtgggctgtatctccacttccacagcctctcttgatttagatctccttttctgttctcatttcccaggactggttgtaccttgtgggtcagggccagcgagctaaggaatatgccagagaagggaacgatgatgtcctatgagaaggctggtcagaaagagtcccagggaaacaggaccagatgaagctaaacttcctgcctctcctttgagggcaagtgaacccctgctcggaaatgatgcatacctagtgcctgagggcaagtccttcttccctgtttccacacaactgggtcccagagaagggaaggtagcttcactaagcatataactgaggcagaaccctgagataatacccagagtacttggaaatatttagatatgctttgagaagaaacaggattctgcctgggtcctccagcctcagaattggctcagatacctgatagtactctggggagatcccagcttccttttcatagcgagaaattgccataggatagaggcgtggaatagctactaccagctgagtggggagtacccactctctgcagtaagctgctgttcccagcaggtccagtaacaatagctgctcttagtactattaacatgattggatggacttggctggatcatctcagtctctggcttccctttgagtaacattattactggtccacttacaaaggaggctcaaaggcaccaagctagaaaatgggctaaaagccagatttctaacccagacaatcctgaacccatactcttagacaatgagaagacttcttacagagttaaaaaagaaaagatattaaagatattgtgcgcacacacacacataaacacacacacacacagttttgataaccactgatgaaaaactccttaaagacagaagtttgcttcggaaagcaatctctttacccattaaggaatgtttatcatatatcacagacaatagacttggatagctgtcatttatttgattcagaggcagtacctagttcattctcagataatcatatggtgtgtgtgtgtgtgtgtgtgtgtgtctgtgtgtgtgtgtgtgtgtgtgtgtgtgtctgtgtgtgtgtctgtgcgtgcgcgcacacgagcacgtgcatcagtcgactacatggggtaggagtggtgcaaatggaagtcattgattggctcagcttgctgaccagagagcaccagagattccatcagtttccacctctttcttgacacgggctttggagagcagactcaagccttcatgctttgcaagacaaaatgttaccaactgagtcactccacagcctgcagacttggagtttgtgcagatgaatccaaggtcctagggactgagaagatctggtcattcttctttacccagaatgcaagtgacctaaaggcatgaaattgaaaagaactttggtgcttaagactgttctatggtatcacacagggaagggggtctctcctcctgctgctctaaaaagggggggaaggaagagttgaggagaagaaagaagaggggttgttgaccatttcctgcctcacgaagaggctaaaataagagaaggaaaggctttgtaaaggtaaaagaacagatctgcaaccttactcctagtgagagggaagacatgagcccccagaggtggcaagtctctgctgggatgatgctcactgggcaggccttctgggaccccactcttttcctcctcccttgccctgatttggtgatttggaactgtcatacgaatctgaagccaacaaggatgtgctttcaataaactactagaagattctagattctaatacttgtcactcatttcccaagcaaggggtcttctgctttactctccctctaaactatacctccagcctcccttcaactctaccctcagcatctttcctaaagtttaatgccacagcccaagacagtaacctacctctcaaatcacaataggagtacaatttcccctaaactattgtttgttctgttctaacgtggatagggaaaggtctgtaagatctggtggatgaccagatgaaggataagccaagaaagagctaaggagatggctcacaaagcctgatgacctgagtccactccccactgcccacatggaaggcagattcagcaatatcctcctatggccccagtactggaaaaggaaagacagaaagattcctggggcttacatgccagccaacttagccagaccactgaactccaaattcaaaaagcaagtacatggagaagcatccaaaaggtgcctagtgttcatctctggcctacacacacacacacacacacacgtatgtgtgtgtgtgtgtgtgtgtgtgtgtgtgcacatgtgtgcatgaatatataagctgggactggaaactgggacagtctaagggtacatgaagttttcattcatgtcacaagcttgcctggcctccccaaaggaatagaatttgtaaggaaaagaatttgactggtgtcagtctctggtaaatggtgagaaggcgtgcttaaaggttgatcatttcagctgtagcgaaactcctaccaactgctaagcatcaacttgaccgagcaaaggaggtgctttctcactgagaacagctctttagccagcgcctgctctgaccactgatgcttctgctcctatggctttcttttccccaagcactgaagagacgagaaattccagagtggtagcctgggcttagtaaatgtgcgtgtatagctacctggcttccctctcttgtggctgagaacatggacacataaattcctaaaacttgagcccatcaagatattttgcaaagtgaaaaacatctagtaatttgtagataacattgtatgtgggggaaacatgtgtgagtcgggggtgcttgatttacgagtgtttggaataggataggaatggacagatttatagagggaatcactgtgtgtaccagaaaagtgtctcttctcctagtagtttttacaaagaattcacctccaaccactactgtattgaccccagcagaggttcagggtctatgggtttgtccttagcctcaccactactgtattgatcccagcagaggttcagggtctatgggtttgttccttagcctccctgaaaaggttaagccagcgctgttcttatgttctccctctggttcctgctgtccagatttccccttccaagccaggcagccttagctgctgacagcagagtaaggctgaactagtctttgttcaagtaacattttgtggcggtcagatgctgatccaaaagaaaccaaattataattgcaatcagtgtcactctcagagaagctgtagtaagaagaaactggaaccatcaaggtgccgtgaccttagtggagaagtgaaagcatgggttgccatgaagtagccaatggatgtgtgtatcccccactttaccacacacattctcatgtttcctcatgtcatcagaccagcagtcatactgagtacacagctttgttgccctgttccagaactctagaaagcagcctgaaggacttggcaggatttccccatggcaaaagcaaattttgaatctcaaggtagaagtctttctacactagtatagatttcccaagcacctggaactcaccagatttgcttatcagaacttaattccagatggttccatgcttagggcatccctggactttgtgtcaattcatgccatctcagtgactggacttctcatgattactatcttccattttcaggctcagagagataaagtctcaagtgtgtcacagagtgtgcatgtggtagcgctagactggaacccaggactgaatccacactccttgttccaacactactctctggcacccaaaaatgaatttcataaccattccctgtatttttcatacggatttttagtgcctaaaaccaaaagtcatatggcaacagctttgctgttagcccaaaaaattctgcttgaaaaccttgtggaaaaccatgcatgacttttatgctaaaaggcttaccacatcccttctacttaaaagtctgaactatcagacaccaagcttggaagaattcaggacaacctgcagccaaattataaagactccaggtgccaggaatgctgacactcttgattactaatatagacttaagggcactctcccagtaagcccaggtttaggcactcacctctctattttaaaggaagggaggaaaatgccaaacaccggtgccagcaaaagaacctgaaactgtaaaactgctcactgtccccaaacagtggtcatggcttgaaacaaatggagtaattttcttttcagtgacttttgtttttcctggtcagttttgtgaattggaataggcacatcatctgaactcagatggtgtctgagctgtggacaggaaacacaaacccttgcctaatatcctcctttctgtcttccttaggtgaaggcagcttccaagtatgtggacgtgcctgtgagtatctgaatattcagcactgcttgtggttgggttggtttcacttttctggtttcatggggtcttgtctgagatttgtttgtttgggatttttgagacagggtctctctgtatctctggccagcctagaactatgtagaccaggccaacttggaacatgcagagactgcctgtatctgtacccagtgctgggattaaaagactgtgtcctcttttgtgcttttcttccacccatgagtatgtgagcatcatgttttgtttgatggtatctgtttctgtgctttgctttcttcacaccggatgctgtcctcataccttgcccctaagctctatatggaccctcaaagtaaaagattgggaccatttttctccattgagaagaaggcatggtttcctgtatcagaaagaaaggaccaatgtgtgggttaacccagctctctcttgcttttgttcctctgcttccctgtgactctttctgctcatagagaatgcaccccttacagccctcagttataaatttcaacaaggtttccagtatttttttgatttaaacaaataaattctgaatttgttcatttgggggtcaactcgcaattgttttaaggaaaacttacaaaactgtccagaattagtactggcctcattaatgaagagaaccctcaaagttcacagagaaggcacttgaagttgcccaaatttacatttaaattgaggttaagtactgcacatgaatgctaaagtgtgggattacctgagacaaatcagaagacatttatagacagactttgccctgcctattagcaaaataaaattggagagatttttaaatatattcctataaaggggaaaagaaaatgaagttgtttctccatttctaacaaaagtggtgtgagtctattataaaatattaaatttaggagcttatctcaacagtcgccgaggggctggtcctgagccgttctcattctgaacgtggttaagtaccctccttgttcaaatacttatttgtgaaaatttgtttttttctaaaaggatttatattaacatttaaattcatttccccaggaagctaagtgtgtaatggtttattggcttatttctcaaaggaagacaaaatggaacattggagtgactgtggcattagcatgcattttgtttgtttaatgaaagaatgtacaatcaataattatgtttgaatttatacaatacctctcatcaaggggccctgactccttcccatcagcaggagaatggggaacagaaaaggctcacagagccacaactaggagagcattttactcctttaagctcctttagtacaaactctccctttatgtgaagtctctgtctatgctattccatctttaaaatgaagacacctcacagctaggtgtgccccatgtgtggccctcacacagcacttcctagccctccgtagaagtgcatgcagtgaagggcatttcagggtgtgacgatacccagagcaaaggatgcatgcactcgctgccttagcactatcctccactgggcttcaagagtgcctagctcccagcacagagatctgatgtcttcagcttatgcctcaaaccagagaggcgatcagatagtaacagtagattctattagaatagctattctattcaatgaggctcaatatatgaagaaatttgatttagcatcagggttaacaatcaaaccacatgagagccacgttttagaaatgtcagaaaaagctcaatgttagcaatgttttatgcctcaacctaatagcttcccaggccaggtctagctttattctgaagaaggggtaaaatggacttgatactagtgagtgttttctaaggtcagtaattgtaaagacacttgtccatggatggtgccatgctagaaatttgaggctatgaaagaacagaaatgactttgctgagtttccttctggaggaagcttagctcccaatgtggtttatcttccattgatgacacagagtgtaattataaccatctcagtcaagcctgtgactcacccactacgtgcccatcattgttttaggaccatcaacacttactctttggaacttctccattttaaagacgggaaaaggaaaatggaggcttactcactctgggagggccaggcagctgacagcagtgcagctcatactacaaactatgctcttaaacactgtcacactacaagatgagtttagttaatgcacagacacatagttgagtgattattctagtattagaaaataatgtaatcagtagaccaaatccataatggtaccaaaagctaatggcttaggacaatgctacatgttgaaagcaaatggattaaatgtttacttttatggctggtcgcagtatactaagtattacagaaaataaataattccatagaaaatgattccacacaatacacatatgaatatgtcatgtttacatacagtaagtaatcatttacttttgaagacagtcctgtaaggggccatcattcatttcctcctgttcatcagaagaggaaactgaagcacctaaaaggttaaatagtatgcgcagggtcacctgggcaagaagtaggcagggaagagtcagtagcatggggtagaacctgtctactttagtttccaagataccatgtgcacaaaatcaaccttctagtactgtttacaccttggaaacagcaaagcagtgcaaataagggagatggtggataggttggtgttgggtgggtgggtagatgagtcatttggggtttttgaagaaccacttcacttccataccaggatgtacagcagtaagacatggcaagaatttgggcattgtttgatgacattttcatagatttctagctctcatagaaagtggttctgattcagtggctctgggatggagcctttcaaatctttctaaaatgtgtttcccattcttctgtaaaagaatgaaaacctgtgggctaagtcagtaattcttgacccaaaacacctagatgtttttgttttagttgcttggcagattctgtgggcccaggcaccatttctgtaaagttttgtaggccctttggtatttgcagccaggcttataagcccaaatgcaatcaccttaaatcccgtctctctgtaaactctttgttttatattataaggtttctgacacagtttggatttacttccatgtgtaagccacaagtttattatcacaatgagtttttgcttactgagtcccactagcagaaagtggcactattccccataactcagaacatttcttcctcttgatacagtgtttgatcctttcttgtacaattggcattcatactaaagacatacttaagatgccaaaaatcagggtttgtattccctgcctagaactatctggcaggaactgttgaagatgaaaacgtcccatttgaccaaatccattggtgtttttatttctaaactatgtcttccgcgtgtggtaatgtcagctccacagtaatctttgtgtatttgtttagatgctttctgaagtctgtgttctagtctgtccatctgtcacaggcatatctaaaagccaccacctaaaggctgatccaagcaggaagacacagtactgatacaatccctaacttacctagtgacattagttgttcagtcaggtgttgtgtttatcttgtaactaatacttagaagtcagttttcttatctgtcagaacttttgattttagtttaatacttaataatacttaacaacaaatacttaaaatgcatttattatacgtctttcctgccttttatacccctgtcactttaattgatgtactgattgtaactgaatcttgtcttagggactcatgttcaccaccatgaccacctcgatatggtaccagcatagtgctccctgtaagtctttccagggtataggctcttttccccaggagtcccaacagttggtgagcatgagtgtctgatgaggcagtctgtcctcccagaatagcactgtctcattagtacacaattcccagacaatttttttcttccgtctcctccatttctagttcatcaagagatggaagcccaacttgtttgaatcagatgtggttctcacatcaaaggaaggcagttgtgaacaggagaaagaaaactaattgtgcagagactgcatttgtatctgtttattgtctctaccaggtctccttttcctttctaagtcaaaagtagatgctaatagtaaaatttaatatcaaggggaggggataattgcagtataaatctatattgcaatgtgtaattttcaagacatttttatatacattattatagctgccagtcatagtccttgaaggtcagataaagagatactaatcccactctgaggctccataactagggtctgtagatggtcaaatggtctgcatattatttgggaagaggtaaggatccacacagtgggatgaagagctctaaaagggaggtttctggaggatctggtcatccattcatgaatttgtccatccagcaaatatgtactgagtacctacgaggtaccaggcattgttctattccggtgtgctaagaatataattaaagattaaccaaagccctgctctttgtggagcttttgttcttagaggaaaagccagataaaatcccaaagtttaacacatgatgaaatatctattggtaaatggtgcaatgatagataaataaatcagtaagagtcaaaccaaacagattttttaatcaggagttctacatgtcaaatacatgccctcttaaggaagtgagttttcctgaaagagaagatatgctgaagatctcagcattataaaacactgttccctacatagtaagttactaagagtggctacatctgacttttttttcatctagtctctaagatgtacccaggaaaaggctatatagcaagtatccccaggaagatatgaagtactaataataagtttctcaggttcctcaggtaaggatcccattcctaagaatatcttttggtgtgcagctgccaaagagatgggagagatatacctgcttagaactggttccatctcattggagaactactgttgttttgcatcataaaactggtacaattacaggaccatcatggaaactgctccatgcatttgctgaaaattgcttagaagtgtaacatttgatactgtggctttggggtgtccctcattgtttttcaaattaataccttgtcattgtttcagcatgtgttaagaaatgttactagtatcctgggggccaagcattggccctttgcttgataattgtaagctttgtatcaggagaaaaaaaaatacagtcctactgtttccaacccttcctcattttcaccctggaaattacacagaagtgttaactaacttcaatttgcagtgcctgacagtcacgtcttgtagagaaatgatactttgtgatctaaggtaaatcatagtaatgaaaactaatcttagagttattagcaaacatacatctctactgtagacatttaagggatctatggcagctctcctaatgacccatattacagtgttttaataggtttctttggagataactttgatttctgacatctcaagcagtgcacattctggtttggttttatttgtatgttattttttcgaaataaatcattccctacctactggatgcacaacctgcctacctctccagaaaatctaattaatctaaaaaacagcccccctttccctgcctttcttcttttcttcctctctctctctctctctctctctctctctctctctctctctctctctctctccccctctctctttcactcactcactcattcattcatttttccatgcctaaaattaccaggctgcaatagaaggcaaaggcaagtggccgaacgtcttctctgagttaagtacccacaaaaactcaccagctgttcttagactgaactgccctccagtgggctttgaattgaagggaattgtctgaaatagggtttctgaagtacattttatattttgttttacacagagaaaaggataatagaatacagaatacacttggatttttctaacagtagtttctatttaaaacaaagccagagaatgccccctgggtcataagaattgtgtctatcggctagttagagagagagagagagatccctataaaattgtgttcagatcttctgataagcatgaaggtgcagtattaactcctcatccagaactagacagatgtggtcatgaaaacagagggaagagcgcaggagccatgggaagagggatggtgagcgggctaactgggaactctcaagatctgaagatccatgtgcatatttgtttctttacagaaacccgggatggacgtggccgacgcctacgtgactttcgtccgccattctcaggatgtccttcgtgataaggtcaatgaggagatgtatatagaaaggttatttgatgtaagtaaatgccttcccctccttgcagcccaaggaggggagcttccaaaatgtgacaaaatgagagacaggaggataagtcacattttgagaaaattgattggtcctgattcaaagagaatctctcctctccctctgccttaggctcttgtgtctctgccgtgtctgttatcctgcatcctgcatcctggtgtggctgtgtctgcatcccagtctgtgtgatatgtggacggtacacagcctcccagcaagcaggcacattctgcacgaagctggagaggcagactccttgaactggcaaaagccttcttccatccccattctcctccttgcaatctggccgtttgtagaggacatgttcccactggtgatgctgagaccagcaccacctatcctgggggtagtgcctccttgatgccagctgtggtatgcagatgtgcaataaatgtcacattgttatgtcttccaacgtgttagaacttctgtagaacgagacaacttccatcctgggtgttgccaaaggcttatatgtgagtcacttggtcagttccttttgtaatccatggtgcttcctgtccatccacctacctcagtaagtccagtgaaaaccaaatgcacggcggggcaggggggcaggggagtgccatgtcaatgcaaaccaaaacacagaaaatgcaggcttccttgcacccacagaagtagctctcaggaagacttattgccactgcaaagtaagccactgagatcaaaaggcattgatctcaaactgtctgcccatctgaagccattgcagatagagttacctcatgtagccaggtacattgcttctaggttcccccaaatctacctgcaaagacctggccagagtgcactggagatgacgtcctcgtcctcgtctactccctccccctgaaccgtgggcctcctgtccaggctttcgtcattgtaatgccagccggaacattactgtttggctcaactgtggaacccttgtttctgtatttttcccgtaactgtgttcaccaattgacgctgcgttttgtatgtttttgtcccgtagctaaatgagctcattgttggcaccgctctctgattctgactttctatgctttgtcttccagctcattgactttcctggtgtgctcaaaaggcttctttctgtctcctcttctcttctcttctcttctcttctcttctcttctcttctcttctcttctcttctcttctcttctctcctctcctnnnnnnnnnnnnnnnnnnnnnnnnnnnnnnnnnnnnnnnnnnnnnnnnnnnnnnnnnnnnnnnnnnnnnnnnnnnnnnnnnnnnnnnnnnaaactcaccagtggggcctcccctcatacatgcaaaaagttcaccagtggggcctccccctctctgcatgcgtgcctctagcaaaggcctgagcccagttagtctgggggaactgttgcccatccaataggcattgaaaacagctgcagcagcaccctcaggtctatgcctagacgtgtagactctgcccatctccactgaatccaagtccaaactacaaattttcaagaagcttgtgggtggctcttttcaatgcctaggttgccttggttttctgtttttctttgatggtatcttctggtattcagctttatggtgtgtgtgtgtgtgtgtgtgtgtgtgtgtgtgtgtgtgtgtgtattcctctatgaatttgtgtgcaaataacctatgatccctgaaactttaaaacatctagtacagaatctgaagcttactctctgatttagcctggctcttcactgacaaatgatccacctttctactacttttttaaaagtataaatacaaggaggaatttttgtttgaaggtattcctgccgaaggctgtgaggcaaatggtcttttgagtggctctttgtatgggaattgcaatcaaatcttcacttggaagttaaaagggagccttatctggcacagatggggaaaatggacttcctaactaggagaacacaagcacattccagccctctgggctttagtgtgaaccgataattaaaagaaatattcctaatatactttgcagaagcaagttctgttttggggtgtttgtggtggggaggtagtggttttcaaaaattcacaagtagtaatagtccactgagccagcatctatggcagcagtaaatctctgagaaaccacacacacgcacacattacacatacagagtttaatttcagattgccccaattttcttttcccaatacaatctttactctcctcctctgagtggatgattttgccactctaaccatgataactcttctatgcatttcaccctaaccttatatagagaaaaaaaaatcactcttttaaaagcttattcagacttgaatttcttggccatttacttccttattctccaaataaccaggtcccctaatttacggattctatcggtgctaagcaacctaactgtgatacaaaaaaaaaaaaaaaaagttattgaatctgtcatggatttaaaacatttgtcatttaaaaacccagagcttctccaaagcttcattaccatgcagcttcggtaatttaattcagtacttactgtttttctataatctagcggcaaatcatcagattaccaacatgtttgattattttcggcttctgtttcctcaagcatggtgtttactcctttgcatacatgctctgttaaactcttgtgtccagtgagatgaactggtaacgggaatatcgaagcaaaaggggtctcatgaaagctgccagtccacagttcttattacagtgaactaacgctctctaccccgctctctaatgatagggtcctgggatggcttcctaaacaattggcagaaaactattgagaaatacttgttgatctgagatatttctcttccaaattgttgcattttgataaatggcagaaatgaataatagcaaattagcattttgaatgatgaaaaaatatagatctctgagattgtttgcggtttgggggttgttggttctgactgccgtgtctctccggttctcttcctgctggcatctgtcacttgagaagcatgttctgagactccttgttgtgtgtttccgtgtttccagtcttagctttgtttacctgataaatcccctgagatcttgttctttggtatctttttccaccctccctattactttgtgcacccttgcaggaaggctggatggcttttgatatatgtttgtgagaaaaatttggaattctagctggtcatgtattggcttgtttgatgttgtaacaaggttgcttgccggtgatttctgagctgggcttgttctttttttctcctctgcttcatcgctgtattttggctgggagcgggggtttgtgggagattgtcagagcagcagtgcgggctctgtgtgtgatgctctgaattgtgtatttactttattatataacttaagagcagactttccacattaatctctaccattttaaaaaatcaagcattctgtaggattttggagaaatgcatttagatatagtactgcctaaacagattttttttccagtgaaagtttccctgtttagtaacatagttgctttatatattctttctataaagtaccaacattatatattcaataatatatctttaagactgacttcatcaatttaaaataatagtctgatgaagacgaatcccaggaccattccccatggtacttttagatgccaaacaaacattcttatctgctttttttatttttcagggaaaaagaatgaagcacaattatactgttttcacttgctgaaaaataagattttaatatttagacacaaaatattcagacatttaaatgaagtgaatatcataataagtgtagcagtggattaaaatcatttcagaggagctaaatttttagaggaaaattgcattagtctaagattcgagaggaagctttgcctccttgtcaattatcgatgctttataaagaaaataaaaagcagagatcgcaataagctttgtgttctgaaagtagcagctaagggaggatgctcaggctggagtaatagcttgcctttcctccgcctttggtgattagttcagcatctccctcaaaacaaaacaaaacaaaacaaaacaaaggcgagagagagagagagagagagagagagagagagagagagagaaaggaagaaagggagaaaggaagaaagaaaggaagaaagaaagagagagaaggaaggaagagaaggaaggaagggagagagagagaaagaaagaaaggtgctttctgaaattagacatcagatcaagagaagcacctaagatttcaaggtctaagcaaaaattaatttattttctttcctccttgtacttcttgaagatacagactgagaagaaaatcgggattaaaagagatgtgcttagggtgaattcatctgcttaaacctcgcaggctcaaagatgaatgattaaaaagccatctcaaacttggccggagtccacgctgctggtaatgccgcatccgctccagctttctcctgccggccccgtgtcactgtgaaccagacccaggaacatttgactagagatgatacatggattatctaggtcaattatacacttaatctgccttctggaggattaagcatttacagatagactctgcatttggcttctccctggcagttatcagatcaggaaaaggccccttatcacacagccttgtgcgagcttaatcaggcagtgtggacagattcaggggctctgccgcctggcattctccgccttgcacagattcccatttgctgttccattttcaaatcgagtatttgttcactttacgtggcagcacaataattgggtgtgaatattttcctctaaaacggtaatttgaaacatgaaccctctgcctattaaaatatgcttcctggctttatatacgaatctactgatgaccttgttttaatagccgtattaaattataagggcctggtgcgtgaatgtatgtcaatcaaaataggaaccacgccgctgcaggaagtaaggactgaagatgggatccaaggagaacgttgtgttactaaatctgtaaggtaggccaccaacttccaggtgagggagctgctctgaaagcaggcagcagggaaaggtgagcaggtctccaggacagagtgtgccatcctaaaccctgggagcctgagttctctctgctttagcagtagccgccttgaatacccagtatctggacttccaatgtgatgatgacaggcactgctcctagaccatcagatcagatctgcatgacattagaggtttttaatctcttggagccttggctgattcatctaggtaacagggatgataataagaggaccttcctcggggcatttcgggcatttcgttgttaggagagtgagatgtcaccgccaggcgcagcatcggcaactaaggactcatccggtaagtgttagctacctccctccttattctcatcttaacactggaacgaaagccctttcaagactggtttgtcttgctaaatgaaactccatacctgttctgaggactgtgagcacctctctggtgcttaaggtggtaacctcaagcttgcttatattcctccttgtttggtagcctggttttctcttacttttgctaaaacatatttcagaagcagccagagcagtgttaagaatgatagttagaattaagccagaatggaatagaagcctctagttgcttctctaagctcagcctagtctgtcaggtccccttaccctcaacccctattcccaccccaaactccaccctttgcccccacccccacccctgggtaaacagacttgtaatagtttaaaattcaacttctggtggatgccagcctttgaactagagccttgtacgcactgggcaagtgccctaccgctgagctgcatccccaacctggagcaaactttatcattgtgtcgggagcaccatctggcaaatcttgttcactcaggtgattcagaaatgagctggcatcaagccctgacaaacctgtggccaattagaaaaacagaactcggcctccaggaaggttgttttaacagggacctgagaaagaggggtaatagataactcctaattgttagaactaattgttagaatacacgatgtgtatactgtaaacattttggaaacacagccaagcaaaactaagaacattgagatgtcatgttcccaaaacccaagaatggtgaactggatatttattcttttaattttttcctaattagattcattgtgtgtgtttttccaaaagaagtaagcaagaattgctgtttcagttgacagtctctgagttccatgccaataagtgttcacctaatatgctgtctgtattcagaccttcccacttgtcccctaatactctttgtaagaagtttgtgagaaccagggtcccatgccaagcaacatgtgtgggcaagggtgtgatgtcacatacatttcctctcagctagcactggccctctttccacgctcctgacttggtagagggaccaccgtgccaattgctttgcagactcgaggggtttattaccatctaaacatagaactcatttgttgagaagaaaaaaatcaagctgaattcaaccaagtagttcttttaagcataattagtaacttagcagaaaccaggtttttttaaaagctgttctctgcatataaggagaatctctgaagctagttttcaaagtgggggtgcagggtaggcaaactgaaagagaactgcaaaggccaccttccaagtcagccaggtaaggagaacagggctgttttatgggacacatacttacacctggcctggatgaatgaatctgtgcggaggggatcagcatgtgtatgtgcacatgtgtagagaccacgggtcagtatttgatatcttccacaatggctcacctcttactctttaagatgtggtctctgctgaccctgcagctctccagctcagccagactgttagccagtgagccttgagcctccgttatcctcaccccttttccctccccactattggaatcacacaaatcagtaacagcatacgtagccttttcatgtggcttctggggttgagctcacttgcataatagcaagcatgtgagtccccttcctgccctgtgttccggtatttcttaagttattgtgactgcttgactgaagcatgggcttggcaaatttgacatacatgtgcacatatataccattaggaagacttctgagttaattctcaggttgttgctgatgttatcaacctaaaatgaagtgtctgtgtcagtctgatgctgtacttttttatactttcagatcatatttaaattgaactgtaaccttatcgcttccatctctaggggactatatatgtacaaactggaaagtcgactaaccgcccagtcaaggaagggtacacagttgattctttcactacttggggctttgagccccaaaataaattctggtattaaaattttgatctgagacaggacttagaagagacagaaaggatacaggagtaggcagaggagaaggaatgagaagagagtttttatacatgcctctctccttaggaattaatttttcctgttacacagagacatacaacaggtaaatgtgtgactatgcatgtaatatgtgctatacaaaaaacagaacgtgacatatgcattctatctttaaaggaaatgagttataattgcttaaaaagaatactaactacacatatttaaattataaaccaatccagctcatcttcaaattatctaccctcccagccacccaaagactcagtggcttggagcttacctcccgttatggacttgtgctttgcacagatttggttgtattcacttcccttcttgccatgtgtgtagtctgggccaggtctttagccaatggaataagcttctgctggtagattttttttttaagatgatagaagtaagctttactaagatgggggtgaaaggagaagattggaggatgttttgatgcctctagtttcctgttgcaattaattgctatgcaaatataagtcacctcttactctgggacctccacaatagacaataacataaaataatagttattaattcctttgaaattggaatcttagctatagaaagttatttattttttgttctggggatggtgcccagagctttgtatgtgtgaggcaagtactttaccactacctacagcccagcctcacaggcacatttctatcccacctggacatgggcattcttttctctgtgctgggtggcttgaggtttaagcaggcttggacaaagaaaagataggagaccatttctagattcagattaattatataaaatgggagatctctcttcaaggggaattgagtggttttttttttccttgctagcacactgacagatttacactgcagtaacatatcttgaaataggttttctaggtccagctacttccttccaaggctatccatccatttaaataaatcttgcttactctagggcaaataaatcttctataaaaccaacctttctttttctctggagcccgtgtgctaccaagggtttaactgattgtctttatgagaacagctttctctattccaggagacatttggtaaagacagttaatttgttttcttttccagaggagaatgttctattaatcatcctaagaagttagaatgatttctctgttacattagggtcacagtatccgtgttaacctgacctgcacaatacttttgtgtcttagaaaaggtttctctaattttcttatggcagactagtgccatggaagctggaagttacattcctaagcatgttactcatgcacaactgtgcatgtacatacacacacacacacacacacacacacacacacatgttcatacacatgcacacacaaacacatggaatatccaaggtacattctgtggaacaaatatcatcacattctgttagagtagataagatatactgttaatatttctcattgattaaccagtaaactatttctgtctctgctccataaaggctaaggctactttttcaaggtttcaactactaggccctaagccagagtttttactcaaagcttgctgcattttgttattctttggggttttggggtggggcgggttgtttggtgttaccctagcagaaacttacatagaccaggctggcctctaagttgcagcaattcttctgtctctgccacagatatgaaccaccataccactctctaattttgtccttaatgataggttataaaatattatctccaagttcctggcactccgactatagtcagtggtccccagcatatcatcaatgagatattgtagaagctgcatggtattagccttagacttagctgcactcaaccaggatcctctggcatttcaaatataaaccaaagttcaaaagatactaagcaaacccagtgatttccaaacttacttggaagaagtaaaactaatatcagtgatagaatactcaactagcatgcatgaatcttacatacacattaagaaataatttttaaaaaagaacaaatgggggctagagagatgtctcagaggttaaaagcactgactgctcttccagaggtcctgagttcaattcccagcaactacatggtggctcacaaccatctgtaatgggatccaataccgtcttctgctatgagtgaagacagctacagtgtactcacatacacaaataaatagatcttaaaaaaaaaaaccaacgtaactgcagttcagtttaagcaccattaggacacactcacacacaatacacatactcacatgcacatacacacatacacatatgtatgtacaaatgcacacacacgcatacatacatactcacatacatacacacgtacacacagcttttaaaccaatatttaccattattgcatgtattggctctgatatgttccattccacctttcaaaaatattgatgataacaaaatttcacttgaacaggttacattcttcagtttctaagacattatttagaatgaagtttctcatacttgatcatattgacattttgagctatgtaattctttgttgtgggaactattctatattttaaaggatgaagtcacattggtgatttctgcttgagatgctagcagcaatcgccatcccccaaactgtgaaaacaaatgtctccaggtaggactacatttccaccggcagggcaaaataaatcactactgtttgtgagccactgatctggaaggaaagaggtcatacaggataacctcttagaggaaggtcaaccttccctctgcatccccacgatctcacatgagtttacgaggatgctttggtgatgacaacaatgatgagctgatttctcatcagaatccttactcaccaagcccattgtccaccagaagttatttcaactgtccgtgctgtgctacaagaaacactccacttgagggacttagagccatgctagggagagcttgtgagagagtttggactctgtgttccttctctcgcttgcttcctctagaatagtcttgtcagtagccaggagaagtcactgaggaagtatgttaagtcgccaaaatgcttttacccaatggtttctctttccattttgaagttatatagggaccttgtctaggaaaggaaagggaaagaaagaaaagaaaagaaaaatggccgggcagtggcacgcacctttaatgccagcactcagggggatgaggcaggtggatctctttgagttcaagaccagcatggtctacagaatgagttccagggtagccagggctacacagtaaaatcctatctcaaaagaaaaaattaaaaacaaacaaaaatggctatttctatcaggtagcattctggacattttcccatgcctaaaactccaaaaagaagtttcaactcacattcttcattcacaccaaattcccagttcagacgagaatgcttcttggccaactgttctgctaaacccctgccaagttgactcagagtccagttagtggaatctgcgggttcacccacagcaggaagattcccatgtcaatctccttcaagggcggtgtcgctcgccatcttgatttgccttgcctgcctttggcagaagttttactgtgactatgcttggactaaagccagtcatgccaacaaaattgtaggtctgatccaagacagggttattattaattaccaaatgtatgtgccaaccatgaaagagaaagacccctctcattaacttcatacagacaaaaaaaaaattaaataggatctcatatagctcagactggctttgaattcatcatgaagctgatgatgaccttaaacacagcttccatctcttgacaagcacccaaccaactgaatacatctcatctccaaaaacccattgaaaaaaaaaaaagaacaaataatatgtaaaatcagcaaagtcaaaaacctgtgagatggctcaactgataaaggtaactgttgcctgagtccaatcctcacatctcacatagcagaaggagaaacacacacacagacacacacattgtgtcaagttcacatgcatgaacacacctgcacacaataaatggaagatcatcaaagttaaactcatgtattgttttctattgaaattctctaaatctccctttagggaaatctcccttctttaggttgagaaaatatatctttgacctaggaagtcattctgagatggagaaattcttgctcttaaaggcatcttcttttgggaagtctaaataagcattttcttatggtatgagttagttcttcagagacattttctcctatctcaccttggagtttgggaatgtaatgatttggtatggccagaagttataggtcaaagatgcaactaaacatctgtgttgcctacagcccagcttcaccccacaatacaaagttaccctgtaaagtccacagtgcagagactgaaaaataaaataaaataaaataaaataaaataaaataaaataaaataaaagcctgctctaaattatgcctccactcacacaaatcctttgtcttaataatgtgggctgttgaagttttgagttcatataaatcattaccattgtccctggccatttcatcaccgaaggactttatctaaagactctgcccctgaagaatgctctacttggcagatagctcacacactcgtctccaaagtccttttgacaagcttcatcataaaccatctttctagagacaaaaaataaatggctaagaatcattagcacctaaccttctcagcttaaatttagtactcacccatgtgcagttcccatagagcactgagggttactcagaaactccctggttccaggctcactgcctctcccatccattacctctggaaggagctagtcccgttttatcacaaacacactgagagcacaagttttacagttagacagcccaaagttcagttctggtccttccccaggctcatttccttttctgtaaaagtatagtttgaataaatggacttctactctttgtattcagagagctgaacaagacaatatgtgttaagcacagattaatgggtataccacacagaaatagctcggtgagttgttcttggtgttgttgttattagcctaaaaccagcccatactcttatctgatgttaaggaggataggcagggataaattctatgttggatgggatctgaaaaaaacatgaaaaaaattgtcacaggacataacaggaagtaacaaagagcccagctgtgctgcaggaccccaccctcgtgctgaagggatagtcaagtagagcacttgtctatagtatatgggaagccttgggttcctctccagcaatgacaacaattccatttgcatgaaggaggctggagccacagaaggcccagaacctgagctggacctgtacacctatctatacatgcctaggacaggggcagaggataggtggaagactgtgctaaaacagtaaacatagaagcattgttcatttggggtgtctctgacccccccccccctgtaacttttcagttttcttgtttattttctgtcttgtgaaacaggacatcaccatttaggccagcctagccttgcctccatttctcaatggcaagtgtgtgccaccacacccagccccacactgcatcttaaaagccttataaactgggctttagagaaagtgtgtgtgtgtgtgtgtgtgtgtgtgtgtgtgtgtgtgtgtgtgtgtgtgtgtgtgtaagtgcatgtgcatgtgtgctcacatgcatattgaggtctaaggtcaaactgactttgagaatatccacaagctaatttcaccgagctatgatgactctgaccaaggttgtagatgtctgctttggtgtcactggctgttccattaacctctaggcctagcttttcagttcaaaggcattgttttatcttatgacttatacttcctgtccaggactgactgggcactagactgccttatatagcctcttgtcttagcaaagtcctcttcccagctctctaccgagcattctgtatccatggatcttaggccgatgtggggtcagggtgagtctgtctaagaagagttagctttgagaatcagttccccagcattgatgaccttgttgcctggcatgcactggatagtatggggtagggatgctactgccctctaatgggcagatggtaaaagtcttacaatgcacagtctccccatcccacctcctacctcacccccaccctggctccctaccacaccccagagaacatggtttatttcgcaaatattaagagttctagagctaatgggtccaggtttttatgacaaaagatactgaaaggcatatttatttctaattgttgttcataccaaccatacattgtattctataagtcaatttcttatctttttccccctgtagcagacattgggaagagatacagtgtaccatattttcattttgaagcaggaaatccaaagtccagaattagcttagccaaagacccagaagctgaaagctagaccccttgccttaaatcagggggtatttggtcctagctctggaaccaccatggtttcctgcctcgatcctgccatcttcaggtgccagaatatgtaatccttcagcactaattggttagacagggactcccaagtccccgcctaagccgtgcttccagaatcttgtgtcttctttcaaatatatgttctattctgtttccaaccctaacttgaaaatagtcattaagcctttcaaggatataagtattgatctgttctcacaatcatcacttgaattcaaaatacagtgttttagttaattttgtgtgaaataaattttcagcctttttttttgtttgtttgtttgttactgtgagagtgcacacatgtgacaatcagagaacagcttgtagatatcagttctctgtccatcaagttccaggacctataacatcaggtttagaagcaagacctttgccttctgagcggcctcaccagcccccacgtgattttcgttattaaaaggacccttggaaagttgttcctgctttgtgcactttcaaatcatgttctgaggtgtcttcgttctgttttctacctacctgtgcatttgaagcagggttggccaccttctctggctcaatcacttctgagtctgatttcctgatactcagcctgggtgtcactctccaattgtgacaagcagcaaactatgcaggcactggtgctaggaggccctggctctgaacacagtctctcacattctagacacctcagcaagaccaggatcaaaagcgaaaatcacactctcaatactcattcagtctccatcaggatgttgaggggggtaggtacaaatctgcaggcttttcctaaaagatcaagtgcaaacaagggaaagagtccaagtaagttacaatgaatgactgctttaatgacaataacatgatgtcatgaggtcttttcatgtacattttcttgatggtatgttggaaataaccatactatttgttaaagttttttttttttttcatttcttctaacagcccttagagggaggccccttcatgtactctctattttgggtaatttgattttattgaagatgatagccaagtgtttattgggtgctagctctgtaccaagccctaatctgagactttactacatttgattcccctgtggctcccttgtgcgataggtttttatagatagggatttggactcctgattggtgaactgactttaccaaacttaagacacttggcaagtgatctatcctagaccaaacaccttcctttctgacccaaagacccaaaggtgggatgagaaaaaaaaaaggacaagcaagttggttcagcaaggtttcctgacaagcctggcaacctgagattgctcctgaaagccatgtgaaggtggaggaggagaatcatctccacagcactgtcctctgcactccagcacatgcactgtagcctatatccacacactaataataataacaacaacagcaataagttatattttaaaaggaaaagctacacatcccactcgtgctcaccacttgccagttctttctcctgcattcatccgctagggttcttgtggtcactgatttttacatggtgtttcagcagagcacaaaaaaaaaaaaaaaaaaaagaaaaaaagaaaaagaaaaagaaatagcaattcagtgaccctctgggcagtcatggcttgttaatcatggtttgtccataacactaataagagctgtatagctaatcagagagactccccttaaagaattcactcccaccagggacggcttcctcacaaatatgatggcattgtccctaaggtcaagtctatgaacagaagtaaatccagtcctaaagataggtgattccataaaggaccactgtagtgagctgaaggaagattgagcactgtaagaaatctcacaccatatgtgctacaaaaccccttctacccaggcccagcagaggggtagatctcagctttcaatctgtatctccctctgcattctgtgtgagagcttttaaaacataagaataaggtcctgtgtgttactggggaaagagtgaaggtaacacaatatcattgcatcctagacagttgataagtggtttaccctagcagcttgagttccctacgcaaagcgtgacaccgtggtattattaagcaacaatacccaagattttcctacaaggccttgttgattcttttaacatacctacataactaagtgttcaatggtgagatgaggtttcacagattagcagtactttgcaggacaggaaaatgtaatccaaaattacagaatactatggttatacaatccctgcataatacaaatgaggttacaactaaatcattacatggccattatccaataatgcctacaatgtcagcagtgtgaaaatttgcgatcaggtgtcacccaagtcctgccttgatttatttctaaccaaagcttacagtaaacaatgtgacaaggtgatggaaggtgggggaggaagaaaggaggaaaatgagagagaaccagagagtgtgggatttgtcttgtagcttttatgagcttcccagatagatagctctcagccaacgcttgaatgtggcaaatccccctgccaggggaaagtggtctaaatacattgtttctaaagagtttgtttattcaaaatatgtctgctttgagcattcagtcttacaagtgagttgggggtgggggaagagacagctgaggtcaacactgcagttatgagctctctccttgctgtggcttcccaaggccaccaaataacactgactgcagagagggggatgtggcacagacaagagggaactctttcaaaggcttcccacttggctccgctgaattggagagatggagcctgtgtacatttgttggtgcacattagaaataaatttgggcattcatctaaagaactagctaagtagagatgtacaaagagacatcattatgtagttagcctggtctttgtaagcttggccaggcaaggaggtgtatgaaaagaaatatgtaaataacacgacctgctttataaaggaaaagagagccaaattaatccaagacatccatggcatagtgctagtttttgccctctgcttttctgtttataacttgagccatacaacgcaatagtctagcactaacaattacttacatgcttttaaaaaagaaaaaaggaaaaaaaagaaagaaagaaagaaagaaagaaagaaagcgaacacagaccatgatatccctcaatttctgattgtgaaacaaaacaaaaaaaaaaaaaaaaaaaaccaaaaaaaaaatgagtctttagccttgtgtacaatattattattaaatctaacattttttatagccaaattgttgactcgggttctctcctctccccacttccttttttcttggggtagggggaggaaaagctgcatgggagtgggcccgggaggaccaagccaatcaaagttaaaataaagtctctttctagcaagactactgtctataacatgttgttccttatagaaagtgggatatggtggcatttgcttgattaacttgctcgacaaaagtgacagctgctgcgggtgcatgcggataagctgcacggcgcggttccgcctttgtgcatctgtcagcaaaaagagaagaataaagagtgaaaagagacaaattggtcccaaaagacactccattcaacttaggaggcttgccccattcaggcgcttgtggtgcgcctcaagtactgagagcttattcaatttcattcactctttcgaatgaacccacaagtgtttaatttcttatgctgtcgcctctgggggggggggggagttgtaaagaagaaggggagagagactaggggagggacgccattgacaaccaggcagggtgatcctgggctgcatatattaactcatggctaatttatggtttaactctctgtgcctgtgtcctggacccatctgaacacttcaatggggaacctggcacaggcttcctacctcctggctgaggaatccaaaaccatctgtagatattgagggcaccctgaaaggttgaatgtttatcttacataaggacaatggtctgaggtttgtgccttagacagaaatagggatgactggcacccccagggtagagtttgggtaagaggtctggcaaacctgtttggtttgggttgggttttttttcccccttttcctccctcccagaaaggggcgggaggggggcggttagagtcacaggcagtgagaagaagcaagaacagaatatggtttcctgagattaaaaataaagcaagaggaaagagcgccattggaggcagagcccagctgtgtgcgctggtgaaagcacatgttaacttctaaaaagcactttgcacttccctgagctacagtggcagaacttgtttcctggattctttatgcaggcagcaccttagacacccaaaggtctcctcctggggctttatgccaaggaggacgtcggctgactcttccaagtaaatattcttctagccaggcttcttttctaaatcccagctctcccttgggctcggggaccaccctctcagccagctgcagttctggtcatcctttgtcaattgctgtttggaagccactgggctatctctgagatgagaaattacttccccaaagagtttgtgttcaccaagttgacattgatcttgttttaaaactgtgtcggactttggggaagtgttctggatccagttagagttgctgggtgctgatgcctttgaactcaggggtttggggaggtactttggatggtgtatccgtgtgctttcatcatttcgcttagaaactaactgtgtggtttgacctgaacgactatacttagccgagacctgacctcttcccatgtaatcgtatggaaattatgtcaatatgcaagctgtttcctcacagtgatgattaaaaccaccttagcccagacacacgactctttaaagttaatgtgaattttcctaagaactttggctttagctgacaaaatctagtgactcatgactatagaaagtttaatgtgcaaataatgaaattagccctaatgtgattaaccatccttgtttaaaaaggacaaaagttggcacccggctttatctttctgttctgtacatgagttacagtccttattttagagtatgatttctataatcattgctatatggtatgcaaattttcatttcagttgctgacgtcaatctgcctgcaaattaatgcagttaactctaaatgcagttcgtctccatacctaagaagcaatcagaggtgtgggcagacgttggtcgtgaataatctgaatttggtttctgcgctgagtcctaaatccttgtgtatgcatagcagagtagtgttcagataaattattcctacttctcacatggataaaaggcagcaggatgtgccaccaaaactagaatttcattctcgacataattgagcttcaaatgattgagactgaattcggattgtaactatacattctctcaaaacagtgggttcctttgagaggaaagaagctaaaagcatgggggtccattttctcaatacatagtgaggcctgtgactaaatccctaacatatccagagaaaaataggcctcagaaaaaaggtattgttcacagtggtcagtttgttaatgcccaaagtgcacacctgccctggaagacccaggtggcagataaggcctgggtagatgctgattgatgttaatcatgttgggctcattgtttatgtgtggtgaagtgggaagtggtctgaactgagaccactctccaggtacattagagaacagcccgttttctcatagataacaccgctccatggtctggtctgtttgccaaaagtgaggtgtcagcctctgacatttgctacaaaaacttgtctgagcagcacacgccccactggagtgtgtcctgatttctctgtgacaggtcttgttgatctgcttgggggatgggttagaacagctgggctggagccaatgttctgtcttgcattcagggttgttccaccattcagaatcttgctcaattcctaaggcgctcggctgtcttagaagtcatgtgctcacaggcaagtgcagagtggactgcggtagctcaaccggattcttttatttgggttgtagaacttggtcaccaatcagaagagacagtggaaaggttgggtagctggagttcaaaagctgggatgactgtgaaggagtctgccttactctctatatagcctatgttaaacaataccacaaaagtatagaaaaaaatatatcaacttagggaacccatgggctctgggttctctaagagtcagacacaggacaaatgtaataaaacttaaaagctaatttattacatatcacttattgtatttcctttcttcacagagaatgattacatgtaattatcacatactgtataaatacaaagagcagatttcaaacttgcctacttcttgaagctgttagaattcaaccagtttaatgtacatacgctgctttggagaggctccgtcacataagtaatcactaaatgtttgcttccactttgttagttttactctcaatgtagttaggatgtcaggatgtgccttctctccagggtggcttcatggccacacaaataccctgagatatggtaactagtaagtacttcatgaaaagtggccccttaggagaaacccatttgggaaaacacaaagctgaacggctttcttttctgtaggacttctcagaccatttggtatgctgcctcggtgagtctatatccctagcagcagtcagatggaaggtctgatgtgtgctgcacccgcaacacatacttccaacctgggaaacaggaaacaggaagtgcgtgctgatgttactttggttttattttatcaagctgacagttaaatctctctggtagtcattttgttctgtcttgcatttatttatacccaagaataggataaaaaatggtagcatttccccgggaatcagctcccataagcctcttgccagacctgggacactatagccagagacctaaagggaatcccaagggtcccagcagctgtgtggctctcgccttcgatgcacacatatttttttctctttatggggtattattctgtgtcttcacagaatgtgtcacacagtctcagatctatggaccccaaaccgccttagattcaaaaggcagacatttaccacaattggaaacaagttctcatctgaggcacaggaatagcttctgtttggaatgcttggtccaagtatataacatcgttgaaataaaaaagacacagtctttggattattagttcagctgggctgggagccctccgataagaggtcactggtgtgagttactatggtaattgagtagtatcagcaatagttttactctcgtgagcattaaagcacataataataggcaaacaacagtggttaaagcaagcaggtaggattactgtgttcttttgtcagaactatatgatgtcttgtagtcagttttaaagacttctcaagccccaaatccaccctactgtcacctgctgagtgattttgtatgcttaatctcctgccctcaactccaggctctttactaatttgaggcaaatgggtatttctgacattaaatatggcaacaaggaagctctgacctagaaaaagcacattctgaacactgaaatattcttttaacaatttcgttaaggctcctgttgaatgattggggagagggttcgtggatgtttcagccagctaaggaaaggagtagggtttggggtttgttgtttgttttggtttggttttgggttttttttgttgttgttgtttttcagaagaagaaaagagaaaagaaagaaagaaacttgcagcgcatccccactcccaacttcccccatgaaacttgtcacttcgcatcgccatccgctacccaacaataatcactgcgtgcctattgctaattgcaagcacagctgaggcccagcgggaagcctttgcacagtctcaggcctttatacgaggctcaatctgttgtatggcacttgttcacacacaaaaaaactaccagcaaaggcagaaagaggcagagtcacaggtttcttgtaatccttctgcctccctgctgacagcccagccctagaagcattcctggttttgtcctcttctttacaaaatctgaagtgaccttaagctacaagcacgtcagcttttgaatgttgagttgccggcttcttcaggtgcattagggagcaggggggctacatctggcttctgcgtgtctgtttgcagcacccctggggcgagctgtggcttcctgtaacatgtaaaatatgagtgtgaactcagggttcatggcaaggaacaggaggtcacgtctccattcagttctaagtaaagagactgagatttgcagatgttttctctatgtgtaatgacaccaccccctccccaagccaccgagcaactgagcgccgttctttgataaaatgtgccacaatcagtgtgctagttgcagatttattcatatcaatttttgcaatttatatattcagagacaagattgctatttcggcaactttatgttggatgtcataacgtttgcatctagaaagagagggaagaaagaggtatgggactgggagggtgagcagagaaagaaaagaaattaagtctgttcccgggccaccagctggagtgttgtcaaggagacagagtgtcacactgtggagggtctgtgtccccttttgcccagcagtcacttcctgcctaggctaggctctgggagcttgaggtccagaaggccagttgatggccatggtgaatgagtgtgggtttggaattttgagaacaatctctgtggtaaacgaggccaaacccatcttcctagggagcatgaactgggaggcccaagaaaatccctggtgtggccaacatttggactggcaaggcctttctgctctgccttaccacactctaagactcaatgaatgagaaataagtctcctgtaaaattcctgctggcagaaatgtgcatctccacctcagaaccttcctgaaggaagacattggtagaggggaggtacctctcctgtgcctggggagtaaattctcctcagagggtagtgctaactgccaagctgggtgcaaagaccaattggaggcatttaagaaatccatgatgtttattagtataaatgttccatgcagggttagttctcagtaaagggcaaaagctttgcctgcctctcattattagcctaattctacttaattgtttcctaaaataagggcttcctgagcacacattccaagccttaataagtctgttgtggtgagtgatgcttggtggggaggcactgcccttttgggtaaccagggtctcagtgctgaccgtgagccgcttgatcaaacctgtgctgggtagtgtaggacttggcaggcagaagtacaaggatgctgagattttccgaaaatctatgagatgacatggcacacactgcaaacgaagagaggaaaaaaaattcaaagggtccttttccgttgcttggttgccaatcctcaataaggatagccttagataaagagtctcagcctggacttcagttactgctgtttcacagacttagaaatgttggccctgtggcacgttttaaatagaccaaataaatgactgaacaaatgctatcagatttgttcttagtgattcaccatctcaaaattcaaccttgagaaactgtctccatcctgagagtaaatgccctgtatttctcttagatgcattattttccttttggcaaagcacaagaaggtgttccagctccaaacatgtacatgagtgtctagaaggcgactcagtgaataagagcacttgctgtacccaagtgaaaaggcaggcatggcagcccacaactgtagtaccagcgcttgggagagagggaaaggaagatttcctggagcttgctggctgccagcctagctgaaaacggaagctgcaggtcccgagtctcagggactgaggcagacactgacagaggaggacacctgatctcttctctcctcacaggcatgtgcacctgtacacacatatcatacacacgcacacaattattcaaaaacggttatgtacattgatatgtattgagttttcttaaccaagtctctgtgtgtgtgttttaatagtaaagtgcattacacagagtacactataataagtgttttgagctccatcatgtatagttccacagcatgatgtggatttggaactttgccttgattcctaggacccatttcatcttttacagctagaactctacacatactaatgagcctccagtcactgccttttctcggaccctgccaaccaccacactactcttggtttttagaccccctcatctaagtgaatcatacagtggcttttgtgactagtgactgatttgtttcactttgcataatgtcctaagggagcatccatctgtgacatctgacagggtctccctctccttcaaggctgcaggaatcaagcacacttggtatccccaccccaccccctgacccacagtaggctgcatcgacctctaggctattgtgaatgaagctcgctctatcacaggtgctcaaacatctctttgagacctagctgtcagatttttacatcactacccagaagtgtatttgctgagctgtctatcgatctgtaatagcgcttacccagcttggggggaagagtggaagagtggtatttgcattctatctgaagaagcatttgcaactgaaaatttcatttcgagcctctgctttcccatcataggtgtttttgtctttaaggagatatctaaaagttgatgtttgacatcattttctgattcaaaggtgacaaataatggccagcaatatcacatttattaggaaacaaaacctaatttcagagcagtcacatattcttacagatgaccacccatactaccttactgagatatagcagacagggaagacaagaaagaggttttgtgacatgttgtgttttattacattctggttgatttggcaacgacaaaatcattaatggtctagtgttgactcacttatatagtttactgaatctgacaacaggttaaccaaaccatgaccacacacacacacacacacacacacacacacacacacacacttgtattctcccctctccctctccctctccnnnnnnnnnnnnnnnnnnnnnnnnnnnnnnnnnnnnnnnnnnnnnnnnnnnnnnnnnnnnnnnnnnnnnnnnnnnnnnnnnnnnnnnnnnnnnnnnnnnnnnnnnnnnnnnnnnnnnnnnnnnnnnnnnnnnnnnnnnnnnnnnnnnnnnnnnnnnnnnnnnnnntctccctctccctctccctctccctctccctctccctctccctctccctctccatgagacaaacatttgcccacataagttgagctttgaactctcttgcttagttgcttccaggaagaattcctgtagactctgagctctctttgtgctctctctacacagctaacactgatgggtctgaggagtttgaagcaggcagtgaagttaagactgctaatttaaactcactcctccttttgatcagtccgttgtaatactgatgctaacaaactacctaaggtaggctatttctttatgcagtgagtataaacagttgaaatttattcttgaataaattgtaacatccctggctgacctggaactcacttgttcccaaactcaccgagatcctcctgcctctgcctcccaagtgctgaaatccaaggtgtgtgtcaccatgcttggcaccatgtaggtccctttaaagggagtcaaaataatattactcccaaatactagactccatgtgtaagattctatagaaaatacagtagcaatatacatttttagagaattatttattttgcatcaccccttcctcatggggagatactgatagcaaaccaggaaccagatcctctctgctcctctgcctgaagctgtaatgtcagccttctcagagagccccacggcaaagcctggtgaatacacggctaccttgaagagtcgtgataaactttgtaaagatgcaccaaggtaggtttttatgcatccaaacaatttcacaagtgaggaggaggaaaccacaacccaccttcggttacagaggacactgagcatctgaggtcatgccgctggtctgtaacctctaacttgggtgtccaattatagctttatgcttttagccaagcgtcccaaagccatggctgggaaatacccattctaagagcagttgtttgggaggattggatcttgaattacagcaacactcaagtgtggcaaaagactgcatctttcaacagtgtccccactcccgaaagtatttggatgatatgcccttttagaacgtgttgatttagcttttggggagctttgacaaatccaaaaacttgctatgaactacatgtagtcttttagtgttctccccacttggcagagatggcttgcacaagctggatttcttcctcctaccctctgaatctttgactaagatcctgaataacacccaaatcctaggactgttagacccaagcagcccactgtactgtggcttaacaaagccatggggacttgggtagaatttaaagaaagccaggatgatgtgtttcacaggttcttaaattacccaaattgtaaggaataaatatgcattgaaaacttcattgtaaaatattttattacagtatttcaatacagtaatttaaaaaggttgtgggggctttgttttgttctaactaataataactcacttttgtctcaaaaaaaacaaagcaaagagcttagtcacataggcgtggtcaggtatcatcttcctctttgactccttgccaacagaaaatgccatttcttcagtagacgagatgctaggctggtttctcttatgcatggctgtgcgtggctggagaaaggtactttccagataaaagttcaaaatcctccagattttcactgtgcctctcctgtccaaagacacgggttggttaccaactgatctgtttactcaggcattctcagaagaagggacccacttggggtgacttggtttcctatgtgtcaagcagggtaagacagcgcagctcacataagactgagcaaagcctagtctatctgggactgttgaaagctgcctccccagcactctgtaggttgtattctttctctgtttccaggatgaggaaactgaagctcggggagattaatgggaatttttctcagggcagatctgaagggttgggaccaagtgcgttctgtcagcagccaggttgcactaggcacctaggccactttatttcaccgagtctcacttcttgtcaccttgagggtgaagtgagtggcagtaacttaactaccatgctgttgacagttcagctctgatctgcccaagccttcggtggtttgcttgtctgcataaatgtctcaagtgtgcctattccaaaggatgtacatgcttaaagaaatgaatttacaccagagagctattcttattattactaagacagaatatactggatatatttgacaatatcacaagtatttattcaaaggaaatgtgggaagatgtgcttattaatcctgggccaaatactatcatttttctggcttcctttttatgatactgaactaaacattatcctcaattatagcacagagtggcatgtgtgtgtctgtatgaatacatatgtgcatgtgttttaataaaagccatgtactacagttaacagaggatacatcagtaaaatttccttcagaggaaaaaagcaagctggacctagtagtgtaaacctattatctcagctctttgggaagctgactatggaggaccctaagatcaaggcctgcgtaggccacagagagagcaggaaaagcaacagcagggctaggctttgtaccgagctggtcttacccaggctttgtaccgagctggtcttagcaggcttgggacttttgtgctgaaagtgaatctcctcagtgcattctggcaatgccttagcgctcatgaggaaaaataaagtccatctgatatgcaagagttctatttcgttctctctttccactgaaaactctatagtttgtgacatagcatttccagggctgaacgtttgtttagtgttataattttgccagctataaaactcctagcaaaattcaagactgtgtttttctagttatatttcatttgaaaacaaacttccctggatgaagagcttctccctgaataaaggaagttatgctcattcaggctaagaaatggcattcctcacaccacccagggttttctatttatttctcctgtgccaacagttgttcttccgaccaatgctctaaagccattgagtaacttgccatggcagtatccccaggtccccattatctgtgcagccactttctaagctcaagaaatggacattctttttactctcagccaagactgggcttcagtagaaacaggctcaacagcattgccctagccatgcacttctgagagagcttcaggactccacagcttgctgtaagacacctggaacctagaactgacactgactccatgtagccaatcctttccttcttaacagaattaaattgaataaaaacaactcattctgatttggtgggggaaaaaaaaacaccttcaaattacctcaacgtttactagttgtgcatccttttttcatatatatggggctgctattagttgtttaattcaacgattaaattgtatcatgcttgtatattctgtctaggatccacacagagtgggggaatccatgctccataaacattgattgtttttgctaactctgtgcatgctcatgggaatatctgtgtgcatgcctgaggttatatactcattattctgcacaaaattgtgctttgatggcaacaggtactaaagacaagtatctgtaagacatagactcatctggtttgttaaggtgtttgcataagttaaagagataaatgatctttgtgttatgtgagtgtgtaaatgctctttcagcctaggtacctggtttctgccaccattcatctgtgacatgtggctcattccagaaacaagtgtaccacaaacagcaaagtctctataggacagcaaatgaattccagaattgagatgagaattaagacttatagccaggcatgccagtgcttactatgtatcccagtatcctagcatcaggaggcagaggcaggaggatggctgcaagaaagagcatcctggtctagcaagtacagggcaatcagaagtacaagaagagactctgtctttaaaaaaattaaaaattggagctggagagatggctcagtaattaagagcactgactgctcttccagaggacctgtgttcaattcccagcaatcacatgacagctcacaactgtctgtaatcacaaaatctggtaccctcacaggcacacatgcaggccaaacaccaatgcacataaaataaaaataaatccgttttttaaaaaattaaaaatagcaaaatctgtgtggcagctacagtggcagcacctcagcagacaccactccaccatcagtctgtattactcaatgggattagccagctctgagagaaagcctggttccatgagctcagcagacaccactccaccatcagtctgtattactcaatgggattagccagctctgaggaaagcctggttccatgagctcagcagacaccactctaccatcagtctgtattactcaatgggattagccagctctaaggaaagcctggttccatgagctttaccttctcaggcatcaattattcatcttacctgtcaactcttcagttttttagggtatgaatttcctcttcagttttttagggtatgaatttcccatccatccatccaaccacaggagagacctagagagagatgttggagtctcttgtccttgtagagtatagacctagagagagatggtggagtctcttgtccttgtggagtggagtgaggggaactaacaatacactttaatatttgagacattcaaaaactcaaaattaaagtaacaaaatccttgatgaatatcatgtttttcaatgatgttagtatgtgattctggtctctcaggaccctgatcctggccataacagcccatgttgtagtgggtacaggctacatggtagaattgccctacagaagtcagtatgcttcagggcagcatatgtggcttgagagatctgagtaccagtgacctacacttctgctagaagtgaagcaagacaataactttgttctacacattaataaagtctctgtaagcgaatgccattttattgagcacttactatgtggcacttgctctggtgggcactgtgcataaattatctcctaatgctcacggcaaccttatgaagttggtactggcattaacccaaagagaaaactgaaggtcacagagttaagcagttaatttgaggctatccagctaacaagtggccaaaacaagctgatactgagtctatgcctacaaggtctgaaaaatcattcattctgggaggccttttaagtcaagacttcaacatgaatcaatgttggtttaaaatgtgctttgggaacaaaaggtagtttcctaagtttaagtagaatcacattgcttagagctccccatatgttgcttcaaggcttatgcacacaattccaggacctacggatcgtttcttccactgcacggctttcccaaataactaaccctctgcccctgtgttttgttatcttttaggttgagagacagagattgaacagttgggggtgaggtatagtaatgatcggtggtggcaggggctgaggtgaaggcagtggtggtaccagctttgctatctactaagtatatgcatgagtgtgtcacaagcattcttttagttactcatcagaagaatcctataaaagacaaatgaatccccactttcatcagtaaactgagtctctaaggatgaaagtgtccttactcaaggtctcgagttcagatgtgtcttaggaccagtactcttcaatactacatgctagaaagccatgaagccacatcatcgaaaaaacctgcagcccaggatttgggaggctgaggtgggaagatcacttgagcatgagatttaaggtcaaacaggccactttgagaagtgatgacacaaatcatggctgcgaagctgggtggggcaggcatgtggttcaggttactcagactacaagattgcaaattgggagtctgctggcgcgaaggagtgagttccagatcagcctggtccatttggtgagagcttggctcatatatagattggtagtgggtaggaaagaagaggaggaagaggaggcaggcaatatcctaatggtcttctagccccttaccaaatagagccttggactcagctgcaggtagcccacgggtcagagctgaaatgaatatctttttgtgttccagccttcccccaaatgactacatggcagatgtattttaaaagagtccagtctacaggcaattttccttctctggcatgtgtttaggattaaagtagccttgtttgggacgttccaaatcagtagccctaaattaagggacagcagatcatgactatattcaaaatagtgagtgttgtcaattcctaattctccttccttggacctaaagcatgttaccactagtgctcaggtgttaaaatagttccagaagagttctatatgtatgaaagacaaaacaaaaatagggaaaactccagctgttttataaattttctctttcaaagaatcattacaaatctgctgctgcattgggattgatataaaacacagctctggtgagagccctcctctgggacctgctttcctaattcatgtgctatctatcaccagctagagacttggagagggatgcagccactcacctctcatgacccacagataggggagactgcatctatttcagcacagttgccatgctggagattcccactgcctgtatgataccgaaaagtcactacccatctctgggcctttgtttcctcctttccaatgtctaggaagagtcccctcaccccctaacattttaatgttctaaaaggcaatacctacttctttctccctgatatctaaatgccttttgacgcccatgctggagaaccaagttagcactggctgggcctcatctaaaagtgcctctgattccatctactgagcataaggtttggaaagaactcattttctcccttttgcctctttgaatgtgtagccaatggggcatcatacatttttttacacttctcctgctagatgtgagattcaggagaagattggatgttgcagggtgttcttgcttctgggatgggaatgtgcttcgaagcattgatcgcttctgtatgcgcaccctccctcgccttcctcaaggtgcaggactgttgacctttttgtctgtatttttaattcttatttatttattttgctattttaaagccatttatgagagtgagaacttcctatgtaaaatggaagggggtgctatatttttccctgaaaggtggcacgtctctcagtgaagagaaaaaggcaggatgcaccaggcttgctggcagtgatagaagccagcgccggtttgcctgttgtcacagccaaagaaaaatgccacctctgcctagaagccagagtgccacacttcccttttgtgtcccagacatgtatccatcacagggctctcagcacgtgtatttggacatgtagtcacttgagctgtttgaaggtcaccctccaacccttggaaggacagataaggacaaattattcctgaagtaaagcggattacatgtcagatacagagagtgagtttaagttggaggcctaggcgaacccaggagagcccctagctgctgaagcagtttaaagccacatgctcacctgtgatccaattcttgtcccagagctgcttaacaaacccagatgcagtagcagcaaatgaagagtcccatggcaggaggtgccaaaaacaccctccacacacaaccaccactacccctccctaaaaacaaagtttcagaaaaaaaaaacgttctcacccctagagggaaaacctgtccatgcctgaagcagcttgaccctaccaatcaaataccctctagagactgaactgcccatctcagcaagaaatccccacccccagccgcctgctccccgcggagggacagaaggttcttacaactgacagtttctcctccatgatctttaaaagagcaggagctggctgtgaggctgcacgctgcctccgttggggtagcgtggtccctgttgcggctgggctccaaggagagccatgcttggctctgatgaggaaggagcctagataagaaagatgcaaagagggcttctatacgccatggctgcgactctgtagtttcttgcaaggtgcaacttggcagttctaccttgcaagtaaaaccccaaattaatttttttttaaagaaattaagtcagaaacaaggcttcagaaaaactgtgagtgttaggcataaactgattttggatgatctttaggtgagaaagggtggagttaccatcagaaacatgtttttatttatgctttttgaatccccactggtgtgcgatgtgtgtgtgcctgtgtgtgctggtgagtgtgagtgtatgcatcgcctccgttctctgccttctcctttatcttcatcttattttctgcatctttcctgtgcacagttcatatagatgtcacataaataagtgtataggtccatccacaccttttcattttatttgtaaattgtttggtataagcggcagagcgtaatgaaacctggtgaagtttaaaagattagatttttttttcatactgacacttcataacactgttcatatgtctctgagtgagatttatgaatatatgagcagtactgcaaaattatactgcaccagagacttcctgcaccacaggggtggcagtctaaagtgacacagcttcaagcatttttcacagacaagaagcaaaatttaacccccataaggggaagtatgatttcaacagcttgaaatgagctcatttgtagatagtttttttttcccctcttatattccatattttttctgctaagattaaaacagattgcacagctaatgcaagggcacttaaacgatgcccagaacagtttggcccttaaagagaaagcctcatttgctgtccatattaggaatgccccagtcagacaaatggttataaattccacccctcggttcctcagactctccacctggttctctgaattgcacatggtggtgggaggatcattctcaaaggttaggtgacaacgagggcatccctgtccctcttttggccctagagataatgcattagaaaatggacagagcctcaagtcacaccctagtgaagtggaccagttcagacaagaatcaggagcataagaaacagtcttcagacatggaccccacggacgctgtgtgtagcacaagagtcccaggttccatccccagtccacactgccctagtgtggactgagccagcacctcatttgtgtgagtggacagtctctgtgctctccagttctctttgaccctcttctctcctccggaaccaaataggtgctcagatgggacctgttccctccctgccctctagttgctccatgatgcagggcctggagaactcttgtctctttttcagcaatggtacaacagctccatgaacatcatctgcacgtggctgaccgacaggatggacctgcagctccacatttaccagctgaaaaccctgatcaggatggtaaaggtaagaggacaaggtagtcctctggtggcagtcctctgtgggcagtcctctggtggcagtcctctcgagagtagctaactgagacacatgccactggcaagctgcagaatgtccagatcacacaaacccctgtctgcatacacaacacgatgatttctaaggcagcattgcagttaatttcttactgagacattaactaacggcaagcttagactttaaagggaggggtgggcactggtatctttgtctataaaggaaaactattgtatacatttgccacacacaaaatgtcacagagactcttgtgccttcgaattgcacttttgaaagcttgctttgggcaccattatgttaactgcataaatcaccaatttcatttatggtttaattaaataaaattttgccacaattaatttcaaggaaatatttacccccagctatttctaaacatgctctgtgatcattatcagaatgcaaatcaatattgttctcatagttaattgaagtggtttctcttacaatgcctgtacacaatcaaacgtaaagaatcacaaaggtgagataacataccctgggaggagctctttcccctgttcttatgtgtgtgctgtggactaatgataattatttcagcgtgaaatcgcagtggtttacatgaaataataagatcgcagaagggggtaaatacgttttttgatcatttcagtttccatttgatgcctcaccatagagcgtttttaaaaatgttcgtatgcaaaactcctattcaacacacaaaaatctccattaaaatattttactaataagcatagctgaattctcttaacagtttgccaaaaatctcccctaccctgcttctaggcctcctttggattcgtcccatccccctgaaggtgccccgatatcccagtgctgactaaaacccaattaccatttcattgtgtgtaattaaggagttattatcatctgcatttgatcccacaaagcctccacccagcagaaggttatagccagtgtgtagctgcagctattgtaaaagaaatatctgcacttgaatggcacactcagcttaattttcttgttttttttttttaagtcagtttcttaaggcaagtttcactaagcactgccagaccctctgaattccttttcttggtataaatatttcctttcttcttttcttttcttaatgtgtgtagaatataggagatgatttctatttgacctttatcggaccaggtgcacataaaaagaaaaacatcacaatttagtattttcaggttatcttttcataactgctatttccagatctgtgtcaaaaactagcaatatttgaagataaaaatatgtaagagaggaggcttaatttttgccatctgccaaaaacaaacaaacatatacacagtcccgagccacagggcagtcccgagccacagaaagagttttcactttctccagaatgatgctcatctttactacatcctcccagtggactgagccagagtcctccagcaaccacgcagggcaaatcccatgggtttccaactttctttcctgcttcaatagacactccattcgttcattcattcatacatacatacattccgcatccagaaagctgtactccttcacccgaacctaggtagaggttaactgagctctcctgaatactaacaagggaaggattgaaatctgagtagccattcaaatccaagggcttcatagaaccacactgcattcactgataaactccccagtcactgcaacctgtgactttaaaagtggattgacctattgatcccgtaactgtattagatgagctattaaaaatacaactaatgtgatgttgaaatacattaccattctgctctcacctctttattaagtttcctgtatcaacaggtgaagcagagtggagacttggcctctgaaatgataggcagtgtgatgaagaagctcatagttagaaagaccataacaaaaacgaactagacaaagccagatgcttctgcgcatgctcagttcatgccaaggaggctccaggaaacagtccttagttacctgaggaaatccgagagaaatggcctggaggaacaacgaaggggcttgtgatgctgcaataccaaccgttattcttgaaaaggagccaggtttcttccctgagaacataaagttgtgaacgaaatggatacagatatttcccaaggagatgagatctgagtcacatgcctgcaacatattgatgaggcattagcgctccatcttgcccatcattgtggctgcttgtaataggtttcatataccaacatgcatatgtctatcttgtggatgagacagagggacgtggctcacacaattataacaggcaaaaatcctaaagatttgactgcaacagaaatcacaaaataccataatcacttgattcattcattatgtgtatgttagggccctttatcctgtcgatcatattgttataataacctaagagaaagaagtagaccgggggaggagacaaacaaccatggaacatttccctttgtggagctgaataaacacaagcttctgttctttgctttgtctcatctaatacagtttatcctgccacggtttctcattttctgtcatttggttgagtctcagttctcagtccaagagaaatctgaatgaagcggcttttacttttcagttcataaaatgtgacacttaaccaaaagccatgactctccctcgcacttgtgcttgctttgcatcctctccctcctcaccttggggatgagatcattcttacctctttatctttcgtttccatagaaaacctatagagatttccgattgcaaggggtcctggattccaccttaaacagcaagacctatgagaccatccgaaaccgtctcactgtggaggaagctacagcgtcagtgagtgagggtgggggcttacaaggtatcagcatgaaggacagtgatgaggaagatgaagaagatgattagaccattctctgggtccaagagtccattgggatggagtcctgtaatcaatgcatgtctttagtctgttagttaaccccattaggtaattttctgtcaaccaccatccccatgagatgtttaccaatacaattaccattttagctgcgtggtaccaagattagcaaatggtttcctgatttctgtgtctatatgtttacaagcaatatggaacaccattcttaaacactgttcatggaaagaatacatagttcagctgctaggtgtgtcccttttgttagcagaacaaaatgatgcttcatcctgtactacagatacacggattggaagtggacatggaagcaagtgtgtttccatgtctctgtttcatgtatgtgggtaccaggtatttaaattagtacataaattaatttaagtgcatagagctgcttggttttggtctctgttttgttcttgttttatgagaaggggaaaaggcatggtcccaacaaccaactttagcttttctcatcccctaaaactaaaagcaatggaccacttgtgtcccagcaaacccagctttgcatttatccatgtagtttagttccccctaccaaaaaagttacatatcaatggattaattattttcattgtcatagcaagggggccacgtgatcaggaagtagcatcaagtaagtttcagaccaactgtcttctgtgaaagtttatcctagtaaatgtcacattttgcttttctgtttcaataactgtatatgtaaaaaaaattattgaaatgaaaaccctagactataaatgtatttataataagatatggatatttccttcagtagactgtaaccataacttcaattattttgttccacactgttttttatatctgtcatgtacattgcactttgatctgtaactgagcgaccctggggtctgctatagagctgtttctttctgtggaaagtagtggatccatcttgctttttgccttatataaaagcctacagttgtaaaagtgtgggaaactgtggctcctcaat

SEQ ID NO: 3261 - DNA, 5384 bp, Mus musculus
agcggctgcagatggcatccggctgcgggctccgggctcgcaattgattctcgcccttgcccacctcgggtgcacacacgcacctctcccttctcctcctcccctcgcgctcctgggtctgcgctcagctcgcgctcgccgggcggaggaagcagtcgcggcggccgaagctgagcagcagcgctcgctctccctgacctaggaagaagcgcctacccggacagccgacccttggctgcctccagcgccccccaccttttgcaccccaaggcgggggctccggggacccccctctcccaggcgctaccatgctggacccttcgtccagcgaagaggagtcagatgagatcctggaagaggagaggggcaaggatgtgctgggctcggccgcgtctggagcgcgcctgtctcccagccgcaccagcgagggctcggcaggcagcgccgggatggggggcagtggcgccggggccggggtgggcgccggcggcggtggggcccagcagccgcgccggcggcggccggccttccagccctagcccgtcggtggtgagcgagaaggagaaggaagagttggagaggctgcagaaggaggaggaagagaggaagaagaggctgcagctgtacgtgttcgtgatgcgctgcatcgcctaccccttcaacgccaagcagcccaccgacatggctcggcggcagcagaagatcagcaaacagcagctacagactgtcaaagaccggttccaggcttttctcaatggggagacccaaatcgtagctgatgaagcctttatgaatgctgtccagagctactatgaggtgtttctcaagagtgaccgtgtggcccgcatggtgcagagtgggggctgctcagccaatgactctcgggaggtcttcaagaaacacatcgagaagagggtgcgcagcctacctgagattgacggcctcagcaaggagacagtgctaagctcctggatggccaagtttgatgccatctaccgtggtgaggaggaccccaggaagcagcaagcccggatgacagccagtgcagcttctgagttgattctgagcaaggaacagctctatgagatgtttcagaacattcttgggatcaagaagtttgaacatcaactcctgtataatgcctgtcagcagctggacaatccagatgagcaggcagcccagatcagacgagagctggatggacgtctccaaatggcagatcaaatagccagggaacgcaaatttcctaagttcgtatccaaagaaatggaaaacatgtacattgaggagctgaagtcctccgtcaacctgctcatggccaacttggagagcatgccggtgtccaagggtggagagttcaagctacagaaactgaaacgcagtcacaatgcttccatcattgacatgggtgaggagagtgagaaccagctttctaagtcagatgtcctgctgtccttctccttggaggtggtgatcatggaagtccaaggccttaagtccttggctccaaatcgaattgtatactgcacaatggaggtggagggtggagagaaacttcagacagatcaagcagaggcttctaaaccaacctggggcactcaaggcgacttctccacaacccatgcgctgccagctgttaaagtaaagctattcacagagagcactggtgtcctggccttggaagacaaggaactcgggcgggtgatcctccatcccaccccaaatagccccaaacaatctgagtggcacaaaatgacagtctccaaaaactgccccgatcaagacctcaaaatcaaacttgctgtccgaatggataagcctcaaaacatgaagcactctgggtacttatggaccattggtaagaatgtgtggaagaggtggaagaagaggttctttgtgttggtgcaggtcagccagtacacttttgccatgtgcagctatcgagaaaagaaggcagagcctcaggaactcctacagctggacggctacaccgtggattacaccgaccctcagccaggtttggagggtggccgagccttcttcaatgcagtcaaagaaggagacacggtgatatttgcaagtgatgatgaacaagatcgaattttgtgggtccaagctatgtacagggccactggccagtcgcacaaacctgttccccctacccaggtgcagaagctcaacgccaagggcggaaatgtgcctcagctggatgcccccatctcacaattttacgcagatagagctcagaagcatggcatggatgaatttatctcttccaacccctgtaactttgaccacgcttccctctttgagatggtgcagcggctgactttggatcacagacttaatgattcctattcttgcctgggctggttcagtcctggccaggtgtttgtgttagatgagtattgcgccagaaatggagtccgaggatgtcaccggcatctctgctaccttagagacttgctggaacgagcagaaaatggcgcgatgattgaccccacgcttcttcactacagctttgccttctgcgcgtcccatgtccatggtaacaggcctgatggaatcggaactgtgactgttgaagaaaaagaacgctttgaagaaatcaaagagagactccgagttctgctggaaaatcaaattacacatttcaggtactgctttccatttggtcgacctgaaggtgctttgaaagctactctctcactcttggaacgggttttgatgaaagatattgtcactccagtaccacaagaagaggtcaaaactgtcatccgtaaatgcctagagcaggctgctctagtcaactactcacgcctatctgagtatgccaaaattgaagggaaaaagagagaaatgtatgagcatcctgtcttctgcttggcctcccaagtgatggatttaaccattcaaaatgtaggccgcttaatcactcccgccaaaaagctcgaagacacaatccgtcttgctgaactagtcatcgaagtactgcaacaaaacgaggagcaccacgccgaggcctttgcgtggtggtcagacttaatggtggagcatgcggagacgttcctgtcactctttgcagtggacatggatgcagccttagaggtgcaacccccagacacgtgggacagtttcccactcttccagctgctgaatgactttctccgtacagactataatttgtgcaatggaaagtttcacaaacacctgcaggacctgttcgccccacttgttgttagatatgtggatctgatggagtcctccattgcacaatctatccacaggggctttgagcgggagtcatgggagccagtcaagagtttaaccagtaacctacccaatgtgaacctacccaatgtgaacctacccaaagtaccaaatctaccagttaacatccctctaggcatcccacagatgcccactttttcggcaccgtcatggatggctgctatatatgatgctgataatggatcaggtacatcagaagatttgttctggaaacttgatgcccttcagactttcatccgtgacctacactggcctgaggaagagtttggaaaacacttagagcagcggctaaaactgatggcaagtgacatgattgagtcctgcgtcaaaagaaccaggattgcatttgaagttaagctgcaaaaaaccagtcgatcaacagattttcgagtcccacagtcaatatgcaccatgtttaatgttatggttgatgccaaagctcaatcaacaaaactttgcagcatggaaatgggccaagagcatcaataccattcaaaaatagatgaactaattgaagaaaccgttaaagaaatgatcacacttttggtggcaaagtttgtaactatattggaaggcgtactggcaaagttatccagatatgacgaggggactttgttttcttcgtttctgtcattcacggtgaaggcagcttccaagtatgtggacgtgcctaaacccgggatggacgtggccgacgcctacgtgactttcgtccgccattctcaggatgtccttcgtgataaggtcaatgaggagatgtatatagaaaggttatttgatcaatggtacaacagctccatgaacatcatctgcacgtggctgaccgacaggatggacctgcagctccacatttaccagctgaaaaccctgatcaggatggtaaagaaaacctatagagatttccgattgcaaggggtcctggattccaccttaaacagcaagacctatgagaccatccgaaaccgtctcactgtggaggaagctacagcgtcagtgagtgagggtgggggcttacaaggtatcagcatgaaggacagtgatgaggaagatgaagaagatgattagaccattctctgggtccaagagtccattgggatggagtcctgtaatcaatgcatgtctttagtctgttagttaaccccattaggtaattttctgtcaaccaccatccccatgagatgtttaccaatacaattaccattttagctgcgtggtaccaagattagcaaatggtttcctgatttctgtgtctatatgtttacaagcaatatggaacaccattcttaaacactgttcatggaaagaatacatagttcagctgctaggtgtgtcccttttgttagcagaacaaaatgatgcttcatcctgtactacagatacacggattggaagtggacatggaagcaagtgtgtttccatgtctctgtttcatgtatgtgggtaccaggtatttaaattagtacataaattaatttaagtgcatagagctgcttggttttggtctctgttttgttcttgttttatgagaaggggaaaaggcatggtcccaacaaccaactttagcttttctcatcccctaaaactaaaagcaatggaccacttgtgtcccagcaaacccagctttgcatttatccatgtagtttagttccccctaccaaaaaagttacatatcaatggattaattattttcattgtcatagcaagggggccacgtgatcaggaagtagcatcaagtaagtttcagaccaactgtcttctgtgaaagtttatcctagtaaatgtcacattttgcttttctgtttcaataactgtatatgtaaaaaaaattattgaaatgaaaaccctagactataaatgtatttataataagatatggatatttccttcagtagactgtaaccataacttcaattattttgttccacactgttttttatatctgtcatgtacattgcactttgatctgtaactgagcgaccctggggtctgctatagagctgtttctttctgtggaaagtagtggatccatcttgctttttgccttatataaaagcctacagttgtaaaagtgtgggaaactgtggctcctcaat

SEQ ID NO: 3262 - protein, 1281 aa, Mus musculus
PSSRAGGGRPSSPSPSVVSEKEKEELERLQKEEEERKKRLQLYVFVMRCIAYPFNAKQPTDMARRQQKISKQQLQTVKDRFQAFLNGETQIVADEAFMNAVQSYYEVFLKSDRVARMVQSGGCSANDSREVFKKHIEKRVRSLPEIDGLSKETVLSSWMAKFDAIYRGEEDPRKQQARMTASAASELILSKEQLYEMFQNILGIKKFEHQLLYNACQQLDNPDEQAAQIRRELDGRLQMADQIARERKFPKFVSKEMENMYIEELKSSVNLLMANLESMPVSKGGEFKLQKLKRSHNASIIDMGEESENQLSKSDVLLSFSLEVVIMEVQGLKSLAPNRIVYCTMEVEGGEKLQTDQAEASKPTWGTQGDFSTTHALPAVKVKLFTESTGVLALEDKELGRVILHPTPNSPKQSEWHKMTVSKNCPDQDLKIKLAVRMDKPQNMKHSGYLWTIGKNVWKRWKKRFFVLVQVSQYTFAMCSYREKKAEPQELLQLDGYTVDYTDPQPGLEGGRAFFNAVKEGDTVIFASDDEQDRILWVQAMYRATGQSHKPVPPTQVQKLNAKGGNVPQLDAPISQFYADRAQKHGMDEFISSNPCNFDHASLFEMVQRLTLDHRLNDSYSCLGWFSPGQVFVLDEYCARNGVRGCHRHLCYLRDLLERAENGAMIDPTLLHYSFAFCASHVHGNRPDGIGTVTVEEKERFEEIKERLRVLLENQITHFRYCFPFGRPEGALKATLSLLERVLMKDIVTPVPQEEVKTVIRKCLEQAALVNYSRLSEYAKIEGKKREMYEHPVFCLASQVMDLTIQNVGRLITPAKKLEDTIRLAELVIEVLQQNEEHHAEAFAWWSDLMVEHAETFLSLFAVDMDAALEVQPPDTWDSFPLFQLLNDFLRTDYNLCNGKFHKHLQDLFAPLVVRYVDLMESSIAQSIHRGFERESWEPVKSLTSNLPNVNLPNVNLPKVPNLPVNIPLGIPQMPTFSAPSWMAAIYDADNGSGTSEDLFWKLDALQTFIRDLHWPEEEFGKHLEQRLKLMASDMIESCVKRTRIAFEVKLQKTSRSTDFRVPQSICTMFNVMVDAKAQSTKLCSMEMGQEHQYHSKIDELIEETVKEMITLLVAKFVTIGVLAKLSRYDEGTLFSSFLSFTVKAASKYVDVPKPGMDVADAYVTFVRHSQDVLRDKVNEEMYIERLFDQWYNSSMNIICTWLTDRMDLQLHIYQLKTLIRMVKKYDFRLQGVLDSTLNSKTYETIRNRLTVEEATASVSEGGGLQGISMKDSDEEDEEDD

SEQ ID NO: 3263 - DNA, 497289 bp, Homo sapiens
  misc_feature (1)...(497289): n = A, C, G, or T/U
ggcatatttctgaggcaatctgaagcccattttttgttatgttaatgaaacacacactactatttgaggactcactatattttccttttataataaagcactttcgaaatccagacagattagtttagaccaagactacctttcccatcaccactttataaacaaatcttccaacatccagcatatgttagttgaattaatgagagcaataaacaaagaaaccaagattagcaatgaacacactcattggaaaacttcatcttactccaaaattgtctctctttttttgtcatttgaatgtcattgctaaatataagatgagagtgctttcttgtatacttccctttatgtttcagtctcgttcaaactttctgactcacccctattcatgatcaaacacaaatttcacaaaaggtttaattgcatctagactttagtaaatattctactggggatctgcaaataagactataggaaggtggaggaatctttttgttatgcaaatacaagctagtggaagctctttctgaaagctatttagctgagccctcaaaaagcaatgtttgaatggccttttctttcttttttctttcaggaatgtcaacctcattacaagtctgtttgtaacatcttatttcatggccatgtggcaaataagttcttcctgagatgaattttgataaaatacataatgataacttcatgtatttttataagctatcaaatgcagctctttgttcagggatagaaggttaagttcttgataacaaagtagaatttttgcagaggcctttccaacaggacttgacttctctgcagaaggcaaatgctggacatatctcttcttgtagttatcctagtcagtgggacacaagttcaagcataatattgataatggcctctatttcctgaatatgcaccagacattgtgtttagcattttatttgtttttttttctctgttctagtgtgcaaagagcttcaatgtgccaagcattttagatgcattaacttgattcatcttcacaaaacccctatgcatcgttgatattttattgccaatttcaagattgaagaactgagaatcaaagaatcagctctcttttccaaggtcacacagctaataaagtcaggatttgaactcaggccggcctgattacagtggcacaatttgtactattttgcaatattgagtgttttagagtcttgggtcaagtgaccttttcctttctagagacaattaagtgaataaaacaggaggtacctggacaggttttatccagggagctttgtctacaagaattaaaaatcaagaaacaaagcatggtaataacaagggtaattatggggacaaagagaccagatagtcgatgttgggactgtagtgatcattatggaatataaaggtgatcatggggatgtcaaaagtttgtctttattatctagatgacacccaacctggaaaaatttagggggaaaaacccttatcaggttacaatacctgtgtatttttgatctagttacccctaagggaaattacttttaaagtcacatactttgtgtcatgaatttgggtacagtttgaacattcatcagtttttatcacccaaccagtaaaatgtcagcaaggaactgaagacagttacctgcaatagccctgaatacgtaattgaaccgtaggatgaagttactccatgatgaggtcatttccactgcctatgaagtcaccagaggttatgcatatgcatgggtgggaaagaaagtgattacttcattttatgtgattactcaatctactgtctgaaggcatcaacacacacataaagttttccctttccacacattttctgaagtaatcaaatggattaaggatactgcgtggtaaatgtgctgcttaaatacttggcaatacaagtgacctggtgactcagagggctctcattttgttgggcagtataaataataaggcaaggaaagataaggccatatggtttagaactaactttctgcagcctcttcgctgagttgactttgggtacaggatattctttaaacatttattgcctttcctatgataagttgatttaaatggagattgattttcaccagtccaaggaaagtctgcatactggtctttacatggcatgaaataatgccctgcaagcaaaaggcagaaaagtatctccatggcagttgatgtacctcctcagacacactccaatggcttccccttagagtcctgttcaagtcttccagcctaactagttgtcactttcattcacttaaatctcttccttatgctggtcccttctaaaaatgtaaaagtagtctaggatatcagaatggataaagaagaagatattaaatctgtcctgaaagaacacatcacccactccctctaagatctgtgttgcagccctggtgttgaccctcatagcctactgcatgttgtaagtcctaggtggcctcccttttacggggcaaaaggtttctcactgaccttagtaaattcagcccctctcctttccaaaaaataagagtcagccttgttatctgaaataaaagatagtattcaacagtatcaccatctccactggcatttatcagaaatttactatgtgctatacattgttctaagcaaatgcatgcattagcttattatctccttcaaagatattgtcaagcatagggccaaaattccaaataaatacagctaatgagaaacccattctttcttgtttgcagaataatcagaagtccaagagactaacccacttagtgaaaagtagcagctttggttatgatttttttttttttgagattgagtctcactctgtcacccaggctggaggttcactgcagcctccacctcctgggctcaagtgatcctcctaccttagcctcccaagtagctaggactacaggcgcataccaccatttcccaaaatagagttcagaacacgttaccccagaatatggcaccttggcttttgagaaacagcagaggcagaagcaggaaggtcaatttcaccttcccacaccctttttccctaaagcaagccataaaacttggaaagaatcctttgaacttcctttaaagcaggtgataagatcctcatgtgaaaggacccatcgtatattcataggaaatggatgtccttatctttgaaaatgcagtgaaatagagaagaatatgaaccaacaggttttctaagtccttctcggtttactaccattcaataatactccctttgtccagttatacttctctatgactatccactcttaatcaaaactaagcataaaaatgtacaggtttccctgttttttgggccctcatttcttttccttatttatttatttatttatttatttatttatttatttatttatttatttgagacagtcttgctctgttgcccaggctggagtgcagttgtgtgatctcagctcactgcaacctctacctcccaggttcaagtgattctgctgcctcagactctgaagtagctgggattacaggcatgtaccaccatgcctggctaatttttgtatttttggtagagacagggttttgccatgttggccaggctggtctccaactcctggcctcaggtgatccacctcccttggcttcccaaagtgctggaattacagtcatgagccactgcacccggcctgagtcctcatttctgaaggctcctgtgtcatgtaaaatgtgtattaaataaacttgtatgcttttctcttgttaatctgtcctttattagaggggcctcagccatgagcctagtaataggtgaggaaaaaagaaatattttcctcccgttcaaaagcaaactcttgattctctgtcagcctgtttttctatcctcttctatctcctcctcaagaagagggaatataaattagatttattaggtgacatgtgccagttgaggcatgtctgctagtgggtaggactctgttcattaaggaggtatgtcatccatgtttgtcaccccatgtgactggggtgagtggattcaagacctgcaatcttggggcagacccttcaatttctctctttttgcaggcattgccttactgaactgttatttccacttcctgtaccttgtcactgaacagaggataataaaacatgaagatatgaattctggccaatgaaggtagagattctgcttagatataaagccaaaaatacatgactcactttcaaattatcagagttctgtgttgggggagttttgagccccatcccagttatcataattccattatgatttttatatgcaattgttctttgtatatctctctcaagacccacatgggataacagacaataaaagaataggattggtacactcataagtgcctggttggaatatatgaaactttatcataatgcgactccaagttcttttagaagtcccttgattctcatggtaaatcattaggtacaacttctgagtgaaaaataacagcatgtcagcatctccacaaatgttattttggaaaagactgggacagaaagctcttacagatgaaagaaacaagagaagactgatggagttcttatgaaaatgggctggaatagtggactctaaaatggaaggtcagtgtcactctaaaaagaagaaggagaagaagaagtacactcctatgagcagggctcaggccttaatcaatgaagttcccttttgttagtttagtttggcacctaggtgaccagggctggtttagagaatttcccccagtatatttgcccttaatgtcccctaacccagatgacagtatctactctttgatcaggactcatccttacatttttcttactttccctttactcatgaagcctctctcaatctccttttcttatttattttctttctccaaaaaattgggtaagacccctgtgttttagggcagcctaaaaaaaggaactctccatttcagatatttaaaactgaaaacaaactgattattatgaaaataccctaatttcagttattcctatttacaatctgaagaaagcctccagactaaagccattgtagtctgtgaaaataactataacccagacaatcagctcagaaaattcttttcagaaggtgaagatgtaatgttagcatttatcaaggcaaacctaattggtgagttaggctacttaggcagattatctacgtaatattttatgatgtggaaacagccacttgggtactttttttcccttttatttgatggtatgtcactgtatttcagagtcaatgcaaaatgacaaaaccctccatcttgtccatgtaaataccagtataaactgcatttcaatccataccacatctagttctcacttctattaaaagaaattgtgtacacaagaaacatgattactcttgtgaatagttggctttcagaatttgacttaaatatttattgtaaaatgtgttgtcccacttttctttttcatcttcttaagtaatgagagtgattttccaagaccaattcttgcaagtaatattatttatcattccaaaacatgttttgttgcctagagtgaaagatactttggtgtggctcgatttttattatttttagccttatgatgatcctttaatttcatcctaacctgcttcattttactttagtaagaatcatcatatgatataaagagtaatgatgaaaagtaggtttctcaaacaaaatagaccatttctaatccctgacaatactatctaaaaccagacaggcatcaagtaaacaaataagcaactcttctatttttcaggatctagttctgaattatttgatttcttttatgttcgtttccttctaattatttgtgtccaatttcttgtcatctcatttatggcacatccctctcagatcactggaaaaaaaatgtaaagctaaaattggttgaaaattgctttttatatatcatctatttttgttgtcattccaggggaagtgagtactattatcccccattttacagatgaggatactgaatgtgaatcattagttcgttcaggatagctctactattaagtggtagaggcagaactgtctgggttgagaggccaagcatttaacttgacctaaggcacactgtaagatcaaattaacccatttttggagcttgcaagctagtcttataatttaaacaaaattaaatattgattagatgagatgatcacatctagataatatgaagtttattgagattttttaaatatttaacttagctaaattattttttagtaacaaacccacaaaagcatcaaagtgggcattaaacttagttatatttgatggaaatgtgttttatgtgtgacataaagaagaggtttgtttttactaaactatcaattgccagcgagtcagatatttcctcatacttgtggcctttgacacatcgaggcaaacacttcatagaaggatggagatcatctaggtttagattaggaaatcctggcttagtgtctcagtcatttccattttctgcagactttgcttttgggggtaggattacaaaattcaacggtatagcttctactttcatgatatggtctccagatagttgattaaaatgtattccatcatcttgaggttatccaagttttctacagagcagaactggatgtggggcaaacatgcaagcacataaaatagcttaaggacataaattcttaggtgtataagaatctatggtggaattctacttttaaaaataagaacacaaatatttacaagaggtagacaaaagttaagagactttgcatgtgttctgtggtcatcttttcccctgtttatcaaaatgtacatttagggaagtcacaatccctacttcagatgcctcataagttctggttggcatatcttatcttcaatactaacaaatatttagaatatctccaagttgactttcggctaaggtaagagatgtcttcgaaagggtgtatattttgaaagacagcaatgttcaccatttgaaaaaaatatggaaatatttttggtaaaatctatgtaagcctctttgattgaatactcttgggggggattgagaagattgttagatttatgtaagcaatgttatgtttaacacccaaatcataggtttatgtaatttacaaaaggtggatattaagtttctatattaatgactatacctggaaaaaacccacataatcccaaaggagtttgtaaaaatatgaaacaaaactttattacagcaattgtgaaattccaagtgtttttgtagatggaattcatggccactttgccaccaatgtctgatgtgacagtatttaaatgcctaaagagaccttagaagaaatatttaatctgtgaatgacctgtttctggccttcaacagcatctcctccccaaatcatcacatactccttaatttgtgtcctaaacatggtccctttatttcgccaaatggattataatttcagctctttcctcctcctgtcacctacccataccctgtttccataacactctttaaccttacttgatcccttgccctattactctggcattgcaaaccacttattccacttgcaataccttctcttttcaccacccatgtatatggtatgttcccttaagattttattctcttctttgagaaatatatgattcccttcacttcaagttgcttcattcacgcaagctttttgcagtttactgacctggatttgttgatatgttgcctcagaataagtgctgtcaatctttttcacatgtttatgttgtagctcccaaaggagattatagactctttaagagaatgccttctaaaaattctatctatcccaagcacctagaacaatgtgttacttcattaaaaggtgctggataaaggttgttgatcaattgattggcttactatattttctgttccaggaaaaccaataccacatgatttgaacatcctttacttcttgagaagaattaaaaagtgaggctgcaaaactgtcacaatccccgcactgctcaattttttttaaattttgtgttgttaccaaatgtgtgatggccacaaaagttgtgtccttgaggtatggtggtgaagtcaaatataagccatccaagtacttaactcaaaagatcaaacagaattgttgaggttaatgtgaaaccagttgttctgagttcatctgcaggtctcaaacaggtcactttactatcaaagctagtaaaactcatggtaaattataaaatacgtaaagacaaaagtgatttaaactttaaactcatgctacactattaaaatcactcccacgagtatctacagataattagagaactagaaaatacataaatataggcgatgaagtggagaggtctctagatagcctaagttctgaaggtggctggtggtttgttttcatccatctgcgtgcgggtcgcaggttacattcagcacgttggccagctccctcgtttaccaggtttactggcctaagtgaaaggagcacggggaaggcaggcaccatctgctgctttgtattaatagtttacccgagaggcaggggtgaacagagtgcgacagtcgacgcattagatgttgacgccgctgagttcttagggtgtctttgtctgatcgcggggtccccaagcctccaccgagccagaatggagggagggttaagcaaccagaaacccttctatttttctggtaggctcacctcagcagaaagcattcccaggtcttgggaactgaagaagattcatcatagattttgggggtgggggtaggcaaggtcgggggcgctacataaatggttgagttgcctggtcgaaacaccaatccattcaaaatttgattcacttttattttaattagactgggcgcatgcggaataagttgctggaatcagagtttacacaggtgggacaaacacgctgcccagcccccacgccccccacgccccaggtgtaaagaagcctggggaaaggagatggaccctttctttcccgtataagatctcacggacttcctcctcctaagtaagacctctcgatttagcgtctccaaacagcccgctcggctggtttctggatttctccctcccccaagaactttttgtccgcgggaggggaaaaggggttgaggcaatgagagccagatatcaacaaaaaaattatccacgaagccggcaggggaggagggtggcaaggtattggggtcagaagtactgaggctctgaggacgctccgcgctctcccccctccagccctctgcagcagccctttacgccgcggacacgggagagttaagccaataaacacgtaagcgccgctccctccccaatcggcaagatgcctcttcggctcttggctgcatcgacagcttgcaacactcggcatcttttctggaggcgcctccttcagcagccgcagatggcatccggctgcgggctcggggctcgcaattgattctcccccttgcccacctcgagtccacggacgcacctctcccttcccctcctcccttcgcgcttctgggtctgagcccagctcgcgaccgccgggcagaggatcagtcgcggcggccgaggctgagcagcagcgctctcgctccctgacctggggagaagcgcccacccgggagagctgatccccggctgcctccagcgccccccaccttttgcactccaagccgggggctccagagaccccgctccccaggcgccactatgctggacccttcgtccagcgaagaagaatcggatgagatcgtggaggaggagagcggcaaggaggtgctcggctcggccccgtccggcgcgcgcctgtctcccagccgtaccagcgagggctcggccggcagcgccgggctggggggcggcggcgccggcgccggagccggggtgggtgcaggcggcggcgggggcagcggcgcgagcagcggcggcggggccggggggctgcaacccagcagccgcgctggcggcggccggccctccagccccagcccgtcggtggtgagcgagaaggagaaggaagagttggagcggctgcagaaagaggaggaggagaggaagaagaggctgcagctgtatgtgttcgtgatgcgctgcatcgcctacccctttaatgccaagcagcccaccgacatggctcgccggcagcagaaggtaggtgcgcctgggaggcccagggagcagcacccggacgtcgccaggcgggcggggtgaacaatgggagctggcggcgcagctggcgaggaggagcaggagaggtggagaccgcgccctggggaaagggctacgaggccccctcccagcggccgggctcgcccaggcccagcccaacccagcctggagcgctcctggagctgactgggaccggcgagggccgcggagcgcagcgccgcttgctcgagcccccccagcccgggagcgttggtgagcgaggcaggcaggtcccgctttgtggaccgagaggctcggggagtgatttgctgcccgcggcgcccagagaggccttgctcgcttgcagggctcccagcgctctccagcggcgggcggctgcgctcaactccgggcccgccctcctgggcgtgcgttcggcgggcgggggcaacggcaggtgggggcgccgaggtggagggagaagagcgtcttggagcagcgctccgctcgctggggcagagagcaaccgcaggggcaggcgggagaaagcaagcccagaaggcgaagcttcccgtgactctgcgaagggcaccctcctctccctgcccgggtcagctgatcaccgactagcgtcgccaaagtgtcctcgggcactgcttccttatggctggagttctcaccagtccccctgacccttcctcactgaccccagagcaggggcacgccctctggtccttccgtccgggtcagcccctccgccgtcctgtctttgaccctattctcctcttcccaaggtgacttcgccgccaccttctggctcgcctgggtcctccaagccctgccactgctgccttgataaagtacagctgcaaaaagcttcgcaatctgaggcatcaaaagctttttctgtctgaggctggggcaaggctgacatagctctgggctgcctttgatgttaaaaaaaaaaaaaaaaaggcgcctatttctatcagctgttctttagctggagaaagggatgaggggtactgcaagatgaggggcagtggcggggggtggggacaaaagaaaagcaggcaggaacccagctggagtgagttagtgaagaaagtcagcgttctgttctcttttaaataaatttgcagcacttgagctatcaaaaaagccagtcaagccccacacagaggcagtgtgaggccagtcctaaccccatcaagactgtgagactagtgtctgaaaatagtgaatctttcagttgctgccatttaagaacaaattacatgttgctgtagtagcattaggttttccgtatttatccacccttaccttgagttagcacagatttctctgtttgttttgcttacatgtgtacacacaccacccagcactgatgatttatttcagccatcacgagcttggatatcagtttcattaaaagataaaactgatttccagggtgagagacaggaggtgggttacacacaagactctccatctttatctgtggccccttgttttttcaattcgtatttttgactgcagtagagcaaaagtatcctcagagaagtaaaagtttttgggatattattttaaggctggatgttgagtccacggggcctaatagttcacatttcagtttggaattcctattgtaattgtgcctttacagcataggaacttcaacctccaaaatctatcccagtaataacagcaccagccaaaaatattccattcctttgacaatgaaaactgtgactttaagtgttaggtcgaaaggggtgggggagatgtctagagacatttatcaaagtctctagaggtctgtcctttaaatagttgcttaagtccagagctagcatggagaaagaaatcccacagagacacagttcttctaaacagaaacttcagttactttagagattattataaggccagatttttctgatctgattgtatgctttacctgaatccactcaaagctgtggttttgaggggcatgctgtttgcatttttacacgggagcttaacctcagagagactccaggacagattgataacactgacatttggtcaaactattcttagttatcacagcaaactgttgctaaatacatatcccagtgaagctatcccagagcttttggctatactgggaagctaaatttaaacaacaacaaaatatatatatatatctccttattacaaaaagaagctttttcactgctatatctgtaagtttttaatgcctttctagaggtgtgttttgctccttcaagtagaaagcttagaactctgattttttaaaaataagcaatgattgagagtaattaaaaggtttgcataatcactgtggtaaagtttaaagccaacaaatagttgatgagctaaagttagtcttggagaaagataaactagttgtaaactaaacatgagtttgcagtagaatagaaaaggatgaactagaaaaagaggaaaaatgtagagaaagggataggatgatatggaggtcagagagagagagaacgagatctatgaaaaggaattgctgaattgtggagaaaagaccatattgtacagagtataatgcaccatatgaaaccaaataatctatatcacaatactcacaccactttttcaagtatctactatgtgcacggcacatagatcattttttgaagaatagattttatctttctgaacagctttcaattcactgaaaaattgatatacggtacagagagttcctatatactccatatctaatttcccttcttaatatcttacagtagtatgggacatgggttacaatgaactaatattgatacattattattaactaaagtctgtagtttattcagatttccttagtttttagccaaagttatttttttctgttcttaaatcattttttaaatctcctaactctaacaatgtacaaattgccatcctcgtttttaaaaaactgagacttggaaattttgttatttgcctaaagcaccacgtagatgggtaaaagatggcaattgaagtgtgaaacattctgattccaaatcctatctttttaatatgagatactggctagaaatagtctaggataaaaagagccctagaatcctaacaacatgtcaggtgtacttctttacccagagttatttctctctgaattgagagaggtcctcctttcttcccctgtacacccatcaaatatagtcactatgggcaaagtggatgcttaagtataacttcttaaagaatatgaaggagagggatgggcttttagtgggtaaatttaacactagactgtatcaactttactatgtcgtttaaactgaaaggaaaaagattttagctcggaagaacacttccgaaggaacagaaggagacagtaccatcatttggataattttggtaattactttggtttcacttttactgagaaaaagagcattccaacaatcttcctaattaaagaggggactttaaacagactatctgaaaaaacattttattatttaccgatatattatgttacattactgtgaattgaaatataacatggcgaaataatttatgaccaaaacaaaaatctccccaccagaatgtaacaatgtatgtttcagtagctcagaaatgacagtttggaaagcagttctttgctttttcttcttcttttgtcagaatggtaaagtgaatacctagaagttggcatggcaaagctataccatatgtttctaaactatgtagtaacggtgatgggtggctaccttgtgtgaactagctacttatagtgagggaatgtaaaagcaggcactgttagcaattcatgtaatatttagattgacatgaccattttttaaatgatgtaggaattattctaatagtttaaaatgagcattgtgtctacatacataggtatagtgtacatgtgtgtctgtgcatgatgggggaaaagggtaatccttaaaactgtctattacacagcaattcctatttcattcaagaggacaaatgtcttgtaagttcaagctactcatttctgtatgattcagcttgtatctgcccatgaaatgatggctaatgttgagtcatagccatagaaattctttccttattcatttacttgggcttatttgggcaagactaaaaagccataccttacataaaaagacctagtgctagctaactatatatgtgtgtgagagagagcgcaagtatgtgtgtgttttgaatcaataataaagttgtctactcagatatattttgaggcactttggtctactcaaaattcttaaggtttgctttgttagtgcaatatatgacttgcagtctaaaaaaaaattctaccttttgagagaacaaagtgacgattaaaccaatttttctttaaacagaattgtttctcttcatcaggggaagaactgaattatttaaatgggcttgttggcattctcccctccccattttccttggtacattgggaagccgctgttatgcactgatagcagagactttctgaagatgcggaataccatgaaaggttcttgcctcattacacccctagcataggcttatgattccctaaaactggaccgaagaacaaaggaaattaaatgtttcattcctgaagaattgcactgagtaaaatgataaaagtcaaatgacttagggatcttcccactgcaaaagcaaatttaataaacaatcgtaagctatcatgttgaaatataaccagcatctgtgatttggggacaggtgtctataaaacttaagctggaatgatgagagttctaacctagaaataagttctaaataactgaccagttactcattgcaccaagcgctcacccaggcttgatggcagaagaaattggtacttgtgagatgtggttcctgaactgggggagcttctagtttggaagataacatatatgtcaaataagctgaataagaaagttttagttgtaagacgctgattagaagtactaaagtggggaaggaagaaagaagagtgcatgcacacacaggattggatacagtagtagaaaaaaatcttcatagagaaagtagactagggttaggtctttaaaagttaatttcatttgagtaagcataggaaaaacaggtattgcagtctggagaagaacactaggtagcagaaatgtggaaaagagtcactgttaggcaatgtcagtcagattctgttggttctaagtgacagaaacccagcacaagtggctaaatcaaaaaagaggttgagtgacttactggttcatgtaagtgaagagactggtacagaagtgactgcaggaatggctggatctaggaggctaaatgacttccatatcagaatgaaaaaagctagatgatgaagggaaaggatatacagatttagcttccataatccaaaaacataatatctgaaatgctctaaaatctttttgatcatgacatgatgctcaatagaaatgctcattgaagcactttggatttcagatttttggattagggatgctcaaccagtatgacataaatattctaaaatcctttaaaaattcaaaacacttctgctctcaagcactgaggataaggaatactcaacctatattttgaaacctgtgttttagctcaaaccctgccactaatgaacaactgattgtaggcaagactctgggataatttctaaatctctcatgtggagatggggatggacaagctttggataatttctaatgtcctctccagatataggagttgatagttctttctggacaatgagattactttttaccaagacttacaaattcattcaaagttgtatttggtatgtttttacattacaaaataagacagtgtcttaaagaatccaagatggttagagatgaagttagatttcattagtccagctctctaaatcttcacataaggtgaaatttcaaaaggttataagacagcagactacatgagagattgcaaactgtggcctgtgggctgaaactgatctacgaatgcattttgtccacaaagcgcttttcaaattgtgaattagttctcaacatttaaaactatcaaaatatttcacataaaaaatctggatttctggcttctcttacaagtggaagatatgacaacactgggcctgagtttttatggatttgcaaaaagggatggaaataagactacccaaccatcatttaaataatagaatgttaatcacttttaactaaattggtccaagatacccatccaccatataaatctggatggtaggatataagctgtctggttcttgccaacaccatctccttttacaattgcttaacaagtatcactgatctgaccctggcccctgtaaagcatccaagagaaggacctgaaatttagaactgtgtgttccctgtctttggcaactgcagtacttttcttgttttatagtttttgccaaattggagggccgatgatcaaaattattactttttcatttgtcagtctaggcatgtgatatgatttctgtttttaacagatgaggaaagggggatgaattcagccaatgcattgagtctagcccttgctattgatatattgatggacagtgaaggacagtggttaagggtatacactgtgaaattagaatgcctgggtttgctttcttgctgtacccttatctcgctctgtgatcttagacaattaacctctctgaggctcagtttactcatgaatgaaatgggaattgtagtggtaccttgatcattgggtttttgtgaaaattaattgagataatatagtaaagctgttaaaataatatctggaatgtgtaagtgcaatacaagtgtcagctcttgttattgctaagttgatatgtgcagtgtttttatctgaaaggactgggcaagttaatatatatgaagtactagccatcacaagccttatattcattattgctattatcatcatgaaacagtatggaggagtttggtgaactaaaatgcaagaataccagaaggcaggtagttatcattagagtgttacctataaaccagatgggggtccaggctacaatacatctctgttctttcacttttgttgagacatttcacttgtatttctttgaacaaaaaacagggacccatttgtctggcttcaaaagctcactttgaacaaaagtaacatggatagaattcataggagatattttaaatggctaatgccaagcacatgtacatgggaagatttgccacaagcttatcagaagactcagataaaggggtcttgggtcactcaattggtaaatgatgggatcctcagagttccttattttcttcatagccactatgaggaaaggcactatgctcgttatcattgaataggtcacctgcctttttcaagtcctaatatttttgtcctcaatccaaatagctcttttaaaaatgttggtttacactaatgatactgactatgatattgactattaccatattgattgttaccattaaaaatgaactcataaaatgcttttatgtttgtgtagagagtaaattctaagcatatatatatatgttcaaaactttatatatctagatagagtaagactcgcataagtaggtaatatgcaatagcgtacagagactaagacctctaactctgtggactatcagtccctggttcaaattcctggtcagctctgtgacatgttgactttgtgaccctggggacattatccatgtctttacttcttagtttcctgatctgtaaaatggggaaaaattattaagcattgtaagagaaaaaacatgttagttgcttaaaatctttaatatggggtacatggacaaatattatcagtaacagtaaaaatagtattcttgcattttagttcaccaaactcctccacagtatttcagactacaatatctttgctcatactgtttcttattgcaaaatgtcgtcctcacctttcttcatgcgattcactcttgttcatcctttaattattataactcaagtgttatctcctttaggaaaccttactcaaagctttgtagtgggctaagtattgccataagtccttagtcaatcttttcttttacctcctgtagtttatatttaaattaccctttttacacatgcctatcactcactagactgtaagattcccatctcccaaaacagtacctgacatgtagtaggtgttcagtaagtgttctactgttgagacttcacactgatgctttatttcctagagagcttctaaagagaggaaatagtctaaaatacagtcacctttattacagagacgttgtctctataatttttacttttataaaagcttctcagagtgaaccaattaccaaatggcttcaaaataagttatgttacagaaacatgctatctattacctttgactttgtttgttaataccaaaaagtgacaaatttctagatccattgtagagaaaagccttctttatgaatcccttgcaatgggtgaatcctagttgaacttgaatcaccatagtgtgtgtttaagtgatcaaacattaaaatcagcagaagccaaagaaataagttttcatattgggtgtgcattttttagtgcatttcatttgggttagtgaaaattaggctgtttaatttaccatcagccacaatgttgccaaagttgtatcacagaacctgtaagttctacatattttaggcataaataaatgtgctcattttctctacttttattctcttacaggattttggcattattttctgttattttattgtaagctgcctaaagtcctttctgggtgtagttaaggtataaataaataataactacagagctactgcatattggatatggtaataagaatatgctatgtagaaaacatcaataaaaagtaaaactgcttcttagatatggacttttctgatacatttcactagtcaaagaaaattatttttgctgtgttattccttttattttaacaagtgggaaaaaggtttgaaaataaattgaattatcaagccctcaagtgttcccatctgctgtctgccattctaaaattgagagatatgaaataaattgataatatattgatgtcttttcaacagcccatgggaggaaaatattaattcatcacgtgcttctcagaattacttctgtgcagtaaaaaagttctgggataattagaagttaacttttttttttttttttttttttttaatccttaagtgttccaggagcacatgctaagttacaaaccctaaggaagtggtgatgcttttaaaaagacaatgggattttggcaaacatgccaagtggtccagagaatctactatgcctcttaagaaagcaaagggaaaatactgaaaattcctgcaaataattatgccttctgttgcccatgtagaaaaacagctttttggtgaggatggtaggcatagagttgtttaagcaaatgagttgaagtatatcctgaacatctacattggcgatttttctgacaagtatagcaactgttgtctataaggcagtgtgtcataacatactgtgttcaaaacatttcttgggggttcttccatattcaagttttgtttgttatacatcatcagacaatgttgtttgagccacttctatgtatgagaaactcactagatcctgtagaaaaagtatgtaaagtcattttagatggccttcctgatctctaggaacctagcaatctggttgagaagttgagatacactgacgtagactaagtcaggatagtgtgagtgtctgaattgtaaatattggtgttttctagatttccattcttggctcttgttatgggtttattatgttccccccaaatttatatgtcaaattcctaacccccactgcctcagaatatgactttatttggaagattaagatgaggtcattagggtgggctataatccattatgactgatgtccttataaaatggggaaatctggacccagagatatgcacacacggagaaggccacgtgaaaaggaagacagattggggtgatgcttctacaagcaaggaacaccaaagattgtcagcaaattaccagaaactaggggagaggcatggaacagattcttacgcctcagaaggagcctactctgatgacaccttgatcatcacctagcctctgacaatatctgttgctcaagctacccagttggtgattcttggttattgcagtcctaacaaagacagccctcttcttctgtccataccatctgtctcagcaacttcatccctaatcatgactttagctactaacatctctacacttaaaatttgcaaatcttttgtctccagcataggcctcttgccagactgccagacccatacatttagccatttgcatcagtgctgctaaaggtgtggccacagacaggtgcaggtcagtgaatgctttgtaaagagcttggactagaatgtaaatcaactcattaccttcttctgctaggaaagtcttcctataaaagttgtcagctgtattgagtagtatgcatagtgactaaattgatgtaatttctggtataagcactttatctcagtgagggccaataagaagtagttcacagatgacacaggtctacagagcacacttggaggagcattgacctccatggcatctcctttcaatgtcctcacaccattcaatgatacaatttttcttctcatccagattctttccccttattttctaactctgtgaatggccacccagtggcgctaccatataactgagctggccaaggcacaaatgtgcaactcatcttaaaatcttttattgttcatcctcaccaccaaagaatgcatgtgtttgcaagttgtttgataccattgtttcaaacaatggctgagaattcttctgtagctttctgttgcctgcacaggataaaatcgaaacttacttccatggcgtaagtagatctttgctccccatccatgcttaactacttcagttttcctgcacacacccttcacttcagcccattaagccacttaacatccctgtgctgtccattgctctttgtgagcctcagtatcattgcactcctgcttgaaaagccctcccttgcctttcattactttcctaggtagaaggtaacactcagttataaagtataggaataaatagttagcattcattggccctttaccctgtgtagtcactgttctatatatttacaagccttatctcatttaatctttataacaaccttataagataggtgctaatcatcccaatcctacagaagaggaaaccaagaggaaaagcagataagaaatttgtcttaggtcacagatatagcacatgggttggggccaaggcagtctgactccagccttcacacttaaccatgtgctatgttaactacattgaggcattcatcacaccttacttcaatgtataactgttctttttctttctcctgactgcagagatcatttagtctccccaggtgtctgacagattgtatgtatatataataggtgttcaataaataggtgatacatgagttcatgattgttggttcataactattcagaatagtaatatatattctctacaatttgtagcctatccactgagattatctcattgcttcattaaaacagccctttgagtatatgtgagacgagttataaattcctgttttgtaacaagtaaaagttaggtccagagaagtcccactggttggaatgggctacagagcaccaacctgggccacttaactgcaactagggcttcctcccattgcactgtcagacttgaatttacagtaagaatggcctgggccattttagactttttaaaaaattgcttcattttatgtaatctttattttattgcagaattgtgaaagtcatagtgattcacgcttttagagggtccaccccacctcataaaacatttaaatgtatgtcacatttcacatctacttggttattgaaaaaactggaatgtatgtttttcaatcttgcttttgaagctatttgtctatataataaatgactatgatttctcaggaatcatggtgcattcagaggaatccctgaaaacttaaaccttggcagggcacagtggctcacacctgtaatcccaggtctttgggaggccgaggtgagtagatcacaagagattgagaccatcctggccaacgtggtgaaaccctgtctctactaaaaatataaaaattagctggacatggtggtgcgtgcctgtaaccccagctactcgggaagttgaggcagaagaatcacttgaacccgggaggcggaggttgcagtgagccgagatagcatcacagcaccccagactggcgacagagcaagactctgtctaaaaaaaaaaaaaaaaaaaccactgttttcaatgctatcaatatttttatgaggactaaatttaacaattaatggagtcaatatgtgtttggaagtcacttaattgaatatttagatttttcatgtttattcctacattttgaagactatatttaggatcttggatttttttttttagcgccttggagagttccaaggctccagtccctatgtctctcctgcctaatgaatgaaatagcctttggccaggctgggtggaagaagtggtatttgaactaagcctcaagctgactgagatcaagtgatagcagtgtgatacattttgagaggagggaaggatactttcaactctctttagagatgagataatgcaaagcaagtttgaggacatatgaacagacaaatataattgtataagattccagtattggatagaaaataagaacaaaggttggttcatgatggtagatgcccttcaccaaggtaaggggattaaggagtgggagacttcacactgtaggcaatggagaactgctgaagaattctgagcaggacaacgacatgaccattgtagcattttaagaagattaagtgaaatgtgtggaagctatggggaaaggagagaaaagaagaatataaatgtcttcacactgtgagaaaaggtcatgaattaggcttgaatgttttatccagcacagatcagttttataattttgtggggagatttgtacaaaaatcttagaaaatcaatgcctatatgtagaagtatcttgaatcaatagttcaaaggcatttccctacagcaattgttgatctttgtcttcattttattagagtaactttatgtacttgtcacaatgtgtgggctatgaatgttcatttttttttacaaattctaaaaatgtaaagcaaggtgcctgccctttaagttatatttaatttcagtgaccgatattctgatatgcccctgcaggtgcaaaaactcttctgcataacattgtgaaccacataatgacacttggacaaagctcatatggttgaacctagcataatttcagaaaatgtacatgtgattccatctggcttccagctgacctaaaggatgcagatggagtttaatttagccccaagaaagcataaaccccacaataaacccaggtttatgtcaagcccatagaaggagagaggaggaggcatgacttctggtgttggtttggaatctggggagaaaactttcagtgtgcccaagcacactaaaatagaatcttggatttgtcctttctccaacatgatttcatcccccaaaccaacctaaatttgcataggcacccagagaataaggaacgttcaagctccctgccctttctcactcctccccaagtggaaagagtcttatcttagtggtaagattacagaaaagttattgtatggaccacatgtagtggttagagttatttgcataaataggaagcataagattcctgatcctctgtctcttcttgcacattctttggtaccatcttttctatcttttatgtgttaatagaggtggtaagatttggatctgggcataggagtagagaaagactccagcccagtctttgaaagttttaatatagtgattttacagctggcccttgaccaacgtgggtttgaactgtgcaagtccaaggattgaaaatataatattagcaggatgtgaaacccacacatagggagggctgacttcctatgcaggttccacagggccaacggtgagacttgagcatatgcagatttggagattttagtgtatgccagaatgggatggtcctagaaccaatctcctgcagatactgagggatgatggtattttccatttgtcatcatcatctgtcattatagctctcttaagagaataggagattttggtttacggtaagattcagatattcctgggtcaccaggtcattacatcatctgaaaggcttcagaacactacactgtttaccaaaggcttacagcctgcttcctggaggaggctgcatttgcagctgaggaacaaataggatttgaacctgggtaggaaggaaaacagatatgctagggacagcatgagcaaagacagaagccaagcaaaactacagtaaaaagcatataaaagccacatgatcggaaaggtagcttaggatcaggtagcggtaaacactgaatgttactagactgtcagttgtcctttatttggtaggcagtggggagcctttgaaaatgatctgtacctctgagtagctccagtggaaataacactaaaccaaggcagagggcccatcaaagataatgtagacttctgggtgattggcaaatagagagtgattggccttgaccttgtcttgaagtgatgtgttttcctataaggcactttgaggctttattttctgaagaatattgtcaacacaaaccaatatctcatttgcaaaggacatgatttgctccagcatttttccatggccagattagaaacaactccctatgagttttgacaaaagccccacataatttgtcagccttcctgtttgcctggcagtggagaaaagaaaaggatttctttctactgtcttctttccacaggcagcctatgtactgctgttattatgattcagcagtatagaccttcaaagtaaacagacactggttaagatgtgcacttgtttcaattaatcagaagcacgtctccccccgaagcagcagttctagacaattgtagatttgccatttagtccaaagagcttttcagttttctttctatgtggagagcccaaagctatctttcagtcaatattcaattagtatttgagtcggaaggccatgctgagctcttaaagaggggcgtaatgtgtcacttgttcccgcctccatttgcttgtgtgtggaaaacaatccattacttatcactaaagaaatacaagtctgctgcagcataagttaaatattagaccaaattaataatatgtgtttacttccttatgacctggcaataaataaattatagtgtaagaatcactggaaaggacaaaccaaattcaacattatatatattgtatatgcccaaatttagggagatttgtgatgcagaacatttaccctttccctaatcgcagcaagaactctgtgcatttctgtcttgtgtactcatccaaatgcttttatataaagctttctctaattactatcctttggcatagtcttttgtttccagcacaatctactactcaatactatctttgtcattgagctatggtttcagaacaataaaaattcactcctaagtttttttaaaaatccaaacattttctataaatatgatagcaacaaaggtatctagaatacagtaatttttttatttgcaaattaacctgcctatcataaagcagatttttaaggaaaatagtgatatgagacatttacgttggatgagaatttacacttgtttcataaccttgaactcaagcaacacatatcattaaagtaatgtggataaactacaaatttacgcagtgtgtttaatcagcatgaacagccaattgaagttcaaatgaagcttttgattgtacattttaaatataatatctacatatcccatttttagtagacacaattggttacctaattgttattcattccccaattccaaacagacttgtaattttttcaggtatgaaaaattataccccattcccagctttagaagtagatacagctgagttcagacccatcaacacacagcactatactggaatacagctggctcacaggtgcccaggtgatccaagttgatccaatcagaccaaagtggaggacttgtattccatgcttaggggagaagttttggggctcctctcctgatggactatggaaggaagcatgtatcataattggtactggcagccatcttagaaccatgaggagactcaatttaggctgaagccaaggctgaatatagtgaagttgctgaactatggaaataatttgagttcctgatgacaataatgggccacatacaccattaagccagatctggagcccacctttcatctggacttccaataaaatagtaaattttcttgttgtgtaagtcagtttgagctgtagtttttcttatttacagtaaaaatttgttgacctcctgctgtatttctctttagaacaggaattctgggatttattaatcttaactctttattttgaatatgtttagacaaaagtggaaatcatatttgtaggaagcagcttcttatttcttcctaactccctagatataatttagttaaaaccaaaaagcaaaaacttcattgtagatgtaaatcatgttttagcataaagtaacttttattataactgaagagataagcaaaatgaattcattaaaatattaaattttacagtttctataaacaaaaataaacatttttatagaaaagtatatggaaatacataaaataaaaattttaaaaagtcacctaattttaccacccaaagacatccattatgcacataatatatatttatacatctgcatggatatatagaggttaatattatatatgcttttatataaaagtaatatttctacatatattgctttgcaacctacttttttgcacaacattatatataggaaatgtttccatgtcagtaaatatgaaaaaccatgtcattcttctaaatgactttgtagcaatccattttatggatgtaacattatttaactggttgtattgatttctctttctttttttactactctatacattctgcagtaagcatctttgtgtacttacctttctacacttcttcaaatatatgtgtctttaatattaagaatatataaatttaaaatgctgttaccaatttccaaagcatctgtagaaatttacactcccactagtggagcatgagtgagtctcatttcccatgttaaaactagacattattttctgctttgccaactcgatgcgttatttttaaaattctgtatttgcatttcttttttacatatttattgtctctttatattctttgtttcacaaattctgttaccttccatccattgttatgcttatttgtttttaagagctatttctattttagtggtattaacattgtcatatttgtgaaatttaagttttgtcatttgtgatggaccgtttttatgtttgttatgttgttcgacatatttatgtctagctgaacagaatttttgaatgcagtaaaatctatctacttttcctctttataattcctgggtttcatgcaatgaaagaccttctctatccaaagattataaaactgctcatacctatcttcttctactacttatagtgttttttttttttacctttatattttttactcatttgaaatttgtattggtgtaatgaatgacgtatgaatgacctttcagttgactagccagttcaatatcatagattaaatctatttgctctctagttgtgttaaatgcataatgcaaatgtcaaatgcactaaatttttattgtattaatattattaatatttgaatttatttttgagctcctggtagaaagccattgatctaattttctcttcctgtaccataactatggtgattcaatcattgtaggtttatgacagtttggctacattgataaagttccttttattatacttttcagaatatccatgactcttcttgcatttttttattctttggaaaaataatttttaatgattttatcagttttaaaataaaagattgcttggattttcacctaaattccatggtctctgtagattaacataaagaaagctgatatctttatgacattgaaaccccatccaggaactaggaatatctctgcattgattcaaaaggttttgatgtgcctcaatttatttttgtagttttcaacatacatggcctatacatttattgttaaatttattcctaagtaaattgtaacatttactagttgatcttccttcactgacttcttgcattaaccaaagctctctattccctctgcaaaacatgggagctcagggctaatggactactctctaatacacctgagcacttctgtccctatcagctgaggtatatgctcaccaagaataattatactttccaagtgtgttccagctagtttctgtttctgttgttactgaaattccataattaaatattatataacttaatgacatattattgtgaaaacaaagaatagtctttgtttatattaaataagttgattactttgggaagattcaattctgtctaaaaatatattaaattgcagttgggcaaaactacaataaaatttttagggaaaaagtataaaaatctaaaggagttttttatcatattgccccttaagcaccttaatttttttctcttcttttaagaaacaaaaactggaaatcatagccagatatgctgtgtgttaaggaggatatgaaacttcaatcagcgaacccatgcataaaggcaaagttgaaatcctatacccccaaaattggcaaataattataaattataagcaaaactagacatttgacaacttacgttttgtgacttgctacttcagctaaatatttttaagttaaccataattttaaaaaatatttattgcttggcattctaaatagttttaagctactcttggtgcttcctgataatcatttatggtaaatgaaattaataactttgcttggtttctaatatgtttttaccttttcttctaattcctttggctaatatttacttgtctattactactaatcatggcatgataacatagtacgtaaactttaaaaaatttaaaatcaggataattttattatggggtgttttaaaaaataatcagaacttacatttagtgaaaatcaaggatgtcttaagagagaggaatccaacttccatgctgagatatatattttgttttgaatagagctcattctaaataatccattttaggccaagcacagtgcctcatgcctgtaatcccagcactttgggaggccgaagtgggcagattgcctgaggtcaggagttccagatcagcctgggcaacatggtgaaatggtgaaaccccatctctactaaaagacaaaaaaaaaaaaaaaaaattagccgggcatgatggcacgtgcctgtagtcccagctactggggaggctgaggcatgggaattgcttgaacccaggaggtggaggttgtagtgagccaagatcatgccactgtactccagcctgggtgacagtgagactctgtttccaaaaataaataacacatctcagactaaaatattttgtattgaatacatatttccatgtttgagtctttgaaataaaaatatatgaaatataaaggacagtcaactttttaaaaaagtttagaaaactagcactccatctctattttaattttactctttgcctttttaaataaagaatttatcaagtacaaacaggaaatatttttcaggctcaatgtagatgttttacattgggaagaagatcagaaaaatagaacttcttgttacttacgactacacaatcccagccaaccagaagataacatgcaatcttttgcaacctagatttttctccacccagtgatagttctcacccacatcacataggaaagcaactataaagcccttaagataggcattagtactttcctcattgtaatatggagatattccttgacagcagagaatacccaatcctatagtcatttcccaacattgttttgtctttaataggagtgtctttcttcagagaatgatttgaagcttaaaattacactctttatatttgaaacgatagagcaaaattgactgcaccaaaaaagatgaatgttcctgccaccagatacattgattgcttgccatgaccttcacaaagcaaaactacgaaaggaatgcatagagagaaagttacttttttaacggggaggttcataattttagtctatcaattccaaccacacaaattctctcttaatttatataacttagcaagtgttaagcttgtgagttggagttgatggcaagcaaataactttaaaaaccttctgaggtgacatttctgcattttagttcattccaaatatatattttttaatggccttgaaaatgctcagatgtagggaatggagcggcagtaggttcagcatgaaatgacaccaacatgagagaattcaatctttctttttacttactttgtcatgtattatttatttatttatttattttaatgtgacaggcttactgtctgtcgcccaggctggagtgctgtggaaagatcacaggtcactggagcctcaacctcccaggctgaagcgatcctcccacctcagccccccaagtaactgggaatacaggcacgcaccaccacacctggctaagtactttttgtagagacagggttttgccatgttgcccaggctggtctcaaactcctgggttcaagtgatctgcctgcctcaggctcccaaagggctgggattataggcgtgagccactgggcctggctgtcatgtatgttttagatgctttcttttcttttcttttcttttttttttttttttagtggagttttgctctggttgctcaggctggagtgcaatgacacgatgcgggctcactgcaacctccgcctcaaaggttcaagtgattcccctgcctcagcctcccgagtagctgggattacaggcacctgccaccatgcccacctaattctttgtatttttagtagagaggggtttcaccatgttggccaggcttgtcttgaactcttgacctcaggtgacccatccacctcagcctcccaaagtgctgggattacaggtgtgagccaccacacctggccctagatggtttctcacaagaatatcactatattcttgaccataggccataaagactgaaaacaatgtgattaaatatgatagaactcattctgacttgacctggtagaattatattttattttctggaagttctttctttttcttttcttctgcttccagaaagacatgataaaagtggtattgatcacagtgacatttcctgtttgtcctactgttcacttaggaattcagctcattttctttgtgcaatattaatatgtcaagtgcaagataaagcatttgagccactgcttagatgggctttctaggggctgtagctcatttacatctcactggagaattgggaaacagtgccagaaaatgttattagtcaagtatcttttaaacattttttaaaataaaggagtaattgaatattggaaataacagtaacatatctctgatctgagttattttatgtttctagttattcattcaatgctacatagacatgtaaatagataactcagatatgaagtgttgagggaaaaatgtcagaagaaaaaagcaaacaaggatggttcatggcctgtaaaactcctggagggaggtggcttttgaactgaggcctgataatgttcctggaattttcagaagtggaaattatggatcatcttcaacaaagtcatgaaggtagagacaggtgtcaggaaattcagagtaaactggggaccacctgggccagcttttttttttttctttttttgataagtctctctggtgtgggtaaggagaaaagattttaaaaggggaccaagtaaaggaggaactgttaacagtctcatgatggggccattatgaattgaacttgacaccgggcaaaggaaaatgaaagaagagacggatgcaaaagtaatctcaaagaaaatgctgatgggggaggagccaagatggccgaataggaacagctccggtctacagctcccagtgtgagcgacacagaagacgggtgatttctgcatttccatctgaggaacgcagttcctcaccagcaacggaacaaagctggatggagaatgattttgacgagctgagagaagaaggcttcagacgatcaaattactctgagctacgggaggacattcaaatcaaaggcaaagaagttgaaaactttgaaaaaaatttagaagaatgtataactagaataaccaatacagagaagtgcttaaaggagctgatggagctgaaaaccaaggctcgagaactacgtgaagaatgcagaagcctcaggagccgatgcgatcaactggaagaaagggtatcagcaatggaagatgaaatgaatgaaatgaagcgagaagggaagtttagagaaaaaagaataaaaagaaatgagcaaagcctccaagaaatatggaactatgtgaaaagaccaaatctacgtctgatttgtgtacctgaaagtgatgcggagaatggaaccaagttggaaaacactctgcaggatgttatccaggagaacttccccaatctagcaaggcaggccaacgttcagattcaggaaatacagagaatgccacaaagatactcctcgagaagaacaactccaagacacataattgtcagattcaccaaagttgaaatgaaggaaaaaatgttaagggcagccagagagaaaggtcgggttaccctcaaagggaagcccatcagactaacagcggatctctcggcagaaaccctacaagccagaagagagtgggggccaatattcaacattcttaaagaaaagaattttcaacccagaatttcatatccagccaaactaagcttcataagtgaaggagaaatacaatactttacagacaagcaaaggctgagagattttgtcaccacaaggcctgccctaaaagagctcctgaaggaagcgctaaacatggaaaggaacaaccggtaccagccgctgcaaaatcatgccaaaatgtaacgaccatcgagactaggaagaaactgcatcaactaacgagcaaaatcaccagctaacatcataatgacaggatcaaattcacacataacaatattaactttaaatgtaaatggactaaattctccaattaaaagacacagactggcaagttggataaagagtcaagacccatcaatgtgctgtattcaggaaacccatctcacgtgcagagacacacataggctcaaaataaaaggatggaggaagatctaccaagcaaatggaaaacaaaaaaaggcaggggttgcaatcctagtctctgataaaacagactttaaaccaacaaagatcaaaagagacaaagaaggccattacataatggtaaagggatcaattcaacaagaggagctaactatcctaaatatatatgcacccaatacaggagcacccagattcataaagcaagtcctgagtgacctccaaagagacttagactcccacacattaataatgggagactgtaacaccccactgtcaacattagacagatcaacgagacagaaagtcaacaaggatacccaggaattgaactcagctctgcaccaagaggacctaatagacatctacagaactctccaccccaaatcaacagaatatacatttttttcagcaccacaccacacctattccaaaattgaccacatagttggaagttaaactctcctcagcaaatgtaaaagaacagaaattataacaaactatctctcagaccacagtgcaatcaaactagaactcaggattaagaatctcactcaaagccgctcaactacatagaaactgaacaacctgctcctgaatgactactgggtacataacgaaatgaaggcagaaataaagatgttctttgaaaccaacgagaacaaagacacaacataccagaatctctgggacgcattcaaagcagtgtgtagagggaaatttatagcactaaatgcccacaagagaaagcaggaaagatccaaaattgacaccctaacatcacaattaaaagaactagaaaagcaagagcaaacacattcaaaagctagcagaaggcaagaaataactaaaatcagagcagaactgaaggaaatagagacacaaaaaacccttcaaaaaatgaatgaatccaggagctggttttttgaaaggatcaacaaaattgatagaccgctagcaagactaataaaaaaagagagaagaatcaaatagacacgataaaaaatgataaaggggatatcaccaccggtcccacagaaatacaaactaccatcagagaatactacaaacacctctacacaaataaactagaaaatctagaagaaatggatacattcctcgacacatacactctcccaagactaaaccaggaagaagttgaatctctgaatagaccaataacaggatctgaaattgtggcaataatcaatagtttagcaaccaaaaagagtccaggaccagatggattcacagccgaattctaccagaggtacaaggaggaactggtaccattccttctgaaactattccaatcaatagaaaaagagggaatcctccctaactcattttatgaggccagcatcattctgataccaaagccgggcagagacacaaccaaaaaagagaattttagaccaatatccttgatgaacattgatgcaaaaatcctcaataaaatactggcaaaccgaatccagcagcacatcaaaaagcttatccaccatgatcaagtggccttcatccctgggatgcaaggctggttcaatatacgcaaatcaataaatgtaatccagcatataaacacagccaaagacaaaaaccacatgattatctcaatagatgcagaaaaagcctttgacaaaattcaacaacccttcatgctaaactctcaataaattaggtattgatgggacgtatttcaaaataataagagctatctatgacaaacccacagccaatatcatactgaatgggcaaaaactggaagcattccctttgaaaactggcacaagacagggatgccctctctcaccactcctattcaacatagtgttggaagttctggccagggcaatcaggcaggagaaggaaataaagggcattcaattaggaaaagaggaagtcaaattgtctctgtttgcagacgacatgattgtttatctagaaaaccccattgtctcagcccaaaatctccttaagctgataagcaacttcagcaaagtctcaggatacaaaatcaatgtacagaaatcacaagcattcttatacaccaacaacagacaaacagccaaatcatgagtgaactcccattcacaattgcttcaaagagaataaaatacctaggaatccaacttacaagggatgtgaaggacctcttcaaggagaactacaaaccactgctcaaggaaataaaagaggatacaaagaaatggaagaacattccatgctcatgggtaggaagaatcaatatcgtgaaaatggccatactgcccaaggtaatttacagatttaatgccatccccatcaagctaccaatgactttcttcacagaattggaaaaaactactttaaagttcatatggaaccaaaaaagagcccgcattgccaagtcaatcctaagccaaaagaacaaagctggaggcatcacactacctgacttcaaactatactacaaggctacagtaaccaaaacagcatggtactggtaccaaaacagagatatagatcaatggaacagaacagagccctcagaaataacgctgcatacctacaactatctgatctttgacaaacctgagaaaaacaagcaatggggaaaggattccctatttaataaatggtgcttggaaaactggctagccatatgtagaaagctgaaactggatcccttccttacaccttatacaaaaatcaattcaagatggattaaagatttaaacgttagacctaaaaccataaaaaccctagaagaaaacctaggcattaccattcaggacataggcgtgggcaaggacttcatgtccaaaacaccaaaagcaatggcaacaaaagccaaaattgacaaatgggatctaattaaactaaagagcttctgcacagcaaaagaaactaccatcagagtgaacaggcaacctacaacatgggagaaaattttcgcaacttactcatctgacaaagggctaatatccagaatctacaatgaactcaaacaaatttacaagaaaaaaacaaacaaccccatcaaaaagtgggcgaaggacatgaacagacacttctctaaagaagacatttatgcagccaaaaaacacatgaaaaaatgctcatcatcactggccatcagagaaatgcaaatcaaaaccactatgagatatcatctcacaccagttagaatggcgatcattaaaaagtcaggaaacaacaggtgctggagaggatgtggagaaataggaacacttttacactgttggtgggactgtaaactagttcaaccattgtggaagtcagtgtggcgattcctcagggatctagaactagaaataccatttgacccagccatcccattactgggtatatacccaaaggactataaatcatgctgctataaagacacatgcacacgtatgtttattgcggcagtattcacaatagcaaagacttggaaccaacccaaatgtccaacaatgatagactggattaagaaaatgtggcacatatacaccatggaatactatgcagccataaaaaatgatgagttcatgtcctttgtagggacatggatgaaattggaaaccatcattctcagtaaactatcgcaagaacaaaaaaccaaacaccgcatattctcactcataggtgggaattgaacaatgagatcacatggacacaggaaggggaatatcacactctggggactgtggtggggtgggggggggggagggatagcattgggagatatacctaatgctagatgacgagttagtgggtgcagcgcaccagcatggcacatgtatacatatgtaactaacctgcacaatgtgcacatgtaccctaaaacttaaagtataaaaaaaacaaagttaaaaaaaaaaaaaaaaagaaaatgctgctgggatttggtaactggaggtggcgggtaggaacattttggcatgtcaaaaagcaaagtttattctctcaggttgataagaaaaaagtcaaaaaattaacaaagtcatcaaaactactaacgtcctgtcaaaaggacttaggaggctactagaaaaggctctcactgcccaaagaaggcacagacagtttgagcattagtcaggataatgactaaagtggtttaaaacacatcaaatatattcaaattcaaatgtttttaatactaactaaaagacccacctccagccgggcgagtggctcatgcctgtaatcccagcactttgggaggccgaggcaggtggatcacttgaggtcaggagtttgagaatagcctgaccaacatggcgaaaccctgtctctactaaaaatacaaaaatttttagtagaggcgtggtggcagtcacctgtaataccagctactctggaggctgaatcaaaagaattgctcgaactctggaggtggaagttgtaatgaaccaagatcgtgccactgcactcctaggtgacacagcaagactccgtctcaaaaaacaaaaagcaaaacaaaaaaataccaaaaaacaaacaaaaaaagacccaatctttggtcacttttggagaatgacagaaaaccaacatattttgcaaattgattaatcacgggaaagaatcaagcatttatcatgtatttcctcatgactgtacttcagaccaaccagataaggagaagtttcttcttgtaagagcacttcaagtaacacatgaagaaggaatgatagaattggaatattaccatttgcaagccctaaagaacgaataggtctaggcaacgattataatcagtgacatcataaaaagagaaataactaaacattatacatttatacattacacatggaagcacaacacgttgcttatggagtagtcttcccagaaaattgaacctgaatctgatcacttactgtattagtccgttctcacactgctataaataactacctgagactgggtaatttatttttaaaagaggctgaagtgactcacagttccacgggttgtacaggaggcaaggctggggaggctgcaggaaacttacaatcatggtagaagggagaatgggaagcaaaaatgtcttcacatggtggcaggagagagagagagagagagagagagcaaagggggaaatgatatacactttcaaacggccagatcttgtgagaactcactatcatgagaacaggaagggggaaatctacccccctaaaccaatcacctcccactaggtccctccttcaacattagggattacaattcaacatcagatttaggtggggacacagagtgaaaccatatcactcatctagatataactatcaaagcacaggaaatacagggagagaagcatgccacatgtcaaatggggaagaaatcaataaaatcttggctatcggaaattgttcaaaataaaataccaggtttcttcaacaataacaatatcacaggaagagatagatgatagtgggaggtgggaggggaacagaaagataaattgatagattaaaagaaatttaagggacatatcaacaaatcacatgccaaaaccttcagggcaacagagaataaatggaatttggaatttaatccaaatcctccaaatcccctctataattatgataaaggctctttcttcacaactgcactttaggccaatatattgaatacttgctgtgggcctcataactttatttatataatcttatttcatcttcaaaatgacctaatgagagatgtattatcccctttttagaggtagtggaactgagacacagagttaaagtaacttgttcaaatcacacatctggtaagtggtagattctatgtgaagggctccatttttggctgttcaacaccttaacacttctatctggggaaaatcgtgatgatgtgagccttgggatatgcagctcggtcttccaatacagaagctcaagaagccaagttcttgttctctcagactctgacagagcctgaaaatctgacctaaaattggccaacctgacagatatgtccttctgagatgaaaagtgtggaatagttgaaacaaaggagcaggaaccacttagaacttactctacccacagtgatagcatcctgtgtccagtggagctaaaggtagagctaaaagtaccaccctgtgatgacgagtttccgtgacagtttctagttataatatggctcttagcagcctagctttggttcctggctgctttccaaacctttctgccttcttgaagaccctgtggtctagccaatattttttcaacaagctccttttcctgtttaattaaccagaattagtttctcttgtttggaaccaagaaccctaattagcttagccagagtttgaccacaactttctctgaaaatgggcctgtcactttgtctcaccattaaaaaagtagtgactgctttctctagtttacacattatactaagaatcgattttcccaatcgcattagtgtgttgaataacctactgcactgagatctttaagtctctagttttggtcttcaaatagttcacaggtcatgataactatagaccccgatacctacgcttaaatttgcattcaagcttagattatttgtttttcctcaccaagcttggatgttgtgtgtccttggctttcacaggcattcatgagggttggggagtggtggtttgctcctcagtaaagtgtaaaaggaaaggaagaaagaacagcagaatgtacatgtgagttgatcgtgaaaaaatgtgaactaagccatgggaacaggcaattatgtcaaaaagtaggtgtgtcaacctcagattttcctttggttgtttattccagcctgaattcttgttctcaaccagatggttttactgtttcccatttccccttcccttagagtttagtcaagtctaagatttctgctgtttgtcagctcgatgttgtaaactaaatgaactagtttgtgctgatgggagatgttgatgccggtaaacttcaccagaagagctcttaccttacaactgtgatttgtctctgctttttcccccatcctttcctagacattggtggtagaggctcaacaaaagaccatttttaaacagcataacaataataatcactcctctagagaaaagcctatctttagttctggattatgcaatttggattaaggtttcaaattttatatacttgccaagggactagattttggggtaaggatacctacagagccttagggtaatgtctcactttaaagtattgatctttttacatttttaagccctggtagtcttttaattgctttctaatgattcattttcctcttctttttactgatttttttttttaagctggcaaaacttcagtcctactcttgtagttggatattgcattgggactaggttctggtcaatgggataaagcagaagtatctgagtgacttccaggaaatgtcatttaaggaagtggcctctgcctccttcctccttctagctggctagaaagcaggactgactggctggagcttcagtggctgtcttgtactataaggcaggagttttgttttgaaaatggagcaacataatggaagtaacttggcacccagatgaggttgagtccaacgttatgctgctttcctccagctttagttttcatgtgtacacacatagacacacacacacacacacacacacaccccaactgccatcttgtatatatcactattatttgggggtattttgtaattcagttatatttctattacaaaaacacacaagataattgtctttaacatagaaatctcagatatttctgtttcatagcctcgaatcttcaatatttagtaacttcactaataatgcagaaatacttgtggctttagttataaacaaagaataagaaaatatcattaaatcttgtttctgtttaatattattaaccttcactgaaatgtttgaatatttgcctacagtatttggaagattatttcattttgactttaaactgcatcatttctgtcatagggaagatcattcttcataaaatcacctgttaatgttttcacaggtcaggaaaaaaattggaagttaattatccagtgaaacatacatgaaaaaaaaattataccagagcttgatagtgccactaaatttgataatgaatcatcatttttattttaaacacatttgttatgtgctttacaaaataccatgctttccagagactagaaagaaaatgaactctcaattatgttcagggttaggtctgtgaaccttcagggaaaaccttggttacgcagtacagatatgtttgcataagtaccattaatcatatatatcatgaaaatgattataaaacttttatcataatttgaagcatcattcagcatgtctagagagtgagataggggcagtgcattctaatcagagggcatgggtcataaagcccggattctggctctctatcaccttgtatttgactttaggaaagacaataaaacttcctctctgcctcaattcttctctctgcaaatttctgccttcatggaatttttaagggattcagctaaatgagatgatcaaggcaatgtgcctattatagtgcaaggcacatcactgacatgcaataaaaacactttgattatcgttattgttaatatggtgattaaatggataattgaggcaatcatgaagaaaattaaacacatagtcttgctgtgaaattgaaaacaagattatcttgattggctgcatattggacagattactgaagaaaatcctcactccataatggttaggggtacagattctggaacttgacaacctgaattccaatcctatccctaccatttatcatctatgtgactttggatgagttacttaacttccctttacctcagtttcctcatctgaaaaacagggatgatagcgcctacctcactgggttcttctgaaaattagatgagataatatacgtaaagcgttggcactggtaactgttgttagtgttcttgttcttgccaaatggatacatgagcactctaccctcttgacccataatgaatgaggtccatgtagatttgtcttctgtataaaacttcccaaatatcttggtttatttcaaatagaattatttgctgcttagatgtggtttcaataatttttaatgtttagttttagtttgaggatgtatgtggctaaatctacattcgtgtctaagatccacaaatagaactgtcatggaaacattttcagtatgtgaacaatagctttcacttgaagaaaatcttctttttaaccctcattttttagcgagagagaaccataagccagagggaaataatatattgacaaacttggcaaacagaattgtagttggcagacatagttccaaggtgccttcttagggaggtaccagtattacaaggggatgtcatgtggccataggattttccatcttattccctcttgatatgaaatacatatttttgagacaggttctcactttgtcacccaggctgaagtgcagtggtgccatcagggctcgctgcagcctcgacctcttcctgcctcaccctcctgagcggctgggactacaggcacatgccaccacgcccagctaatttttgtatttttttgtagagacaaggttttgccatgttgcctagactggtcttgaactcctggcctcaaatgatccacccaccttagcctcccaaagtgctgggattacaggcatgagccatcatgcccagctttaatatgaaatactttgtattttgcagactcaagtgccaaaataagtacctgatagtaaagaatttttccctctctaaggggaaaatacccatgcactgtgtgaatgtgcacatgtcctctgcacatatcactgtgaggaatatacagtgagaatctgacctagtggacttctgttgtttgttttagactaaagagttttcttctcttacttactagtcagtaatttttctctcaacatttctagctctggttggtgtctaacaatggatttagatgagactcagaggacatatttgccaatgatgaggactgttaaagaataaaacgtgttacagggagaaatttaggaatctctgcctggaaatggggaatggagtaaatgaggtcccatttgctctaacaaaaatggacttttagatgaatgaatacaagaactgtctgatttttggaggcaccaagattattagtacgacaagacaggattccaactaactgtttctattgtgatttcctaatcggtatatcacaagagattagcagtaattcaaaaaattagatatgcaaacaagaatctgtatcatttgggacccaaatggatttctccaaatactttgaataattgtcagtgcttaattatgatttttgattatttcctatgacacagttctgctgctccaggatatcaatggtttatattaaagtctgaaaacattttataaaaagtattactgcctcagctttattatagcaaccaactccagggactcaggcttttgactaaattgtttatttcccatctgtacatatgaaagtttgcacaattttaagcccaaacacacacacttttttatatatacatatataaaaaagtatacacatacaaaaatatacacaacattttgtcttctggaaaagagtcctcaaaaatagacatatgtcagttcaaaaaactaagttttcatttatatgattgaaagtatcatggtgatctggttcttgtgttaaaccatgtatttcagagctataactgtcttctcattattaaacattgtgtaaatcattgttgtaaactgtctcatctctttgaatttaatgccgtttaatagtatgatgtcggatttgtatatctttcccagaaagaatgtgatgtttcatagacaatttcattttatatccatgcatacttatgaattagaattggaaagtgattattatccccattgaagtagatggaaaatttaagggtgagagaggttaaataagaacttgcgaggcccatactgtaagctaatggcaataataatgaagataattagcttttttgtagtttatgaagcagtccatgaacatgatcaaatttaatctttgttagagacatattctggattcactcaatatgtcttactcagtttaattcaactcagtatgtccccgactgagctcatcattccctgcccatcccctaaacacacacttcagctctccctcccagatggtgaaatcaccatgcatctggtcatccaagctagagatctcagcaattctatttgaatgtgtctccctctcatctcatgtttaatcaatcaccaagtcattccatgtttatctcttaactgtttgatgcatctgccttccttcttggaatgaaccctgagccatgaatccagttgatgctttggccctggttcttgccgttttccatcctctatttgtcgacttcacagatctcactcaattagtttccttccctcccatcctggccttcgccaacccattcttcacactctctgccagagtcattcctctacgtaaaccctacaggtgagtcttagctcctcaccaaggcattcaggcccttcgtggtctagcctcaccctactgctcacttctcaccactcctgatcccatattctgaactccagtgacagggatccactatggcccttcacacttacaggggtgtttcacgtctcttgacctttgcatatactttctgcttgaaagtccctgaccatggagttcaagaccagcctggccaaatggtgaaaccccgtttctactaaaaatacaaaaaatagccaggcgtggtggcttgcatctgtagtcccagctactctcctgaggcaggataatcgcttaaacccgggaggcagaggttgcagtgagctaagatggtgccactgcactccaacctgggtgaccgagcaagactctgtctcaaaaaaacaacaacaaaatagtccctgaccatttcctcccctagaaatacaacttaaagcaaagcttttctggacaaatgttgaaggtcatcatccccacaactgaataagcatcttcatgtgtatccccataatcctctgaataaatctgtcattggacttaccagttaattataattatctgtgtttattttacacttatctgcctgacccaggccatgagttccttcagggaaagaacattctcttattcacctttatctttagaaggactgcccagagcctggagcaaagcagtgttcaaatgtatttgagctgggaggcatttcattttatatattggacatctgatgctcagattcctcaaatgatttgctcattaattttagggcaagatttgtccagcatccagtaatctgggacctaagcaattccttctatattcaagattataatgattattaataaacactgactatatctcaggtacttttctaagtgccttagaaatattaactcatttatcattacagtcgtatggaatacgttttactattttttccagagaggttacaaactaacaattacacagttagaaattagcaaagtcaggatttgaatttggaatctgtgttcttaacccttttgaaaatctagagaagtagagtttctgccccaaaaccacacatacccacatactgtttcacacagttttagggatttcacagattccctaaaaactgtgtaagaatcctttgagaactccagctaaatgacctcaacgctagattttcctacctctgtcttagagttctttgaccttgagaatatcatatggcttatactcattccctcctgcctcctgactttgactgctaaagttaccttctataaatcaagtgttgtctctccataacactttcaattgtgtagcccacctgtcaaatcaggagacatgcatttctgacctatctccaagcctcatcatgtcattacccattcattagtgaggtcagtaatatatgcgccgaatgaaatcagcccctgggctgatcttgggggtgccccacaagtagccacatcttttccagtgtggacacatgtagagatctcagaattcactcctgatggcatacttgaagagcgtatggatggatttcttgcctgtatcagagaatgacatttgttttcctaaaagctaacccattcatgtaaagccagttccctctgtcagcatgtgcattttgagggctgtttcactaatgcttaattaatccatctttaatcacattagagaaggaaattctatatttgttgagggctcattgtgtggcagtacttggacttgcatgcattatgtcttatagttacaattttccttcatttttacagaagaagaaacaatcagaatgggtaaatcttttaccccaagtcaactcagctagtaagtgatgcaacagagatttaaatctgtattgacttacagttcatactctttgctctatgataggatgtgctgtgaccttctaatgttgatatctattgcttggcaatatcttcatatactggcacagggtcaccagataattcattgtgaaacatgacatagggcagcactgtatcaaaacgaaacagctgtagaaagaggggagggaggaacactgagtgccccagccatgaatcaggggccattcaccattgcttctggaagaggtgcccagtccacggctatgctttctccatctttcttttttggactgactttcgtagggctattaagtgccctggcacattgctgatgctgtagttctctcaacttaacccgtcctgtgaggtcagtgggagcaaagggtgttctccatgcgggttggggaactgagcagtgtaagatgaaagagccctaactttgcagtcagataggagctttcatcacagctcagtcacatacaagctgtgcgattttggggaagttacttgacttcactgagcttcagtttccttatgtaagatgggaatacaaacatcaccttaacaaaagttagtgtaaggattaagtgtatgttaattccttggcacatagaatgtgatagaagttatcaatattaacatatttattaacgtattattactattattacctgcaagaggagctttaatgtctttcagttactaagaaaaggtgtaaagcctctcccttcattgggaagagttacctacaaaaatattgaataaattcaggctgagcaagcaaggcatctatattggtagaaagatgggctgagggagctatattccagaaaacttaattactatagacatcctggcagagaggaatgtgttcctgattctttcttttatcaaaagaagattccagtcacttttctgatgacaacggggggtgggcgaaaggaaagttccaggattggtctcaaagcccaatcttattggtttaaaattcttcagaagcttctccacagccttcaggatgaagcttcacctcccaggcatggtacagtgtactttaaaaataacctgtatctaccttctccagcttagcttccaaagacaccttttactacagccccattgattaacctgtggctcaagagatgcacatgctttctcacctttatgcttttgtagagacacacacacacgggttaacttcaactcaaccttgaaaatttccatctcacattacctccttaggggcacttttcccttaacttgcatcctggctggccaaggagccttccttttgtggtccttttgcatctagtgcgtatttttctccctgtcttatttttattgcctggtcctcaccagaccaagtgctattggaggacagggacactgtcttggttgcctctttttctggcttagaatagaaggaaggcagaaatggttccaggaatattttagcttaggtttttgtttatttgggtctggattagtttgataatttaaaaagttccctgagaacaagagagatgccttatttctcttcaaagttcatattagaccagtgagtctcaaccttagctgcatgtcggattcactcaggggctctaaaagcccaggcatcagtaagggttaacatttttcccaagtgatttcaacatgcacatccaaggttaggaaacactggattaaccagagggtgctcaacaaaactagtgattcagtcatttgatcaatacatctcacttgggcaatatgcctaaacacatgcagttgtagataaataagggaaggagaagcatgaagagaaaaagagaagggagctgcattagctttagatgaagtcatctaatgtgtttgactcccccagtaacaaaaatatttttcaaaaataatttaatgtaaacagtttcagtttctgttttctctttcaattctgctgggcattgtcaagtctgggctcagaatagggaagctgtgtttccctgaaatgttgtgagtatatcttaagaaacatcacagtatacaggagaatgtctgacactttttcctggcaatactacgcagctcaatttttgccccttctgtgatttgccacgtcccctctttgaggttcatgtagctgctctctctctcataataagacagccagtactggcctgcataattcatgattacaaggtgtatacacatgatgataaagggaactgatgtttaatttacaaggccccatgttttctcataaaagagctaagcacacccaatcacaggctcaattatgaaaaataacaagaatgtgtttgagtatcattttgcagacacatcgtgaaagagaattgaatttgaagattatatgaatacctggatgaaaataggttttttgataatttgactgaagtgtggcactttacaagaattttctagatttaacccaccaatctccctgttgttccctgattgttttaatttgctgcaaggtagcctgcaatatcagttctttattttttattttgagatagtacttaatgggaaaaggtaattttatcttatacatcttcatttatttgcatgaaactaaaaaaagtgatctaatttacatttttccaattcaaaagctattactgggacagtttcttcataaagtgaatttatattttgcaaagatttagaaaattttccatttaaattatattaaagtctgttttcttatacttcatattccaaacaatgaatctgctcctttaaatattatcccatcttccaaacccatggaaaatggaagtaaaattccatatttgaactctgataacaggccagattatgatactactcaatgttaccagtgcatatttgtgtaagaattgtaattgggagaacattacagtttcttgccttagttttcccaaaagccaagtaagtcctttactgtagcattagatcatcctcttcacttggctggacctagaattaaatacaattttgatgcctccagggaaagcagacagaaaggaggagcaaataaaatttgataatgataataatacttatactactgaatacttggtgagcctggactaggtccatcatatgttagcagacatatgtaggaatattgtatctaagcctcacaggaactctctacagtaatagtatgaccttgatgtttctgatgaggaaggataaggtgtggagagagtaagtgacttacccatggttcagctggttagggtaaggctctgtctaacaaacgtctaaatccaaagttgatgtccttaccactacgttcttgcctcagtttatcactgatgaagtgctagtacccacttgatttacaggaactcagaggaccaagggtctagttctaattttctataagcagtgaggagttccccatctagttggaaatgaaggtcagtcattctagggatggtagatggggccagttgaaagccaccagcttgtcccacttatggaaatgtaagcttggaggtgccccaaagcaggtgcttccaggcctgaagtagggtattatcctcaactggcatgtctagaagagcacctcttcatgttgtatggggtctgaacagcaccccacctttacttcactgaggagttctcaaaggtccacatttgttgaaaacatgacttttactgatacgcatgattttctttttcttacaaagacccatgacagagaacttacaaaatacaaatgtgcaaaacagcaaaaatatgaatcattataatcacatcaggaagagatcatttggtgcacatgtttctagtgcccctttttctgtgtgttataaatgcacatgtatgtgtacctattttgaaaaatgagattgtactatacacatggtttataatttgatttttcccaattagtattttttagtaaccagagtagttttctcaaaaacaatcttgtacagaaccccagcagataaacagataaagatggagacactctgttttggggcaaggggtgtggagggagagcagtgagcccaggttcagcaccagcttctctgtctccctcatgccccctaatggaggatttgaaagcactgcagtattttgcagaaacccagtttgaaaactcttgttctttaatatcagttaagatcccattctatattataccagtgtaaaccccagaacattgataatgaatgtctcctccaggataaaaatagtattaaaaggtaccagtagccataagagttgaaactatcatttgttaaaaatctaagaataagctggccgtgcctcagcttcatcctcctccctcctcagcctcccaaagtggcttccacctgtaatcctagcactttgggaggctgaggcaggaggattgcttgaggccaggaattcaagaccagcctgggcaacatagtcagacctcatctctattacaatttttttaaaaaataagttagccaggcatggtgctgtgtgctgttgtcccaactattcaagaggctaaggttggaggatcctggggaggttgaggctgcagtaagctatgatcatgccactgtaatccagcccgggcaatagagcaaaatcttgtctcaaatcaatcaatcaaagaatagtagaaaagtatgtgccatatagtctcccagtctagaaaagtggactggactttctctaaagccagtcattaaaagagaactggggccaaaaagaaggcaccgtgtggctttcttaccctttcctaatttcagacatacaactgtgtttaaaacattccatacctagaggaggcaattcctccaaaaatgaacaagaagttgttggttgttgttgttttctaaaggagtggaggggttcttcattccatccaagcggagctaaatctgtagccagcatgaagcagatggcccccttcttctctgccttttagttttatgactgcgagattgggagatttttcagcagttgcaatagttggcttcatccatcacgtgaggcaacgcctcagcggcagcagcttgtgttcttacatttaggatctatagatatggactaagcaaagctttgtgttttcacatcagaagctgatgatgagcaatgtgaggagaggcagcgttaaatagattcttctctgctctccgtttcttagtcctactggtaacaagtgtgcatcaagctgaaatttatggtgctaggtgaaaactctgctccacaggtcaaatgtattctctacaatttcctctggtggaatgaaactaccttcctggtcacgttttatgctgtctaatgcagtggtagtgtctttatctcacaaatgttccctaagatctaggcataagatttctggattctactttaactttgacattattattctgtgtggccttggggcaagccctttaagctctctattcctctgagatcataatgccactttatcccttaaagcttaacataaacacttctcaaagagatttgcatggattggtggctctcaaccttaactgtacaataggatcacctggagtatttttaaaactagtagtaccaagccccagtgattctaaaatgcagccaagatttagaaacaccagccctgacaaacccattcagaattactctcaccctcctgtgttggttctgtttttcttgtataactcttaacccaataggtctcagtttgttatttccatgcatgcttacctatcaacaatgaaatgtaagcttcttaaggaaagagacagatacataatttatctttgtctgcttagcatcttgaccagagggaagctgggttcaaaaattagctttgatacttgttagccaagagatcttggtcaagactcttaactagtctgtatccctgttttctcacctgttccaaatgagcaagaattcaaatacattgcgtggtgtggtactacggtttaatacaaagatttagttaggcttatagcactgtgtaagtggtcaattcagatcagctgtgcaagttttgctgaatttactgctttttatgtagtgatttttcctttgttggatcactcatttattcagcaaatattttttagcacttcctactatagttttaggtatgtaggatactgtagagaatatactgatggaatttacattctaaaatgctacatctgtgactctatttaatttttacaaatacctgtgtttccttatactgaatcaaatgagatcctgaaggttaaaaagagattgagtgatttagccaagacctcgcagtaatttggtaatggaaccatgccagcagtccaggttttagtgctcattccagaggacaaacccatcatcctgattccctaatcagtgactgtgacaatggaactgttgttacagaagcagcctcatgcaggggataaaagcacggtttctgaagttggtctgcctagatatgatagtgtctctgccagttattagctgtatgactttggaaaagttatttcacctctctctattagtttcctcatctggaaaatgaagataatgtttacttcgaagagttttcatgagattaagtatatgtaaagtgttgcacagcaactggcatacagcacacaagagatgttagctattataatacttatctatggttagaagtgagtagtctgttttaagacttcccaggactttaaagaggtccatgcactcctccccttaaagtggtggtgatttattatcaagcaaatttcctgggttataatctttgaaatgtacatatttgtctataactctatgtctaggaaatggaataattttgacatttgtgagtatgatggaataaatcctccccagcagattggaattgttccatggctgacagttggcaaagtccacaatttgcatgaggatatgtgaggatgttacatatccacttgtaaaaagactgactggataatagaaatatcctatagtgtctgtagcccagaatttgatgagaaggtaagaataatctaatcaagtctccacaaaacgtatcaggtcttagaaatgtctgggcccagcacaccccatcagtcagtgtgacagttttaacatcattgaaaaggccgtgtattgaaagatttcttaagtcaggtctgtacagctagctataaagctccaattttctgtagggagactttgtttatgactgagtggcattgtggggtttctaattactttagcttctagcacctgtagccattatcccctcaacttgcttttcttgtatttattcttctagagaaaaacaaggagaacaaagacacagcacaagtattttcagcatttttctcacctggtgtaccaatttggctgataagtatatcccagagggaaaaagattgtcagcagctgattgctattaaagtggactaggagaaagcttttaactcagatgggggtaaattttctctttaatgttgaagaagatcctgatttgtaaaaatgtcaaaacccggaaaagcaactttgattacttgctttgctgtgggctaggggagggggagaattattttcaaagatgagcactagttggatctttcaacagatttcaaaggtgaagatccactaggcgccagacctccatctaagacatatattacctgaagatgcttgtgttctcctgtaatggaacaatttcaaaatgaggtgataggagtcttcatagagctaagcacaggatggcatgggcagtgggggtggaaaccaatcacccactcagccacccacctaactacccacccacttacccacatggtggtggtagacagaagacagggaagaaatctcagcagaagagatgcccctgtttattgacaacaagttggctgttggtcagggataggtcctgaatgttacagtcaagtaggaggtggaaatgcagcatatcctctgacttctcttgtctccattttgcattcttctcagtagttccttctcagtaggaactattttttggctctgtatcaaagtgatggctgtcagaaatgagtattcattaacattgaatataaagccagagagccaataatagcccaacaaaagcttgacctgtttattatttttggcccagaacccagagagtgtctagtaaatggtagatcattggtgggtagggtgaatgctgcactttgatactacacctggaagagtgtctagtaaatggtaggaaccatgaataggtagacaaatgctgtgcgttgagctttatcaggatgtttttacctttattcatacaatattcactataacctgtgacatagatgaaattatagtcatctcttggtatccatggaggatatagcttccaggaccctccgcagatactaaaatctataaatgctcaagtctcttatataaaatggcatagtatttgcatgtatcctacacatagcctctcatataatttaaattatttctagattacttataatacctaatacagtgtcaatgctatataaatagttgttacactctatttttaaattttgtatttttgattgttatgttttatttttaaaaatatttttgatccatggttggttgaatctgcaaatgcagattccaccaatacaaaggcccaactccatgagcctcattttttatgctgggaaaccaaggtgtcagaaggtgaaaagctggcatgcttttaaaccattagtcatcaggtccctaagatgttgatatgccaccatttttattaatcctgaaacttcttttcttggataattagccctagactaagcatgtccacaggccatcaaattcagtacagggactacccatgtaaggtaagagtaaggtacactgaatgtaacacagttggaagtggtatgaaatggagtgtgcttatgtccactaaagaaaaccaaaatcaaattattaaagagaaaacacaggtaggccaaagtaagcatcccatttattggtagaattgggtccataagcagtcaatttgcaacttcataagcaaaattgaaatttaaaataagtcctaagcagaataagtcgaagataatttttttaaatctgctggtatatatttacatgttattaaaagcatatttaaataagtatgctttttttaaataagtatgcttttgataacatcaaatttggccctcaactgtgaatatataattaaatagaatattaaaatgttctgatgtgcaagataaacctaggcataacccttgtgttatacaaggctcttctgtgtttgtttgccctttggtgcagattctggtaacatgtttttttctttttcaagccgttatggcaaaagctattatctcagttactaattggccatttgcccagttccttgtcagtagttccacgtttttgcccaattactttaaaagaatttctctgatgattgaaacaatgggaacagttttgtgaagaccaccccaaccctggttaggctactgcacatttgatagcttaaaatagtgccatggtgggaagagtgctggaattgccatctggagccctggctccacgacttagaagaagcgtgacacccaaaccctcttacctgcaccatgtgtcagtagatctccatggggaatggagggtttaactcccagagggcacaattattaaaaatgttgaatgaccatgactgggcagagctcttggcatttaatggttgggaacccaccattgctaccgaccccacaaggcataggacagtcccacacaatgaagcagtgtcctggccaaaatacagaagttctctttctgagacacagtgctgtaggcaatttatttgccttctgtgaaccacattttccttatttgtaaaatgttctactgagtttataggatcatgatgaagatcaaatgatatatgtgaaagtgctttgtaagccctaaaacactgtatgcatgggaggtattacaatgattacactaagtggcaaagagagacaaagctctttacaacaaattgtgaactgtacagatctgtaatctccctcttttaaaaaaaatatggcttaatctggaccatctgtaacaagatggttgttttgattcattaagggcttctggttctcccaactctggaaacccctcagtgtatgtgattgtatatcaaagctatttgaaagatcagtttcctgattattcatagagtcttagaaatctaggcttggaaaatctgcagaacatacacagcataactgctaggagtatgaatttagagaccaaaggcatctcatttgaaacctgacttcaccccttccttactggctttgggaccctgggcaaattaattaacttttcaaatcctcagttatctatgaaatgggtattaaagtatgtgcctcatgggggttataagggttaaatgatagtctttggcatagtgagtgttctcaatgaaaatacactttcatcttgttcatcccccataaggtattaggtgtcccccagtatccaaccatctttacaacttttgcttgaaaagtggccatcctgacttgtttttcacacttcactaccaatggaaacatcccattttcagacttcttggaaagatctagttagggattatattgtatttccagctatgggatagatttctttacacacctgggtggggggaatcaagaaatagcacccccacaccctctgcagtacattgtctgatcttgtctgcaatcaaattatctactgggatgtggtgtttcatatcaagccttccatcaaaaccattaacaggcagttaacagttgatgtgaaattcttggctcccagcagcagcttaggtgtatttttaaatattccgtctggcagctcagaaggggaaaaaaagctaaaaaggcagcaaccagcagattttcttccaacaaagatcttttccccacaacctgtccacccctttcaaggaaggaataggttagagatgctgcacctaaatagcagagtgaccatgttacctagcaaccaaacctaaggatgggtgctagacctgcccactaattaccagagcaaggagaccctccctcagagtgtcacttaaactgtaagagcgttatgttccagtgacttccatgaaaggttaagaatgatgtgaaagccccctgtgtcatgagtttcctttcagttgctcaggagctatggagacttgaagacccatcaaggatgatatttaaagatatgaaatagcaaggttacaagttacttttcccagaccactttctgcccttcttaccatcacaccaacttctaaaaaaccttttattttgaaataaatgtacatttacatacagttgtaagacataagacagagatcctatatcccctttccccatttttccccaacaataacatgttgcatagctatcatacaatatcacaaccaggaaatggacattgatacagtccatcaacctgattcagagtgtgccagttttatgtgtagcatgacaccaattttcaggaaaacataatctcctgatctctactgaaacaaacccctctcctaacttctaggaggatctcctttctctttttgataagtctgatcaactgaatagatgaccaaagcaaaagtccttatgtctcagaaattctcaatagttccacaagaaactgactgtcatctgcctccactgcatcttctaccacctgcctcagaattcttgggataaggcaaaagctatgtcccaaggtcacattaggatttaggatcaggcacagcagcccatttttcagttatttataagtccatggcctgtgcatagaaagactggcaaagtctacattctttgaggtcaaggaatttgaagatcttattgtcaccctcgcttctcccctgatgccttaagtgctgcgaaaatctcccagctcaagtgtgtgattccgtgtctcagaatgaatgatggctgagggtaggagagaaagcttgacttggaggtgtagtcagaggaaggactattgtacctccatgcataggaagctgctttgctttcggacaaggctatgaagagctgttttcaaagtttaaagttattttctatggccagcagtgatgatatgaaaggttgcatggaaaagggcttaaggctagaagccggaacaattggagtttaaatctcagccccattatttaccatctatgtgacaaatggccttaccttttgagcctcactttcctcaccaacaagggattggagatggagataacagtgcctactccataaggtattctgaggtttacctgatagaagacggtggttttcaaacttgagcatgcattggaattacctggggggcttgctgtacctccacgcccggagtttcagagttagtaggtctgatgtaaggcctgatcatttgcctttctgacaagctcccaggtgctgcattgtagctgctggtttgcataccacactttgagagcctttgggatcccgtttatgattacactttgggaacccctaaaataaggacattaagtgcctaataacatatctgactttgggtattcacccaagggaagctagttcccctccaagctaataaggaaaaggtgcccctcccacccataaaataaactgagttctctgactttctagaaactgacggaacttcctggttgacagaaagccatgtctaaacaagcaatgtagaacaaaaggctgtgaaattatcaagcatatatgacaagtgtccatagccaattttcttatttcccagtatgacagtgattttcttttacaaaataaagcaaatttagggttaggggctttgtcctggatatacgtgcctgtgtatgtgtgtgttggtatgtaaagctgacttcatctctgacacgtaatattttaaccaagcagaaatgtaatacacagttttgtagcatgtgtatgtgggagagaatgtgggagaaggaagcttgggaaaacaagcgttcttagaagaactgcaaagaacctctcattagagaggcaaattaaaatatttcagtccctgggctattctttttaaatacaccaaattacacagcagttcgtaatggaagaataaactgcagactttatagaattaccttttttttaaaaagtggtgatatgcttcacttgtgctgtgagcaatataaagaaaattactcaaaatattttctttaccactgtggatttttgtttgtttgttttgtttttgtaagggtggatccccaggtataaacctgaaggattattttaataatttctggtgccctaaatttcttgacactgcatgcaacccttgatttctttttattagttcgctcccctgcagtctccttacattctctgacttctaacattggagggaatactctcacaactgatgataaagcttacatttgttcccatagcctaaaacatgacttccagattcaaggtgctattaaatctgttgctgccacaaagtttaattgactccattttttagctgatgataactgttgaatattcttacatcaaacaaacatcactaactctaattttctatcaaatatctgggctgtgctttgaaatgtgtctatgaagacattctttttctttctttctttcttttttctttttttttttttttgaagttatagcaacaggtaccaaaacacaagctgagaagtatttcagaagagtagttgaatgacagtggcaatctcagccttggattatcaatttgaatttgtttttttgtccaaatcctcttgatgtgagattatttcaggctgtttttccccttgcacattatgtaatgcctgcaaagaggagaagtcagatggaggatcagagcaggagccgtggcagaaaaacatgggccgtgttaacttaggctgtcatgcaacttgtaaacctgcagccccctaaggtccagcaagatgcaactgacaggacttctgatccccagtcagtttattcccaggaaaggcaaccagcaggaattgaaatagtaattgctttcctttattcaaagacatcatggatgagacgattaaagagattaaggcttacctcattcagtgcaccggaataaatgtagtctgcttttctgataggactgtaactgtcaatcaaaggattaggcctttgggaggtagaaaaaggaggtggccttaaaatgtatttgaatttgcaaactacagctgtgtattttaatcctggagatacgcattgatctttccccctctttgaagtctgctgttagctacaggctctctggccccaaccacttttcttatatttttttaaaaagaatattttaaaaactcatttaaaaatcgtactgcattgaatcacccaaagggaaaatataattaaagtaaccatttgtattgccctcaatgaggaaaaactttggaagtgtgcttaactttggaatatacaagtctgattgtttcatcagaaattgcagcactgtatgcctaaaaatatatttttccagcaggtttgggattttgtacttataaggaggctgtttatccatttagcaatttagctgagggcctagtataggtttttaatcttagcagcacaagtattcctgttggtttaagtcttaccacctgagttagtgctgccacaacacacacattctgttttctcattagctgtcacacaattgtctgcatctattaatttttgaaaagataatagatattcttggagaaaccaagacaaagtggcagaataaatggcaggtcatttctcatgtggtggcagaacttaagcatttgcaattttctgactattgtcagtcaaggttctgggttcattatctcaaccttgacatctaggttccttatctgcaaactcaatttctttccatcatttccctgcctgaaatgtccgatcagccaagacgtgtctcttttatttttttaatttaatttttatttttatttttatttttttgagatggagtctcactctgtcgcacaggctggaatgcagtggtgcgatcttggctcactgcaacctccacctcccaggttcaagccgttctcctacttcagcctcttcagtagcagggattacaggcatgcgctaccacgcccagctaatttttgtattttcagtagagatggggtttcaccgtgtaggccaggctggtctcgaactcctgacctcaagtgatccacccgtctcggcctcccaaagtgttgggattacaggcgtgagccactatgcctggctgaccttgtctcttaatgtttctatatcaaatgagcaagctaataggtctgttagaatatttaggagaaatccatccgttttcccatctattcatccatccatccattgattcatttattcaggtgcctactctgcctcatgcctggtgctcaagacaccagctgtgaataacatgcatttattctctaccctcatggagtgtataatctaacatggaaagaaaatgtttaataagtaattaggcatttgagggaaggtgaaaaagatcaagggtgatgtggtaggcagaattataagaatgcccgcagtgacacttgcccttaaataatcccctctgctttgtgtgtgagtagaacctgttaatatgatagcattcccttgataatgctaagttctatggcaaaagggaaattatctcagttgtcctaatctaattataggatccctttcaaagaagagcattttctccagcctttagctgagagaaagagagactccaagaatgggaaggatttgatgcaccaacactggcttgaggatggatggtcatgagatgaagcatgttgatggcctttagaagcttagagcagccgccagctgacagccagcaaggaggcagagacctcattcctagaaccacagagaactaaactctgctaacaaactgagtttgggaatgaattcttcactacagcttccacataagagtccaggtcttatgataccttgagttcagccttgggagactgttatgggttgaattgtgtccagcaaaaattgaactgtgtcacccaatgtttatgttgaaaccctaacccctgatacctatgactgtgtcatcatttggagacagggtctttgtagagttaatcaagttaagatgagatcattagggtggaccttaatccagcatgactctgactggtgtctttatcagatgaggtaaattttgacacagacacagaaacacaggaagaatgccatgtaaagacacagacatagagggaagacagccatgagaagatggaggcagagactggagatgtgctactgcaagccaagaaattcttggagctaccaaaagctgaaagaggcaaagaacattcttccctagagcctttggaggaagcttgtacctgccaagaccttgagtctggatttctagactccagaattgcaaaataatatatttctgttgttttaagccacccagtttgtgatattttgttaaggcagcctagaaaaccaacacagagactctaaagcagagaacccaggtgagcctgcccagacttttgacctacagaactatgagtataataagtggtgttttaagcccctaaatttgaagctatttgttatgtaacaatagcaaacaaatacagactagtatgaaaagagtgtctaatctacctaatctgagggtggttttccaagagggatgtttaagatgaggaagaaggccaggcatagtggcttacgcctgtaatcccagcactttgggcggccaaggtgggtagatcagaaggtcaagagattgagattagcctggccaacatggtgaaaccccatctgtactaaaaatacaaaaattagctgggcatggtggcacgtgcctgtagtcccagctactcaggaggctgaggcaggagaatggcttgaacctgggaggcagaggtcacagtgagccaagatcgcaccactgcactccagcctggtgacagagcaagactctgactcgaaaagacagaaaaaaaaaaaaaacaaaaaaaaagaggaagaaagagtaagtaggaattgtctagtaaagaggagaaagggaagattggtccaaacaaagggaatggtatatgcaaatgccttgaagctgaaaagtgccagctgcattcaaggaactcaactgttcaggctttcacccttcagatagtattgttattaatgccaggcctaaactaggtgctagagacaaaataaggacctgcaacttcttccttgtccttaccgagctcatatttcagtaagagaggttaaaaacacataaccagcctaagaaataataattccacttcatacagtaggctctgaaggataaaatataggactgagggagaaaaccccagagtattggatataatattgaaaatgagagggagagtcatgtaccatgaatctggaggggtaggcaattccagatcaaggagggtgttgtgaatgtctgtttctctatttgtggaatatttcagaaaagtgctatctcccttactgaaaattcacagtagctatcctgctgtgatcatctcggcaccttgtatggtatacacctgtacattttcagattgagcccagtgtaccaaattctagaccattcccctaacccaacacaggattatacccctggggttgaaattatggcttgttcaggatcattgggcttttatgaaaactcactgctcccatttgcattgcatctttttattgcttctttaatttcaatttatttgtatcgtgtgtgcatgtgtgtgtgtgtgtgcacacatgcatatgtgtgaggtccccaactatcctcagttcaatgatgcactagaaagactcaaagatatcagaaaagctgttatactcatggttacagtttatttcagaagagatacagattaaaatcagcaaaggaaaaagtgcacagggcagagttcatgggagaccaggcacaagcttccagttttcctctccaagtgagatcacaggacagtacttattgttcccaggaacaatgtatgacaacgtgtacagaatgctgccaaccagggaagctcactcaagacttgatgtccaggatttttaaaattaggaattggttacatagggatggagtgcccatatgactgaccttagttacatagtctccaacccaagaaccccatcgttaatcacatcattagcataaaccatctgccatggcccaatgccccaggtatacaaagacactgttatcaggcaggatattccaagagtttagaagttatctctcataagcggatgaagggggggccatgcctttctttggaatgtgtagaatttggacatcatagacctgctgaatccaccctttactgtaatacacacacacacacacacacacacacacacacacacacgcacacagattgtcattgctttaaaccttaccccaaaatttggtcttccaacatgttgtgagcatcatcactaaaaccttgggattgtagcaaaaaataaaaatcattttgcagtgtttttttaatattccttgatgtagtggtttacaaacatagattcacattgtaaatatgtaactatgcttggggacattttttcatttaattttactttattgaagaataatttacatccattcaaacaaacagatcttaagtgtacagttcactgagttttgacaaatacacacataacccacacttcttttaaaatattgaccattttcatcactctagaaagttccctcatgccccctacagtcaatccctgcccacccacctccaccaccatcccctggagccagtaactgttcttatctcttactaaacattagttttgcctattatcataaaagtggaaacatacaatgtatgatcttttgtgtttgggtttttttcccactcagaataatactactgaagttcaactatgttgtgtgtatcagtagattgtccgttttaactgctgggtacttttacattgtttggctataacacaatttacgtatctattctccttttgatggacattttggctgtctccagtttttagctattaggaataaaattgctatgctcattctcatatacgtttttctgtgcacatatgtttccatgtctcaggtaaatagctagcagagaagttgccatcttgtaggtatatgtttatctcatctgccaaaccgttatgcaaagtaaagtggttgtgctatttacacatctcccagcaatgcatgagagttacggttgcttcacatcctttccaacactggtctgtctttttaattttagctgttcaaacaggtgtggagtggtatcttatggtagtttcatttgcattttcctgatacctattgatgtggagcactttttcatgtgcttattagccactcgtgcacctgcctttctgaggtgtctggtcaagtcttttgtctattttacaaattcggtgattggactttttgctattgagttgtaggaacgctgtccctgattttgcctcccctgagattttgatacagtagatgtagtgtgggtccctgaaggactctgacatacagataagtttaaggactaatggattaatgggtctgatgtcagtttgctaagacttcaactgtatctggcagccataacttgaaatttccccatccaaagacttgcttggtgattattataaattgttaaggaagcattaaaaaaacaattctcagtaggtggtttctgtctcactctggacttggcgctgaattttaacatcaacctaaagctagaaaattcctagaattggagaaagtcacttaaaccaaatgtgggctccacacaggtattactataattattaaagggcccttgagttgatttgtagcagcatcctaaaccacatcctgtttttcttccctcaaagggaaatgtggtaatatagacatttgaacttggaaggccacatgcaatctgcattcttttctaaataaaattgatttggaaactacttgaaccttgtgttaatgttcacattgtaccaatttatctagcagacaacctccctgacccaaaatgttggcttctttctactaggtaatttcttgaattttcatactgatttacacagtacaccgaataagctacctgcttaaagacagaagagattaaacaaataattttatccaattactgagtaaaccatggacgttttctctttaaaggaaactccagatttggaagttgttttgactcatagctcatggttctaagggattaaaggactaaaaaatcagagaattaaagaatcaaaaagtttctacaaacttaaacatccaaactgtgcagtagattttttccttttccagggagccctgctgccttaattaaggcaatacaaagatggcatgtagattgtatctcatatgacagtgttgaatggtgtgacaacctgaaaaatcatgcagagacccttccctcttcctcaggaaagtgtgctgaaattgatttgcgatgctcaccatcattcagcaaaaatatacctttctcaatactgtgtatctgacctttcaagatatgaggttctgaagttagccagagagtaaactcaaacaaatggtgcagtgtctatcaaatattctgttatcgtgatgtttacaaaggctcttcagtcaacttttgattcttcatgtaatagagaggagatattttaaatcctagtgatgtaaggtgttcaaatccttagagactccaggtaacctctgctctagggacttcatatgcctttgctcttacttcctggccttggactattttatctgattcctcctaggttgaggtggagaaaggccaaaaaaaattttaactagatccttcacttcattcacaactctggttagaacattttgatgaggaggaggaggaaaacctgggcttcagcgtagcttctggatcactagtagatctttgtcactgtggactaaagagatttgaaaactagggggattagcacaagatactgaaatgtgaaaagagtgatgactacatgtcagctctgtttggtttgctctaagagaaattgcatttttaaagctctcctgtgaaaaatgtgaggctttctgaatacacaacttcttacagttctgcactaaggtaggttcctgcaaaggtagtgaggtcatgtttatctagtagtgctgggaaggcttcatttagccatggctgctttaaatatatacatagatatttaaagttaccatcaaggggaaattttcttcctttttctcaccatggagtaatgtgttttctctaaatggctgtcctaagctgcacattgatttttttgttgttgttaagtcatctcctgtaatttctctatgatatttgcaaatgaagttgttttaacacaagttactttcctgggtgggggagaataataacatacccacctttgtaaacaaatttatttgaggatcagtgggggtggtgagtgagagacaacctctaagcccacaagtagtcaattccttggggactgcctccaaagccttcagttagctaaaccttttcctaaagagacaccagttcagaaacagttaaaatgggaaaggattttttcccattacatataggctttggtatgcataacacattctgtcttccttttggccataacaatatttcttataaatatgctaagtattcatagcaagagcaggtcagagtatcatgaaactgttaatttaaagctttactaaaatatatgcatcccccacagccatactctacaggaatttgatctctcttacagcacaaattggagaatgaaatgagaaatcaacaataaatattttaaccattcaagttcttcatatcatcataaaaagaacaatttgaagatttcagatatatccccaagctgttctaatccaatcagaaaagtatagttattactcatctttccttcttttaagtaaatttgcttgaagaagagaaagacctggacctagggagtgcaggaaggcatgggaaagagaagggagagtgagagagaaggaaagacacacacacagagaaaaacatgccttttacttaaaagccctatcagttgttttgccttgatttagttagaaactcaaaaaggtagaagcaggaagcagcacaatatgaccaatttttaacagaaacacatggggcaggagtgtatgatagcaagcttctgcctttctcatgtgtctgattatttttatggaagtggtattgaagcataatgaatgtcagagaattctataaatcctacatgcacacacccatgtaatctgcacccagatcaaggaacagaatgttatctgtcccccaggagacccatcctgccccctgccagtcacttctcccccacccctggtcaccattatcctgatttctcggatcatagattaatttttcctagttttgaactttatataaatgaaatcattgtgtgatgtctaggggactggcctcttcactcactaatttgtgagttttttttttatgtagcagtagatgatgttcattatgtgtagaattccattgactatcacacaatatttcacccattctactgctgatgggcattttggttgtttccagtacagggctattataatctgtattgccatgattaatcttgaacttaccttgttagtgaatatttacctacatattttatcttcatttattttaagaacagcagtctctcagaatactaagaagttgaaatttaatttgttttacaaaactatatacatgtaaaaaggacagaacaatttcaaaagaattgactagctctgttaagagagggaccaaaaagaagacggaagtcccgcaaaacctgtcctgtgaagtttgtgtcaaaatggagttaacttttaaaatgttatagtttgtttagtgattcatttcattgactaattgctttgatctttaacgtaataaaaacagctgaaagaggaaaagagtgggtactccctgtgcttaacaattaagtttcatggaggtaattcgtaaggatggcggagcataaagcataccctagcttcatttgaaacatggtcttgcagcaacaaatttgtgttatattttcagaatatggcttgacagtttttaaggaattgtaagtttgagaaccactataatccaggttctctcatagagtaacttcttcccaggattgaattagaggtgtggaaatttataaacccataccaagatgcaccgtacatgtgaaacacacagatttagaagagattatatattaaaaaagtaaaatatcgcatgaataggtaaaagaaatttttatatgaaccgcttcacgaatttatgtcatccttgcctaggggctatgttaatcttctttgtaatctttccaattttagtatatgtgctgcccaagtgagcgagcatgtgtactgattatgtttttaaatgataatgttgtggctatattgagttaaacatattatgaaaatttcacctgtttttattttattaagggagctataaaaatttaaagttacatgtgtggcttctgttacatttttactgtgtttttagatcttcacatcacctttcaaagactggtggtttggcccagaaaacaatgagtttgacaggattggggaaatgagtttctcaggtgatatattacaagtgcttactttcagcatctaccaatagatttcagggcctatgtagatttagtgcagttgcaactatcttttaccttattatttcgaagtttctatggtatcattaatatacatttagtaagtgctgtgtgcagagataagagagatatatggccactgtctgtcgttgaaaagttccacatatttcattcattcatttgttcgttcaataaaaatttattgagcttctactctgtgttggaaacaaggcaaacatgtgagatttggtagtaaataaagcacagcctctgctgtttgttggccacttgtatgttttcttttgagaagtgtctgttcatgtcctttgcccacttttcaagggggttatttgttttttgcttgctcaattgcttaagttccttatagattctggacgttagacctttgtcaaatgagtagttcacaaataccttatcttattctgtaggttgtttgttgatagttttctttgctatgcagaagctctttagtttaattaggtcccattaccaatttttttttcttgtagcaagtgcttttgaggacttagtcataaattatttcccaaggctgatgttcagaatggtatttcctaggttttcttctatgattttaataattttaggacttacagttaagtctttaatacatctcgagtttatttttatatatgtaaaatgtaggggtccagtttggttcttctgcatatggttagccagctatctcagcaccacttattgtacaaggagtcctttccccattgcttatttttgtcaactttgttgaagatcagatgcttgtaggtgtgtggctttatttctgggtcctctattctgttctactggattatgtgtctgtgtttgtagcagtaccatgctgtttaggttactgtgggcttgtagtatagtgtgaggtcaggtaatgtgattcatccaaatttactctttttgcttagtattgctttggctatttgggcccttttttgattccaaatagattttaaaatagtttttttttaattctgtaaaaaatggctttggtaatttgatagaaatagcattgagtctgtagattgttgtgggcaatatgaccattttaatgatattcttctaatccgtgagtatggaatatttttccatttgtgtttaaacgtttttgtccagtgcccttctactcctgtgctttatccatcaaccgccatccacagcctcagaaaacagctcatttaatttccaccagaaagtcagagaatcaggagggtcactaactaaaagggtcttacacatatataaataaatcatttgcctggagaggcatgcccttggtctgatgctctctcttatggagagatgcataatccactcacttgtaattcagaaaggggtccaacatcaatttcctaaaagagctttctttcagaagatagagaggatgcattttgaaccatttaattgctcctatgagtgacttgcataatgcctgtagaactatctagacagcacatgttgcctgaagcagcacatgccagttgttttctttgctgcctttaaaatgaaattgcatgcacatctgaagctgaatgactcttgatgtgtgattgtacctttaccccgattctaaatagaaaagatggcttttttattaactcattttctagcaggaagggatcatttctaaggaatgacagtttctgttttcagatttcagctctagtactcactaactgatgaaacttggacatattagctagacagcttgaccagtgtcacctcacttgaaggccaccttatgtattaaggcaaaaggactttttaaaaagtggcattttcttgattatatagtaaaattatgcacattgtataaaatgtacacatgcaggaaagtatataaaagtaacttaacaatcacctgtctttccaccaccaaaaataaatatcatatgttaatatttttgtgtatctccttccagttgtttttgaatatttttaatagtggaagccataccgtatataattatgtattttgcctcttttacttggcattactgtgtaaatactttgcctcataatgaaaatctttttaatgtaatttgattttatatataccattacataagataaacatattatttagtcttaggaggaaatatacatagataaaagacatttaagccattaaaaaacactgaggtagataaaagcagtcttaccatattaaagccaaataaatactagtatctgtaaagtttaattcatactcccacataatgtcctttttgttgttttaagtttataaattaatttgcttaaattacgacatttagagacaatggatgtcctcattttgagaagatactttctaacaaaaatcagctgatgaggatttaatacgcaccagcccttgccctgtatgaaagaattgtgaattaccaattacagcattgatgccattgttcagctgcctgagcaaaacattaggtggcacacctgtcagagaaggaagagaagtaactgctggagaaggtcttaggaagccttaagctgggctttgaatgatgggataggattgagataagactttataatgcacggcttttaacagtcatatgccatattccttaatctacaaatggtaggtttgcaattatttctaaacaacaaatataaatccatagtgccaaatgcatgcattttcttgaggcttctggtgtggatggtgtgtgcttctgagagatggaaatgacaagcagataactctagaggtgattatgcaatgagcagctctgaaggagtgcaggagaatgttggcttacagatttttttttttataagattggctggtaggaggagtgggtggaatatgtggaaaaaagaggagagagcaattaagtaaaaatgttaggctactctcttagttaaatattaacaatcttgtggagcatttgacttgatttattcaaatgtgctttccctccaactccttttgcaatttacatcactgattcagcttttgttggggcatcaacctctaagaaagcttgatgaaagctaagaaccacgggtcccagtttaagaagggctggtttataaacagagtctggttacataaactactattcctctattctgggtttgtttccccaccaccagtaccagttcctttggattttgtatcaggttcatttgaattggaaggggaaaagaaagctcagcttaactgatagcctcctttgtgctttgtgcacagctctgtgctaggcaccaaacacacgtaagagccctgcgccctcacaatcgccctaatgggcagcatttctacttgtggaccgggagtggaaaagcaaagaaatgacagtgggatattcagcagaggaggctcacagggaacaaagacactcaagagtgaagctatggttttaggatacagctattcagttttctatgacttagcatgcaaagacatggattaattctgctacagaactgtatgttaactggataatggaagtcattttgttctctcaatgattatcagaaattcatgctctggaaaagaacagacaacagaccatttgtaaaaacaaatccgagtaataaagaaattaatcagatactttcatgagaatttccccaatgattttaatatttagtgggcatgtacttgaaaagctgcttctcagaaattgatactcatgaatgatgatgatgattatattaataataataatatatgaccactactactaatatgctttgagtgctcattataaactggtagttatattgggtgattatgtgaataaaattgctcatttatttggccatagataacattatcgtctttaccttttagaggaaaaactgaggcccatgttctcctacacagaaaatagtttttagttcaagtccatctggtaccaaaaccatgcttttgaggactactctccattgcttgtttagagctgaaagggatcttagggaaggtcatttcccagattaggggcccgtaatggtagtggcttgaccagcatcacataggtccttagcagcagagttagaattgcatcctggcctgtggttctaattagattcagaaaatatgcaggccagtgtggaccacttgaaaataatcctggtattcaaagattatttgtgagtgatatggctatattgtggcaattgcagcaaaattaaaaggcaatgttttatgttaagacgtaattgtatgtgttcagaatgatgggggtgagagtctattaaataaacacctacagtgtctttatattctgatgtgtatggtattaccatacacatattcatttcatggatattatgcatcatctactgtatgacaggcactgtgccagaggatgaaaatacagcaataggcaagacaaacctcatccctcctcttgtggacctgacgttctagtggaataagacagaagactgttcaagtaattaataagaaaaccaccagagagtgataagtgctttgtataatgttaaagctgggtgatgcaacagagacttcctgggagctactttagactgggcagtctggggagatgacaattaggctgaaacctgaacaacaaaaggaaacagtcacatgagataagaggaatgagtattcctggcaaatgtaaggatgattgctgtggaaaagctctgagaaaggacaaaccctgagattggcttgcttgaggaagagaaagaaggcctgtggcactggcatccagtaaaagagggcaaaggtagtgacatcacagaggtgcccaggggtttgctcttgtgggtatttttgagccagaggaaacagtttgaatgctattctaagtgcaatggaaagccattggaagtttcaggcaggaggagcaacgtgattcaatatatttttttttaaagatcactaacatctagaaagtatgaaaagcaacagtgggagctgggatttcaatgaggaaacatgacaattgatcagcaaaggactgtggcaaggattcaagtggcagcagtgcagatgtacagaggtagtaggatctgagctatatctggcaatagactcaacagaacttgacgatggattaagtgaaggaaaaagaaagaaaaagctaaatcaagaataatgtctacaatttttggtttgtgcagttgagtacatggtggtattgtttattgagttggaggaggaagagttggaggaggaagaggtttaggatggaaaagtccggaattctgtttgggttgtgttaggtttgaaatgcatattgtactccaccatccaggtagaggcatccgttaagcattggatctaagagtctagtgcttagtggaaggtcaagcctagagatacagttttgagtggtatttgcatagaaggtggcactgaaggccaccttttagatgataacatcgaaagagaaaggacactgaggaaaggacacccaggacagggccctggcactccccaacatttgacatcaaacagaggaggaggaataaaccatggattctgggaaggaaggtcagggagtcagaaggaaaaccaggagaatggtaccttgcaacctaagagaaattatacaaataagatacagctgggtgccactaaggaaaataaagaatgatgatgacaaatagcaatcaacctgggcctgaagcaggactttttgaccgcaccctttgaccctgaagactttaagaataggtaaccagaccaccaggagagcttcaggctctctctctttgtccacttttactttttttctcccattctctgcctcttgacctctctaagtctcatttttctggagagtcagactcaaaatcttgtacctcagttttctcataaggctagcaatcttttatctcatttattatttttattccatttagatatattcagcatttcattccatttagaaacattcagcgtttagaaatatcaaattgaggctgggtgcagtggctcatacctgtaatcccagcactttgggaggctgaggctggcggatcatgaggtcaggagttcaagaccagtctggccaacatagtgaaaccccatctctactaaaaatacaaaaaattagctgggtgtggtgatgtgcgcccgtagtcccagctactcgggaggctgaggcaggagaatcgcgtgaacccgggaggtggagtttgcagttagctgagattacaccattgcactccaacctgggcaacagtgcaagactctgtctcaaaaaaaagaaagaaagaaagaaaaaagaaataccaagttggtagtacctaaaaattgatgggaaatagcaccctcttgacaaaatctagatatataacagttgacccaggaaaatgaacctcagtagaaataatggccaatgaaaaaaatcactgtggcaatatatatttgaaatcattgtgaataaaaactggcagatgaagtaaatatgtattaaagattttcaaaagaaatgagctcacccctatgaaaataattgataaaataaaaatattgaaaaattggaaatgagtttatcgtgttggatagaaacttgattgaagaatcatggccaggctcggtggctcatacctgtaatcccagcactttgggaggccgaggcaggtgaagtacttgaactcctgagtgtgagaccagcttggccaacatgatgaaacctcatctctactaaaaatgcaaaaattagctgggtgtaatggtgggcacctgtaatcccagctacttgggaatctgaggcaggagaatcacttgtacccaggaggcggaggttgcagtgagctgagatcacgccagtgccctccagcctgggcgacaagagcaaaactacgtctcaaaaaaaaaaaaaaaggaaatttgatgaaagaattaaattggcttactgatatttgtccaagaaacaactgccttgatgaagattccccagtgttgatttaagtctgattaatgtttgtaatcaagacatttagacatttgtggcattgaaatggcagggtcaaacccttgggtcaaaatgtcttattccctgatagacccgttttgtgcaataatatatcatgaaaacaaactatctttaaaatacaggaattaaagactcattgaagtcatctttaatttcaaagcccttgattttaaaaagcgatctcttttggactgtagccttcactgtcccaagactataaatgttagagaggaaataattattccagaatcttattcaggaagagttgcagattccttgcctgagcaaggacaatttctaaattagtgtcatttgaattagtgccttttcaactgcagacagttctttcaaaaatacttgcttgttcttatgcttgtttccttttttaaaaaaatcacattggtttgcaattgaggttaatattagttaaactctactttgatcattaaattcagtaacatactctgccaattactagctgtatgtccttaaatacgttacctaatttctctaatcctgtttcctcaaccataaaggggaccagtaacacacaccccacagggttattgtcaggactaagtgagagaaagactttaatgccctgtttctttttatttatttggagacagggttttgctctgttgtccagactggagtgcagtggagatcacagctctctgcagccttgatctcccatactcaagcaatcttcctgcctcagccttctgagtaactaggaatacagttgcatgccaccacacccggctaattttttttttttttttttttaactaaagacgaggtcttgctatgttgcccaggctgaatgccctggtttaaagtagatgttcaatgaaagtctttactattgctactattgttagtatactgtacattttctatgtacacaacgtaattactttagctatttggtctgaacaatttgtctcccaaatagtttgaaaattttcccagggaagggttaggctctcatcctttattagtgtctttcattcctctgtatcagtcatagcagaacacagctggcagaacacagctgcctcgcccagactgggtaattgaggggtacattatgaagggattatttaaagaaggttggacagagcaaggaaaagccataagggatggagaaacaccctagggctagcaacagcagggagcccatagtttgtagaggcaggggaggaggttactggtgacagcttggggcacaaaagacaggccactgaacaagaactgtggttttagatagagaagtgccaaaatgctctctgggaggaaggagccagtatattaaatactccaacctctctctcttcccaccctgatctcctgctggtgcctctcattagctgagctcaacagaaaagcatcaggcaaggaagctggttacagcagtctatagaaatcagcatccctgaacacagagcagaggggaaaagggaagagaatggatctagggaagtaaaatgagattaggcagcagagcctctccagccttcagttagcacagctgctttacatatagttagtgctgatacatgtttgtggaaggaagggaaaggaaaattgattgaaggcagttcataaactatagatgactcatctttaaatgaagattgagaaaaacactacgtaatagcatagtagtttcgaggtaagatttgaagtcagaccaaccccagtgtgaaatcagaccaatcccttagtgcttcctaatggagtgatcaaaggcagttactaaatgacttagcttcagtttcttcctcagacaaagggagataaggttaatacctacttcataggttgcctttgaggcgtaactgagaggatggatacagtacactgggcacagaaagcagcgcttgagaaatgttagcaaatgaattctcaataacagtgagcggttctcaactgggggcaattttgacccctaaccccattccagggaacattctgcagtgtcaggaggtatttttggttgtaacaactggggagtgctataggcatgtagttagtagaagccatgaatcctacttaaatatcccaccatgcctaggactgccacccacaacaaagaattatctggtcctaaatgtcaatagctccgaggtgagaaatccttccctgtactgatttcatctctgtgattccatccttgggcctctatatttcttgatactggttcttaaaatccttgattatttatactttgttcactctcagtaaatttgagatttttgtcctcctcttcccattataaggtcaggacatactgtgtctatggcacttcaacactatgtgattttgtcttttcaccatttgaagtaaataaacaaatatataaataaataaagataaaatataaatcactgtgatacgttgtaatctgaactacagcctcccaatattaaagcacttatgtcaaatacgtgctatagatttgcaaggcaacaacaatacacaatacagagctatttctcggggtgtttcaaatcgccagggagcaacatattgaaacatgttgttactgcagctctcatctctgatgaacctcttcccaaaagaaaaaaaacaagccaaaaataaattcataaagctagtgagtctaaactaggtcagtggaattaaacattaatataaataagggctgtccttcaacataatgggaatgtatttcctctctctctcagtcactcacccctctcacccaactcagccctattctacccagaatcgcccctggcaacagtggcctttcctcttgagaaagctattaaaatagaatacccttggcctcaagatggctctgagtcctcactatgtgtttcatctcctccagcctcaaagggggagtggttttcccagctccccagtttcttcatttatctgtccattcattcatccgtcaagtatttattgtggtccttgaattaagcagtacagacataatggtccctgtccacatgtagcatgtaatcaactgggggatggagacattcatcaagtaagcaagcaaattaatacgtcctgattgtgaccagggctgttcaaggagcagggaggcaccagagaaaataaaatcagagtcctactgaggcagtgtggtcaggaaaggtccttttgaggtaatgacgtttccagtgacattagaaggccttccaaaagaaaggtgggaaagggtacctaggaagaaggaccagcctgtgcaaaggccccacggatggaaaagtgggatctgttgagggactagaaattggcaaatgaggcttcactggtgagaggatgtaggacaagatcagcaggagaagaacttgaagttaccctgaaaattatcctctcgtatcctgggaaaacgagaggatttttaagctacacggtgacttactatctgttaacatttagagtgctttttctatgggccaaaaacactttacagatgacaatgctaacactcacattcaccttgtgagataagaatgattgttatacccacttttacagatgaaaagtggaggcacaaggagggtaaggaacccaggatcatatagttatatatcagggtttctcatctccccactgttgacacgtggggcaagggccatcacgttcattttgagatgtttggcagcaacacagccttctacccactagatgccagtagcagtctccccctcacctccagttgtgacagctaaaaaatatgtccagacttttccaaatagccctgaggaagaggtgagcaaaatcctctctggttgagaatccctgctatatagaaaaaaaaaaaaaaaggaagcatctcaaatgccattattcagtaatgcccctaccttaatgtcttacaggctctttaataagctttctctgtgttttcaaggatcattcgtctcagatcaaggcttctctccttccccagctagtggatacttgatcttgtggatctacccactcagtaaatcacccagcaggtgtagcaatgtggagttgcatggttcagctctcctatgcattaaaacacatcttgaaggcagaatagtggaggttgctaagaggaggcaaagcatagaagaggccagtgttctgtgcctcagccctgtcctttcctaagtgttcttcttgctcatctcagaagcctactcagcactactaggtgactgccttctaagtctgaaaactagtgcctcttaacagtgtggacgtattgctggaaatgacctatttggggacacagaaaaatgcctcttttctctggatcaacattctgaaccagaccagagaatagtaggaaagagcaggatggctgggaattgcttagttgacccttgggaaagattgtacaccataatgaactaacttcagtttcctgatttgaaaaactatgaaggtgtcaagcattatgaatgtccactggataagtaatctatcagtgtttgtttattcattcaattcattcaatacctgggattttaaaggtagattttgagctcttttcactttgaaaccaccaccttcatccagggtctctaaatcgaccctcatcgaaatccatcagccagagattcactgattcattcaattaaaatgttttaggtgcctatcactttgaagatgctgggcacctgttagagagattaggagaggttgacctaatcttgaagaggggtgagtgggaggtggctcagtgaatatgaaggctgtttagagatttgaagaatgagtagaagtgaattaggtaaagaaagtggtaagaaggaaaacattccgggcaaagagtacaacatttacaaagagccagcagacaagctggttttgtaggtgcagaatttttggacaatatttcaagaaactcatgagagtgtgttttacaggtatgtaggtttgtgtgtgtgcacatgtgtgcatgtgtgtcttaatttggcatcattatgcactgtccacactccataatactaggttatagtcaaaatttggcttggccttatgtgtcctgtggcttaatcatgttccactgatatatattatttgcttacacagaacagacttttgctgtgtaggtcagctttgggaggcaaagctgccaatctgaatctttctcctcacaaagacttcactggatagaaaccacaaagcaatgtttaaaacaagcaaagtgtgctaaaacaaagagtgatgtctgcacaattgtgtccaacaaaataactataaagaaaaaaattaagattcaggaaaatctagacaggctcaatgattacaacagtagaaagaacatacattttgaggtcagaaccacctgggtgtaaatctcaccttcacctccctcatgtgtgaccctgaacaaagtagcttcactcagctgggcctttttttttaatccgtaaaacggggtaatgacacctgcttcacaggtcaatttaggagtagagatgatttgtgaacaacacctggcacatattggcgttaaataagtggtagctactattatggttattaatatcaaattaaaatcaaacattaatatctaatttgctggatttaaaacatggaaccacagatttcatttacagcttcctgatagccacagcacaacaggaaagtcacatatttttcctgaataaaagcataaaaattccttaaggaaagacaagattatctgggaccttatgcatgaaataatgtttttcctgggttttcattgaggtctcactgagaaacataggagatgatatctttaacatcatccctatggcaaataaatataaattctatgtgcttatttctttttttaatctttcagagtaagccaaagtcataaaaccaaagaacagttgtggggcagagattatttctaattcaactttaaatctgccaaaaaattcttgcatcaatggcatttatggagtagatcatctgttctttcttttcttatattataagcacatatttaactagtgttcttgaagcactatctgttagttaagcctctcagtaattcttcaaggtttgtggtataatgcccactctacagatgaagaaacaggttcacagtccaaggttagtcaccacactagcaagtggggaaaccaggacttaaatcaagatccatttgactgacttgactctactcttaccatctaccccagcctaccaccttaacaaatgtagctaagctctgttttcccctgatgggaaaataagggttttgtataaaaatagaaagaaggaaaattaaactgggggctctaggtgtaaaattgttttattactaagacatcgagaaagaatgttttgtaaacgcgttttctgggaaagatgttttaatctttttgttgttgttttggtttattccaaaccatttaactaaaatgacatagataaaaagcatattaagaaacacatttaacaaaatcatggcactacaatatacataccaaattgcatgggtggctctgattttgaattctgtgccttcaaaacccagcagaaataaatgaacatgtttatattaacaaggataacgcaaatctgtaatctgtaatttaaacatatttctatatttaataagtcatgttaactcacattcagtaaacacacagtaaactcacatttaaaatatcttcccagtaaatttagttttcattttttctacatgattctggaaaagcatataataaattagtcatagtctgtatataaaagtgaaatgattagtaccttcaaagggagtggtacccctgaatcataaaaggagtttcacttaggatgatgaccttaatatttgctttcaacatttttttcacccaaaagaatgatgatgatgatgatgatggtgataatgatgatgactatcattttaaagaactgagaagggtgtacaattttactccactgagcttcctaaatgctggcagatgacacgaaactcctgtgaaagtgacaaaggactgtcctactcacagcacagcagagggcatgtgctttctgttggcacccatttcccctgttccccaagtcctggggggtaatttggaggagcccaggcagatcccacaaacagtgtgggtctatgtgacagctaaggaaccctgagcttaggaaagcccaatcttataaggtactgctagcaaacctgctcaggagagaaacattatccttattatcctagtcaggaaacaaatcttccctctgccctgcagagaagctctatctctactttccaagactgtttgacatgtaaatatccttgaaaggacagccaagaatgaaagtggtcaaagaaatgtagaaatatcatggataatcactttccaactgtgatggtggtggtggtggtaacagtggctaacatttattgagctcccatttcccaggcataatcaagccctttgcatacataatctcattcaaccccattataaaccccaaattatacagtttgtctacacttatacattaaaaatagctgaggctcagagaggttaagcaactgccccagggccatatacacagaaactggaagagccaacacttgagtgcaggttgatttgactctagaatttgtgcctgtaatcctaacattatcttgctgcttgacaaaatgtatttagacctgaatgtattccatagaggaaacaagttatttaaaaatagagataaatttaggatcagtctgtgaaggtataatttttctcaccaagatatcaaggaagagtgtttcataggtgaacttgttgagcaagtaggtgacagagccgatttgaatctaggtagtctgcctccagagttagagcacaccaacaggctacatggctaacactggacagaggcaccctcggctacaaaagccagaatctagagttagctctgaaccagtaaccccctcatttgggtcttaacccttttgtttaagaaatgcacagttcctcagagcacccaagtaaagtgctgtcaacagtggtggacaatctgtgaagcacagtctgtgaagcattactcttctcctggagaacatgggcaagttaggcacacatgacacacatatgctgtctagaggagggtcaccacaacagggtgctagaggatgaccatcaggtaaagcttggacaagcagctctatagggtaatactaggaatggctgctgaagttcatgccaaaatatctgctgatgtctagagagactcatggcagtgggttctccatcagtacttgggagcttctgttgctttaagagccaatacaggtcattcattctttactcaacaatttcttaatgaatgtctcctatatgtgagatccttgttcataatctggtatgaatactgacaagcctgttactgggatacaaagtgaaacattgtgtaaagaagctatgtagaaagattaatgagaggaagcaggaaaaagtacctaacacatcctagggatattgagggaagcttcacaggggtaacatttgggctgaactttaaaagatgagtagaaaattcatctccctgtttgtattagtattctctagagggacagaactaataggatagatgtgaatctgaaggggagtttattaaggattattgactcacacaatcacaaggtgaagtcctacaataggccatctgcaagctgaggagaaaggaagccagtccaagtcccaaaaacctcaaaagtagataagccaacagtgcaggcttcactggtgtaagcccaagagtccaaaagctgaataatttagagtctgatgttcaagagcaggaagcatacagcttcctgctagaaggaggatgaaggctggaagattcagcaaatcaagtccttccacgttcttctgcctgctttatcttagccacactggcagctgattagatggtgcccacccagattaaggatgggtctgtctctcccagtcgactgactccagtgttaatctcctttggcaccaccctcacagacacacccaggagcaatccaatcaagttgacactcagtattagccatcacattgtttatctgcttcattgcgtttatctcagtctggaatgtttatttaatgcttacttgtatattgtctgtctgccatgtctttcatactcacttttgtatccacagctccaaatgtagtgcctagaacacagcagatgctcagtatttgttgaacgaatgaatgaatgaatgtcaaacattaagttttgcatttattagttttcatggtcgtttctaaaaaatatatatgttacatttttcagtctcaaaagatttttttgttatagattactttcaggaaaccttttatttttctttttttctttttttaacttttcagttcaggggtgcaagtgcaggtttgttacataggtaagcttgtgtcctgggggtcagttacacagattattttatctcctaggtatgaagcctagtacccgttagttatttttcctgatcctctctctcctcccacctttcaccctccaacaggccccattgtgtgttgttcttctctatgtgtccatgtgttctcatcatttagctcccacttataagtgagaacatgtggtgtttggttttctgctcctgcattcgtttgctaaggctaatggcctccagctccatccatgtctctgcaaaggacatgatcaggaaaccttttaaatttgcctttctggaaatatctatcttctctatcaaacaggagatgaagtggagtgagagttgattggataattcgttcattattcattaaatattttatgggcgtctactgcatgcaaagtgctgggaggggagcagtcacacagaaggcaagacttgatctctacccatgaggaaaccaaacacagtcacaggacacaatttatgggccccctatataagaaagaacaaaacaaagaaatgtaactgccattcctcaagaaaagaatggggttaaagggctatttcatggacactccctgaggaaaaaaaacaaaaaacaaaaaccatacagtaactcaaactgattttccaggagaaaacttttgggttggataatacaggttaactctgtgcattaatttctccagactgtctcaatgcatctcacttctctttttctcttagaataaaggaaaaaatatgcagttggtaaaattgtaaatataagcatgcttacagttttaagaaaaataaggacttaagcttcgcaatattctagcatttatttaattagtaggtgattactaaatactaaattatgggaagcagtgttttcatagcaatgatttgtttacccaaagaatttctgtcacacattttttgattccaacatttcctacaattattcaatttttttcctctctgcagcgctaaaacacacattttattaagtagtctggcttatctgcaaatatgctgatcctgaatggttataaaatatttatgcaggtcatttaagttgaatcagaaatggtttccaatcagagtgaaatcatctcttagtttaagcaaatgatgcccatataaataagagttgcaattatgcccatgcctagactctctctgctataggccttctccagaaaaatttttaatgtctttttaagacatcatttgtcttcttatgtaactccttcacggatttcatcatcctttttcttaacttgaccaggtgcaaattgctgccattcatgagctcaagaaaaggaagttgtaagcatgcttcttaaaaattcaaataagccacagcatggtagcttgtgactgtggtccaaactactccagaggctaaggcaggagtatcacttgagcccaagatctctgggctgtagtgcactatgccagttggtgtctgtgctgaatccagcatcaatgtggttatctcctgctagcagggaccaccaggttgcctaaggagggatgaattgacccagatcagaaacagaacaggtcaaactcttatgctgttcataatggaactgcacctgtgaatagccactgcactccagcctgggcaatgtagtgagaccctgtctcttacgaaaaaatccaatgacataataccttcattttcctgaataaaaccttcatagctcctggttcttacaggatcaaattcaagctttttagcacatgattcaagactttccatgacctggcccatgccatcccttcctcacacttaaacatctaacatttaatcatgtagagtgtccccaccatcatgatttctgtacccctgttgatgttgttccctccacctggaatatggtcccagtcttctctactctgttacctcccattgatccttcagcaatcagctcctttttcatgtcttgcaggaggccttcccctactatccaagtctggttaggagcccttctgtggtccataataccagtagtagacagaaggttctgtggaaatcatctgtccacatgtggcttgcccaagagactcaaagttcttcaagggccagaatgtgttttattcctctttgacctccaatgtctggcactttgtgggcactcaatgaatatttattgagtgaatgaatgaatgagggcctatgaagaagaacctgaaacagaaagttggtaaagcgagatggaccttaaaaatacaagccttagtaaacaagaacggtctgaagaatccagctaatgtaaggagaagcaaatttatgtatttgttgatttaatgtttattgagtgtcacatgctaagatagaatgtgcagtgacgaacaagaaaaacaagggccctacctcatggagcttacatctagggcatatgctaacaagagtatttttttaatggtaagtactctggggaaatagaaaatgtgagggtgatgaaagggttgtagtggaagagatttagattaggaagagcaagcctcttagagatggtgatttcaaaaatgataccagaagggtgaggttttgccaagagctggtgggagagtattctagtgtgtgcaaaggccctgcagtgagacaagagatcaagattttgaggaagaggaggtctattcgtatatagagatctttaattatatggccattttccgtcaagagagatggagagtctgagttcttaggaagatgtcagtaaacatgagtggcttgtgggtagctctgagaccaaaagcactcagcagcctgcagagaaaggccccctgagaacccatagcgctctggcaaagagacagtgatctgaatgagagcccgccacaggataattactggcatccacattctccaaactgatgtgcaagacaagggagaaattagatttttaaaaattctttacctagactactgagaccagaatattcatcaggaagagctcttgcattttttttttttttttttttttaccaccttgcgtctgtcttgtaaacatgaacaacagattctctagcccacagaaacgtatccgcggggccctcccatccttagggaaaaaagatgatggaatgagggacattagcaatagtttttgttatagttttcattaccatctaccataaatacaataacaagaatagctaatatttactgattatgattatttactaaatacctgtaactatatcaaacatcttatgcagaatggtttacatgtgggctctggagtctggcctcctgagttcgaacactacctgctccacttaccagctctgttgtttttctgcaagttactaaatatatgtgtatttatatcctcatctgtatagtggagacagggagcagataactgcacatcctgtggaccactgtgaggagtaactagggaatatacaaaaagtgcttaaaggagcagttcatacatgctgatgtaaatacaagcttccatcactacttacttaattattataacaaatgtatctagttgacacagttgttatccgcattctacacacagggaaacttcagaggctttatatcatgtgccaaggtttcatggttagtagtcactggcagagctgggaactgaacccagactgattttagagcccaagctgttactcatcattccatcatattttttatttaaattagagttatcgctggattccactagtccatttattcacatgtgtatcttggcagattttgagtgtatattttatttgcttgttcatttgagagggtgagggataattgagttggaagcccaaggatctttagttttgcctggacttcttggctctaggacaccccagggagttccacagaccccaacaacaaattggatgttaattggaactctttctcttctagggattttccacagtgttatctgtaatttataacaatgattttgaggaacaaaatcatcaaacaaatatgcatgcacgcacacatgtgcacgcacgtacacacacgcacgtgcgcacacacacattcataccatatgctcaggatggtttcaatttttaaaaaaattgtatgtgaaagtccatgaatctaactattagctctcttaaaaaacagattaattaccctccaaaagtaagcccatccctaatcaatatgagataactggttttctgtagctggggtcaggatgagtcagaggaaagaacccagttacttggtacagtcattttccagcagtggtttatatcaaaaggtccacattctggtttaactgtgatgcggcaaaatgagaaatgatgcttaatggagtgatctgctgcacatattagctcaaatgctgaatgtcttcctccaaactcttctataatttttaattcaattcatggataaatttggtcaacagcaccgctgaaactgattgtgtataattcaggtctgttttggattcctttgaagaagacccagttacaaagaataccaaaaggaccatattttaaataaatagtgatgccacattctacaccatattaaattttgtttgttaatgtttcacaagcattataaatacttgttgtcacttggcattcataagttcttgcagcatttggtctgaaagctgagcaaagtaggggtagtactaatttgtgaagaaaagtacttccaaacacttcttatgctgacaacttttaggcagttttttaaacagtcattcattactgtagttttcccattttacagatgaagatattaaggtacagaaaagatttaaaatgtgctgctaggtggcagaactgggcttctgatccaagtagtctgactgcagaatccatccttaaaccttctcccaaaactaagttatcaataaatatttgttagctgtgtgcagtgacttatgcctgtaatcccagtactttgggaagttaaggtaggaggatcacctgaggccaggagtttgagaccagcctgagaaacatagtgagaccctgtccctacaaaaaataaaaaacaaattgccaagcatgatggcatgcatttgtagtgctagctacttgggaagctaatgcagggggattgtttgagcctaggagttcaaggttgtagtgagctatgattttgccactgcactccagcctaggtgacagagtgtgactttgtctctaaaaaataaaaaataagttttttaagtaaattaattataatgcgagctttcattcagaaaatataccaagatcctgtggcagaggacatgacatttaaaagttaaacaaggctgggcacaatggctcatatctgtaatcccaacactgtgggaggctgaggcgggagcattacctgagcccaggagtttgagactagcctggcaacttagtaagaccctgtctctacaaaataatttaaaaattagccaggcatgggggtgcatgcctgtagtccaagctgctcaggaggctaaggtgagaggatcacttgagcctgagaggtcaaggtcaaggttgcagtgagctgtgatcacaccattgcactccagcctgggcaacagagcaagaccctatctcaaaaaaaaaaaaaaagttaaacaccttcattagtcacatgaattgactctcttttgacattttatttaatgaacaatatgtccgtactgaagtgttttatcttcctacatgctgatattgattagagtggtgcattcttggagaatgaagccacataagattcagcatcttttcagcatgggctgtagttaatacccacatgttccacaaaggtccagctggtttaaggatgtgaatctcctgcagcttcattataagagccttgataagtaaaacaacagcaaaatgacaatttattgggtacatgctatatgccaggcatgtgctaagcacttaaagtacattatctaatttaatcttcacaaactgttcctgtttaaaggatggggaaacagagaggtaaactatcttgcttaacgtgacacatttaggaaagggcattgccagaacagtttgaaaggtaattatctgccatgctgtactgcatagtgcacattcctatatcttttccgttttcctgccgtgacttatccggtgcctggtgccatgagcagatactggtacctgctgacttattgagagatcatttggttgcttgattgactgatgcaatgaaatggaaagttgagcaattttctctagagcaatgcttctcatacatgagttttcatatgaatcaacctggagatcttgttaagatgcagattctgattcagtaggttacaatagggaatgagattctgcatttctaacaattctgcatttctagtaattcccagataatgctgatgctgctggtccatgagacatattctatatagcaaggctgtaacctgagctgcacaatatggtagtcactagccacaggtagctatttcaattaattgaaattaaattcagttcttcgttcacactagtcatattgcaagcactaactaaccacatgtagctattgtctaccatattgtacagtgcagatatagagcacttctaccattccaaaaagtcccattgcactatactgctatagaatattcagtgtgtataggaaaagaatctgctttaagattcccagttacattcatatctcatttaatggacctggaattttgtctcccctcttgttttgtcctagtcatatgtaagtcacttgaacatttgatgggaaacggaaatattgcacaaagaatactgataaatacgtatttttttttttttacttaggagccaacacatgtgcttgaggataaaaaaaaaagtcaccatttttaaaataacacagaattatcatgacggtaacaaaagcatcagaactttattgaaaatattctaattagactcagaaaatatatgagggtgtatctgcaaatagacactctctggtccctttgaatcacaatgtgacttttctccatgtgtagctttgttaagagctggacttccatgaatgcccaaaggtctagaagccatagtcgttgtcaatagagcaaggaaaataacttttgatcattgacaatatccttaaaaatcactttttccaatcctttcattttatagatgggtaaaggaaggctcaaacaggagatgtaatctgaagttcttggtagttagaactggtcctaggtgcaaaatgatatttgctgaactagtatgaatctagttctgtgactccccactgtactatttgcctctaaatgacagtaatcactgaaatatagcactgtttacttccatttcttatactctttcaaaatatatatggagacattagattcagaaacaaatatacatggagacataagattcagaacaaatggtctggaatagaaatgaatagggctacaatatttataaagtaatttctcttgtatcagtagtacttattcatcataggaatttagaaaaaacaaataaaaatgcataaaatgtaaatcacccacaacccagttattcagagatactactataaagttggtgattatgtagccttcttattttttctgtgtccataatttataaaaatatatgttgcatactctttatgaacattttcctgcatcatttcataaaattctaaatcatttctagtgtctgaagtattatttcattatatgataatatcaaaaatcacatattttaaagaattttaagccttctgatgaaaatttgcaaattttcctccaaaaagcttgtattcatgtacctaaaagacaatatataaaagtaaactccctgagagcatggactatggctatttttttcaaggctctatttcacagagtttagaataggaccaaacacatagtgggccctcaataaaagtttgttgaagggagtgagagcaggaaaaactatgttaagggcttggctgagagcctagcacataataaggcttgatacacgttaattataattattactttctttggagttattattcacattctcactgcactgcaatattttgataggtttatttgaaactgtgtctaagaataaacataaaacttctgaaagactccagctactccctttgttttctcatatggattacttctgttgttgaatatctctggaacgtgttcagtgtgaagctggcttctgcacccctcccagcttctttgccagcctattggtaaaacttcttccttgctgtcaattgatagttactgagtctcaaagaacaacatactggggcaaagtagcctgagcaaaatactgttaaatttatgaaaaacaaggaaaatgctaacaggcctgccattttcaataaaatgctttaagtgtgctgattagactcacatactcctactccccttttggggtgactatataatgggtttattaagaacattggctttaggttggaacttggagtcttactccattctggctgtgtgactttggatatgttcctcagtctccttaagtcttggtttcctcacttgtaatagcagtgcttatttctccgtattgtcaagaagaacccctaggatagtacatataaagctcttggcaccaactctagctcagatagtggccattgatactagaacttcataaacaccagtgattgagaatgaatatgtgtcagttttacgttgccacagttctgctcagtgctttgaaccaccacaatctggccaataaaatcaatcattcagaaactaatatctgctctcagcaaaagtcagggagaacatatttttgtgatcattgaatgaatgtcttcgaaatcaccagcattgaatatggagccagattaatattggagcctcaactctgtttcctatttgcagtcctacttaagacgagtcacaggtaccctaagcccttagtacttcaaatttaaagttcagtggagtttatttttaaaatcctcttggaaaaatatatgggcaaaatcctgctttccttcataaggagagatttattttgcccatatttgttagctctctggtagagtacaaaaagaggggcaagacagcagtttattcaaacagaagtcaactgattgaaaatacactaataattccattatttaagaaagaccctgtctgcaggaaatccctaccaacaaggaatatcatcacatcaaaagctaaaacaggactaaagtacacatacaatagctttgcaaattttacaaatacagctgtgtcgggtcccaagatcattctgatacgtcttcaaaacacatggattgaaggcatggatcttgtttaagatcatttaagaccttatttacgatcttgtttaagatctagacattgagaagtgtgtagctttccatgggtcaccgacttcgtggtgaagtgcgtgcttttctcaacctcttcttaactcagttggtttttatctgagaaaacctagggattcagccacacaagcagaactctagaggaaattgaagtaacaatacgtatggttataagtacttggcctatgtcctgcccgatttcttccaagaccctcttatttttcattcatgcactttgtaaataattaagggaggtatctaatgagaaaaggcattgcattcactgcctgtccttcagttatttcagatttaactgtgtggtgtgttcatatcacatcattcaagcgggccttgagggacatctgacctagttgagcagctgtacctttaataaaactgccaaaataagtatgacattttttatacaactgtgagaaacacattaaagacacattgaagattacttatattttattattatatttagaacatgaatgactgtgactagacagcttgatttcatgatgaggatgatgatgacaaggatgagggcaatgataatgattatcgtaatagtacctaacattttggcatacttaccatgtgccaaagacagagctacaacatcacatattatctcatttaatctttataatagtcatgcagttactattagtatacttgtcttacagacaaactgaggcttagacaagccaagctattgtccaaagttcacaatagattcaaaattcaaacttaagcagtctgattccaaaatgaagacccttaatcactatatccatggtttccaagctattttgaacacacatcctatcagtaaaacattttgaggataccctcttctttgtactcatttattaataattagtattatgctaatatactatggaaaatatagataaaagtgtacatttaaaagggcgagtcatagacaaaataatgttttggttgtatttatcaatggtatgataaatacattgatttatttatgttttcactcatgaaaataaagtaaaataatattttaatcaaaaatatgcttgaatatgcttcagtatttttgaaaatttttgtttcacgctttctgaattagtaacttaaaggaaaagttctggggcttttggttttttgcatgtgtgtgtgagacaggatcttgctctgtcacccaggctggagtgcagtggtgcgatcttggctcactacaacctccgcctcctggactcaagtgatcctcctgcctcagcctcccacgtaggtgggaccacaggtgcatgcaaccatgcccggctaattttttatatttttggtagagacaggttttcgccatattgctcagactagtctctaactccggagatcaagcgatcctcctgcctcagcctcccaaagtgttgagattacagacatgagccactatgcccggcttgaggttttttaaaaaaatacttgatcataactgaaaaagatgcctcagaaatatccttagattcaaatgaaagacaggcattgcttggctgcaccaagatatctgtgtttcaattctacccaccaactactccaggattttttaaaaatctgctagcaaattgctgtcttttctagtgttgatctcttgttattattcaataaatgtttcatctttacatttttttgaaaatttctttaaaacttactaaaattcttagttcaaaacctctgagagcagattaatcaagtttataagatgatttacaatactttaggaagatgtttgtgtgtgtgtgtgcacatgtgcatgtgtgtgtgtttggtagggacaggttctcactctgtcacccaggctgaagtgcagtggcatgatcatagctcactttaacctcgaactcctgagttcaagctcttatcctactttagcctcctacttcagtagctgggactacaggcatgtgacaccatacctagctaatgtatttatttttttagagatagggtcttgctatgttgccctggctgctcttgaactcctgaccttaagcaatctccctgcctcagcctcccaaaatgctggaattaccattagagatttttataagcatgtcaaatatatgggtacatcctcacatcacacactaaaagagtcatttccaaaaagagtttctactttcaaattgctttctgcataacatcctttttttcactgattaacaagaaaataactttatttttatttatttttattttattttgagcagagtcttgctctgtcccccaggctggaatgcagtggcacaatctcggctcactgcaacctctgcctcccacgttcaagcgattcttgtgcctcagcctcctgagtagctgggaatacaggcatgcaccaccatgcccagctaatttttgtatttttagtagagacggggtttcaccacgatggccagtctggttttgaactcctggcctcaaatgatccgcctgtctcagcctcccaaaatgctggaattacaggcttgagtcaccattcctggccctttttttttttttttctttttgaaaagagtttttctttgtgtcctagatgcttggttttttatgtcttactaattatgatggtttcaagctatcattagctaacatctcaagacacagtatgcacaggtcatggttcagtgttgataaagatccgtatatcaaatatttttcctatttgcactgggaaaggctgatcttgagagatttgaagaactcatctgttgtaacctcctaatatggccagtgagaaataagcagtgttgattctgccattttgctactcactgtgcttactttcttatcatcagcttactcaccttgagcaggtatgggagcagggaagctgatgggtctttaacagtatcacattacattctttcagtcttgggaatgaccagagatctcaccattatgtactgggtgagtaatgcagttctataagaaggttactttggtatcaacaacaacaacaaaaacgatggatggcaaagcaaggctcaaggtgtatgacattcaaaaagcagcttttcaaaatgtttgcagtgtggcacaaacaaatgaaactctcacagtggtaggaggttgagatgaaacatgatcatggtgggaaagttacattgctataaatagacctggtcactggcattccctgcctttgaccccgccaccactcccaccagagttatatcactcactaacttttaaaaacactctaaattatgaaaatatcaaacatatatacatataaacaggtagagaggttagtttaactaaccctcttgtacccatcatccaacttgttaatgatcacttcatggttaatctctttcatgtgtgctccctatgctcctgaaatgaattattttaaagcatgttccaggcataacattatatttatagatattataatatgaatctccaaaatataaagatctgtttttcaaacataacccaccgtaccattattacacctgaaaccctaacagtaactctttaatatcctcaaatattcagtcagtttacaacttccttaaagatctcacaaatattttctagttcactcattcaaatcaggttccaaatgagctgcatacattgcaatggattgatatggcccttgtgtatcttttaatctatagaatttctctctccctatttttttttttttttgcttgcattctttacttgaagatactagatcatttttcttggagagtttcccacaatgtggattttgctggttacacccgttggtattatttaacatagttctctccattccccataaattggtaataggatccagtgattatcacattaatatttgattcttctacaagaatacttcagaggcagtatttgtacttccatcagtagacacataataaatagttctctctctttggggactgttaatatccatcagtgacaattgcctacatctgttattttattgggagttgcaacagggtgaagagtatcattctatttttcatgtattagctggaaaaagcctataaagagaaaatttttctcatgaattatttatttagtctgagatgcaattcatatggtatgcacaaacacacacaaaaagcttgatacttatgttatcaaaataatgtattggtaccttaacatccttggaaggtgatcatttatatatttggttttatgagtaatgttacgatttaaataatttgacatcacatactgtgtagccattatttttatacattcttaaaccatctatggccagtgagagcctcctttaattggtttctgtgtcctttttaaatagaatccccgcagtctttgatagcttccttaatttccggtaagataagcgtcatcatgtacatttcatgcttaagacaggaaatcagccattgctccaaggaaccctggttaagtttcataggaaatggtattcagaggtcacactctagacatcatttcattttaagctttgctttgttttccatttttgtaatgtaagtgtgcatgtgtgcattcacacgtgtatgcatttgtgtgtatttctctccttctctcttagataaataataccatgctatacatgtgtttctccacctcatatttttaaattaacaatatccaatggagttcattctataacagtatctaaagctattctcaactccttttatacttgtacagtacttgagcgtgtggagacaaaattgttatttaaccagtccccagtaacagacatttgctattataagtaatactttaacaaacagtcttacatatatatcttttttaacttgcctcccctaactttataattgtgtctaacaggttaagaaaattgcttaaggtctcacaactaataaatgctgagccggaattcaagtcccacatagttgtctagctccagaccccaggaaccccaatatatatttgctgtctttcaattttcccaggaccgctaacacatcagacctggaattagttcagtgtagaggtactgctaacctgaggctcagattaataaaaataagaaatagtcttggtttaccattacttgataaatacagagttttaggaagttgtctttcagaacttgggtctgtagaaggaaacaatagcagttcttagtggttcaaaaaaaaaaaaaagttgaggtgcaccattcccacctgtgcttgaaactagagtttgccgtttactaggaaacagagagaacacacatcactgacattgcttgcccaggtctcagactgatgacttaggtcacctttgtgcgagtaaagccacacatttttagcgtttgttttctttttggaaccataacaattttctggaggaatgtaagatgctatattaaaaaatgctagactaggccaggtgcaatggctcacgcctgtaatcccagcactttcggaagctgaggcaggtggataacctgaggtcaggagtttgagaccagcctggccaacatggcaaaaccccatctctactaaaaatacaaaaattagccaggcatggtggcgggcacctgtaatcccagctacttgagaggctaaggtaggagactcgtttgaacccaggaggcagaggttgcagtgagatgagatcgggtcactgcactccagcctgggcaacagagcaagactccgtctcaaaaaaaaaaaaaaaagaaagaaatgctacactatatgcaaaactcctaaaatcccatgcttatgcaccaaagataattttcgaggccacttttctctgatccagggtttagcccccatgtaatctaatatttctgctctttcaatgctgtacatctttttagagaaagaaatgtgaccatcattcatggccaaatctgactcatgaagccattttgccctttggtgtcttcatgaaaaaatgtgagtccaaatttacctcttttaatgacacattaagtaaagtgttgggcgtgaactcatgtcatccattgggcctcatgatcgtcaactagaatggtagctccaaaagggcaagatcgtttgctttttaaattattactgacttttcaatgcctagaacagtgcttggcacatagtgatgcttaataaatagttgaacaggtgggtggatgtgtgcatgagtggctcgctggctggctggctggatggatgaattaggccttctgaaatttgaacagtaagtcctgatgttaaactttagagaggcttcattaatgcccaccttgtacaaaaattaccagaagggggaaatgtcttttttcccccctggtatttcttttctgtctcccacctttgaatatcttctcctttccacatatgtttttaaccaacattccagaatgatgcgtctgtccttccaaaccttcaccaaaaatccagatctctcaggagagcagatgtcaactgagtgtggtaaagggagacattaggaaatgagtgactagaaattgatatttagcttttcatagaagcttcttagaactcaaaagtctcagtcaaattgtgagggctctggggaccaaatacaaatgaagaatttcagtgaagcgaaggctgtaaggcctgctgtggtcctttatttttatttttattttttcataatcaaagagacaagcttccaaaggtggtctttgaggtgcaaagacttggaatgtgcagcttttgtatctcccctaccatcttgccgtctgcttggctttgagtactggcttccatggggcgtctcagatcacctcagctgccatgtgcccccacacacaatcgtgggtgtgttctcgctcccaggattagttttctctctagccctttggcccctcccaacagaacgtaacttgctcttttcagaatacttgtcccacattgctcccctgtccatttctgcttctggagtcttggctgcccatgctgggagtcacgtgtgtcattgtcccttctctgctgatgtgtcagaggcccaggaggctgattcagcgtatctactcttctctgggcttcacacccaacttcaaatccacttactctttgaaaggagaggtttgaaaggaggagtgacttttgtatttctaaatgggagtgtatccatggagtatgcattctgacatggcctcaagttcttcctgctagtagattcactgctcttatatttggcagcagccaactcagctgctaaagggctggtggctttgtctgctgtatgccttcagggtagcaaacattcctgagagagattgtggagtctgccctaggacaagtctcctggttatgttttatgtgaatatagcagtacgtgtcctcttaccccagaaaaacacacctcctgcaacacaagtttggttgcttatctgagtatatctcattcatattagcagacagaatcacagataatgaagcaaattgtaccctaatagtatcagccctaatagtatctttttaaaaaataaatgtacgagtcctaagatatagataacgactaacatttattggatagcactttactgccaagccctatgataagtcccttatatattgtcaaagtatatttttcacaaagttaaaaacatgactcatataaatatctaatgagctgttatcaaagatttatttaactgattaatgaaggaactagcaagatggaaaagctggttcaaagagcaataaatgatgagagatttttataggcagccagcaaaggaatggaaaaataagtttgctgagttatattcaaaattggttaatgttcattagatcaataatgctataatttgggggatcatcttttttccactagacagaaatcatttgcaacttatcagtattctacaagttaatgaatgtctagcttcatagagtctggacctaatcagtagaaaaaagtaattcaaacaaacttaagagtttttctggagaatgagaggacctcattctccaagcttgttacacaatgctcttcatcacaaactaggtgacacatttatcttttatttttattttcaagtttaatttataattttatttatttttttgaaatgtgtctctgtcacccaggctggagttcagtggtgctgtcataggtcactgcagcctcaagcttccaggctcaaacaattctcccatctcagcctccgaagtagctgggaccacagtcatgcaccactatgcctggctaattttttgaaaaagttttgaggtatgggatcttgctatgttgcccaggctgtattttcaagttttagatcatttttctatttggaaaatacccctgaggccaggcacagtggctcacgcctgtaatcccagcattttgggaggccaaggtggaaacattgcctgagcccaggagtttgagaccagcctggaagaaaaaaaaaccctatgaaataaagtaccataaactctatgtacaaggggctgtggtagccactagccctcagttcaatgatgaatcccttctaaacaagcaaatactctcaatgatgagaaactgcatcaaatgacaacctaattcatttttaaagagttccaaataacagaactttatccttatgttatccctaaatctgcttcactgtaccatctactgtctcccagtttagtcttctaaaactgcattgaaaaatctagtttccttctcactgaatgccactgacattgtgttgaggagcttcgtggaggttggccaggtaacctacatcttccttggaccttaggctggaaaactggtcacaactgtagatgttattgatcagaatggggctttggtcggtggaccttgcactcaggtaaggagacagcctatgcctttaaaatgcatgcagctcactgatttcatcctcaagtttccacacagtgcccagcagaattatgtcccataagcctggcagagggcagacaatacaaaatgggcagccacatgatgggccaagaagattgaagccagagaagggaaagccaagatggcagattttgatcattttaaagtcatgaaggcaaaatgaggaacagaataatcaagaatgaaattaagaagcttcaaaaggcagctctcctgaaagtgtctcccaaaaaagcacctgctattaagagtgctgctgctaaagttccagaaaaaaagatgaccactgcgggaaagaaggctgcaacccagaagtttcctgcccagaaagcaaaaggccagaaggcagtacctcctttggaagctcagaagggtcaaaacactccagcccaaaaagcaccagctccaaaggcatctagcaagaaagcataagaggttattataatcccagcactttgggggccgaggtaggcggatcacctgaggtcagaagtttgagacgaggctggccaacatggcgaaaccccatctctactaaaaatataaacattagccaggcatggtggcatgtgcttgtaatcccagctactcaagaggctgagacagaattgcttgaacccggcaggtggaggttgcagtgagctgagatcgtgccactgggtgacagagcaagactccatcttaaaaaaaaaaaagtaaatgttctttctggaaaagaaaaatctagtttccatttcacatgcagttacagaatatttaactcatactaaagagaataggaaatacctttcatcctttataaaaatataccatagttgagttcgttcagcaagtgtttcttgcaatggctcttaactttggcttatgtcagaaatgctcgtgaagtttctaaacttgtacatacctgggtttctattcccagccattctgagtgagtgggtctgtggtgggtgtataggcatcaatattttctgtaagcttcatgggtaatgctgatgcaagacagacattaaagttcatgctgtatatcaatcatataataaataccaagagtcagggatgagggagttcagactaaagaggtatcattcagaggctggaaggagccatcagagagaagtgatctgaagtagcattttaatagacaaataagattttgccaagtgaagaaagtgaagggaaaatgcagaaaggcttttaaatagcattaatagcttaaaaatgcatcagcggagttactaaaaaatagacttactaaaaaatgaaatttgaacaattgttaactaaccacagggacaatgatctcgacatttcttgcaacaaaatattataaggggaaaaaggagctatctccaaagtgattgcagtagtattccatggagtatccccatgtgtttaccaatacgtgaaatatatagtttgtccattgataagacaagtggcgtcactcaacctgaggaaagttcaacctctccactgcttccaaaaggaaccaaagctatttctctgtcagatggagcaagagtcattaaatcactgatgcctttaaattatcaataatataaagtcacagagggagaatcgagccaatgataaatagcattgtaataagccagaactcatttgtgagtggagaaaagtctctgaaacctcagtacaattcagccggctcatattgccgtaagacatgagatgatgaaactcagaaatactgatggctttttactctttcctgcttctgaatatcaggacaggcttgagtgatagaattttctgttcttccctgggcatgcttaggcctgcatcatgtgtgctgctgtattcggatccctttgtagaaggtctccatgtgcacatgtgtgtgtctctttaactaatacactttattttttagaggagttttaggtttataaaaaaattgagcagaaaatacagaagagttcccgtatactccgtatccccctacctccaacagtttcccccatcattcacatcttgcattagcatgctctatttgttacagttgatgagccaatacagatacattattattaactaaagttcctagtttgcattagggtgtgcacttgtgtttttcatatttcctaatttcagatcaccttcactctttgtcctgttttttctctctgctattctggatcctgaatggcgattgttagaacaaccagccaaggtctccacattcctccacatcccccagcagcctgaaaagcgactgccaatcacttgtaccttctctctctattcatgctgacaggataatgttcttatctaaatcaatttcagtgaagctcatggtcacagtttgtgaatgttacattagcgtcacatataacctgtacatagactgcattcagatattttcagctttttctctggaaataattgctactgatgagttcactattaaaccttataagacccaagatggtgtgtggtgatttagtgatttcatatgttgctgtgctagtattttaatctgagctccagccaaatggaacaatctgtcgtttcatttttaatagttgtgactttgtttttggactcctctgttgtgcatactcacacagccgcccctaatccttgttttttgagtcggcagggtctagattgtaactgacaaaagagattcttgctgtgtcctccaagaaggtcccacagtttctcatcttgtctttcctcacccattttgtaccctcaacctggaatgccctcctcatctctctctcgccttttctccctacggccttcctcttttcccagctatccctgcctctgcaaactgagattctagatactattcagggccctcctctcttcaaatatcacagcaagcctgaaacattctcctgattctatgctaacccccagaactcattcctattccctgattctgcatgcttttgttgttgttgttgttgttgttttgagatggagtctctctctgttgtccatgctggagtgcagtggcgcaatctccactcactgcaagctccgcctcccgggttcacgccattctcctgcctcagcctcccaagtagctgagactacaggcgcccgccaccatgcccggctaattttttgtatttttagtagagacggggtttcaccgtgttagccaggatggtcttgatctcctgacctcgtgatccgcctgcttcggcccgccgaagtgctgggattacaggcatgagccaccgtgcccggccaattctgcatgttcttaaaccatgtcactctcctatgcaaaacatttcaatgctttcccaccattctttgaattaaagcccaactcttcagtttggcatgcaagcccctgtactgtgttctgttctctgcctattatattctcatgctatattctccaagactataccctagcactctcctcctgactactaccttgctggtagtagattcactactagcagattcattgattcactacagcagtggttctggaagcatagtccacatgaccctggaagtctgcaaggtgattttcctagtaatgccaagacattatatgcttttttctcactatgttaacattatcaataatgatgcaaaagcaatgatgaggaagactgctggtactttcgcacaaaccaaggcagtggtgccaaactgtactagtaatcattatatctgtcatggccatgtacttcctgcttaaaaacggccaacttcacggaatactttccttgatgaaaccatagaaagtgttaattttattaaatgttgatccttgggcacacacctttttaatattctatacagtgaaatggtaactatgcataaagcactcaggcagcacgaggaaggacaacagttgtctcatgggaagggacttgtctgattgagttgccaacttaacaaggctttttaaaaaatggaatatcatttttacttggaaaaacaatcaacagacaaatgtaggtatttcatagatgttttctagaaagtaaatggagggagcctgttacttcaagaaaaacaactgacaatattttttgctaataataaaatttgagatttcaatcaccaccataatctggacagtttcttaatacctaaagatttttttgatatcagtggcaatattaagtcatatgattttttatgtattgtgtgatgaaatgtgtgaacatttggaaaattaacataactcactgaattcatttttgatatgaccaatgtatgatttttaaaaaataaaaccacttatgggccaggcgcagtggctaatgcctgtaatcccagcactctcagaggccgaggcaggcagattgtttgaggccaggagtttgaaaccagcctggccaacatggtgaaaacccatctctactaaaaaaaaaaatacaaaaatacaaaaattggctgggcttggtggtgcatgcctgtaatcccagctacttgggaggctaaagtatgagaatcgcttgaacctgggaggcagaggttgcagtgagccaagatcacacctatgcactccagcctgagtgacagagtgagagactctgtctcaaaaacaaaacaaaacaaaaattaaaaaaaaaacacttatgggtaaaagattcattcaaatagcaagacagatcaatgggttttaatgtaattgagtataaaaagctcactgacatggtgtctgattttacagtgcatctaactttcaagaaaataccaccacttgggctttggtatagtatcaggaagactatcccatttgtctgaaaaggctattacaatatctctcagttttccaacaacctatctgtaggaggccagattctcttcatatacttcaaccaaaacggcatttcacaacagattgaatgcagaaaaagaaatgaggatctaactgtcctctactcatctctaaaagatatttcttcactattattttgttttggaaaatattattttcataaaagggtattatttcagtttaacatatgatgggtttgttatttttaatgagttaatattttaaactcctcagttttagtatcactatagtatttgttaatagctgtaaaacaacttacataaacaaaacctccttgcagtcctcagtgatttttaagaggggaaagagacttgacattaaaaagtatgagaatgatggcaactagccaactaactcttaatgagatctttggctctagaagtccttatttgaccacatgccagaagaatccatgtgagtactgcctgagtacctccaagttggaaaagtacgtttttttttttaactgagtgcctccaagttggaaaaatgttctttttttttaatgttatcgggttcaagggtggaacatttgtcctactaaagaacaccttttaagagctttgtggccggaagggtgaaaagtagacctccttctccttctcttcttttcgtcccctttgatccttttcctcttctcttttgatcttcaatccaatctttagccccaactcaccttctagatgcatttttcctatttttttcctcttctgctagataattgttggttgggacaatcccatcttaatcaatgttcaaattatgtctccatgttcatttccctgtaggtcatagaactctttgttagagtatcatgtggccaatttataggtctttattctttctcttctgcccaaaaatagatctttaggaatagcatgctgattggtctattattaaataattttaaaattgacctcattttttaaaagtagtaattaacttatattcagctgctaccctaaattttttaaaaatgagcaagaattgttatatatagaagaattttacattttttctaaagaaacactttgtaaaatgtggtagaggtatgcaagaggatagaacatatctaatttaacaatagctactacataaaactacataaagcttatggttttggatattattgcttagaagaaagtgatttgatgtaagtttaatgcaaaaacaaaaagtaaatagtacagttagtacatggggaggacatactcatgggagtattacttaaataattgaattattatttgagtagttgaattttgggaaaccatgttccaaagggaagtctaggataacagcctcatcgtaattctccccaccttcaatatgtttttcccccttcaacttgcatttcagaattactcatttatattttgccgtgataaagtctgtcagattttttcttcaagctaaataaaagtcacttaaaatgcctttttcagagtatgttacataaatatacatatataatataaaaggtgagaagaactttatgtaaataagtaaatatttggttaagatgatgtgatttctaaattttctaaaagcaggacttcctttagagtagaaaatatttagtctggttgtagaaagggcatattttatttattaataaaattcatggcccaatataaatttttgaagtcttcaaaaaaaagaaattaaataaacattgccctaatctctctagattagctgatgatttttaaacacttgttgagttgactttttttccagttatctataataaagaaaagctttaaaaacctgtcccttttttcccagataatgatttcttttttaaaaagaaaaagcatggcttatattaaaaattgcaatatacaatgctgacattatactttaagtagaaaaggacctaatttatgtgtataactggaacatctctatacacccaaagatatttttctactcactgctgcctatgcttagaatgctgctatttgaggttccttcttttacaataagcattgcttctcccttctttctgatacagttgctgttgcaataggacacatattaaccaataagcatcttagtaagtatgccttcttccatgactattgtaaaccaagtgtatccattaggaatgcatctggctgccagtaagagaaaacatacagtgacttgaacaagtagaaatatatttattttttctcacataatgaaaaaaccagagatgggtgtttacaaacatttgttcagccacccaaaaaatgtaaggaccacatttctgcgatgctcttagcctttcctggatggtcatgagatagataccatggctatagacaatagatttgtattctcagcagaagaaggggcagcaggaaagaaaaggattataccaccaagtatgttcattttcatgaggatttcgaatatttctccagaagatgcccccagtagttttctgcatctgttacatggccacccataatagcaagcgaaactgggaggggagtaattggctttccagcctctaaactagaagggccaagaaagaatgaggtaaggaataccacatcagtgataccttcaaaaggctgagtaaataaaaaaagcattgaaagaagataaaagataaatgatagggaaaaaaataatacttcctgtattgtttttattattgagtccttactctatgccagatactatgctatatattattacatgtattataaatatatatattatacgtatattatcccacctagttttcacaaagactctgtaaagtagatattgctttcccctatttacagaggaaaaacccaaaaccagttacttgaccaaggtctcatagcaaagctagcatgtgacttgagcttgctctgacttcagcattgcctctcctgagaccgacacttagaacatgccgttttctcctcactgcagatcacatttcacacttctccagaatgcttcagtaaattacaaactgcctgaaatgcagtgggaattttcaggccttggttaatgaggtagacggaaccaagaatgcttgaatagttctagcaaacgctgctgcagcactttcttctacaataatcaccttccatcttttcaggttttctgcttggaattcattactgcaattctgaattctgaccttgatgtacaagtggtttctatgcatattaaatgcttttagatggacttctattttaggaggattctctctctaagcggctcatcaaagcccatttgtttgtttagagttgtactgtcagctactctgggccaattatttcagtttattcgtgcaaggtcaccttttgggttcaatcctatataagtcagttaacttttaaccagatacaaactctgtcccacagttgattcttagactggcttttgcaagcttctaagtaagattttcattcactcatgcagttggcaaagggtgttaagaagtcaaagatgagtatgcgatttctgactcaattgtgagaaattcgagagctaagattgtgccttgatactgttatatcgccagagcctaacactgtgcctggtatacattaagcccttaataggctcatgtattcactcagcaaacattcgttgagagctcactgtgtgcacagcagcaaatgagacatatgtgtatagctataaacaagaagtacaacagtaaacaagacagatatggtccttgtacttgtgaaacatatattcttgtagagagatagataatgaaaagtaggtataattttaaaataaagaaggccctaatatgcatcataggaaaatggataaattgtggtatacctgtaaaatgggatactacccagcagtgagaagggaccagctattgctactcctaaccacagggatgaatctcatcatgtatgatcgtattgacaccaagttcaaaaacaggcaacactcatctgtgataatagaagtcaggctggtggtcacttttggagggagcaatgactttgggaatatccaggagcttctggggtctgggtaatgttgtttatcttgatacgaaagtttgttatctggaaaagtttactttgtgagaatctcttataccgattgggcatgacggctcacgcttataatcccagcactttgggaggccaaggcaggtggatcacttgaggccaggagttcaagaccagcctgatcaacatggcaaaaccccatctttactaaaaatacaaaaattagctgggcgtgctggtgcttgcctgtaatcccagctactcaggaggctgagacaggagaatcacttgaacctaggaggcggagtttgcagtgggctgacatggcaccactgcactccagcctgggcaacagagcaagactctgtctcaaaaaacaaacaaacaaacaaaaaaggaattcctcatattctgtgctgataaagtatatttttctgggtacatgttataattaaataattttaccttagagaagataagggctaactgtgataatgactgtgcaggaaatgctcaggttgcagggcactgtgacagagattatctgggagaactttactgtagatggaatggtcagggaagagcttcccaggagatgctggcttggctgaatcctaaggggccaaccatggggaaaaccagaagagcatccctggtaaagggaacagcaagagcaaaggctctcaggcaagaaaagtcggggcacagctgagaagtaaaaaagacaccagtgtgctggagaccagagtaagtaaagagcaaagtggagcaagtcaaagtcagggtacatcatgcagagccttggagcccattgagtttatcatttggctcttttatgccaggccatgtgctaagatcttgaggtatgttaccccatttccttttcatctttttagcaactttgggaagtcagttttatcatccaaattttttaatgaggaaccaaggcttagggaaagtaggttgcctaaggtcatgcagcctggaagtgagtggtatcaccaggacttgaacctgtgtctcttggaccccaagcctgtgcgctcaactcctgactcatgattctgcccctgagcacttgagtttaaataaataactacttcgccacataaaacatgcacccataggactgtgaacaaaatgctgagaaaacagcgacctccacctggggagtctggaagggagcacatgcactaaatttaaagatgtgtacatgtgaaatgtccccagaggcaggcattctcaagggaatagtatgtgcaaacactcaaagatgagaattagggtggccacagtggttcacgcctgtaattccagcactttgggaggccgaggcaggtggatcacctgaagtcaggagttcgagaccagcctggccaacatggtgaaacctcatctctactaaaaatacaaaaattagccagctgtagaggcacacacccatagtcccagctacttgggaagctgaggcacgagaatcacttgaacccaggaggtggaggttgcagtgagccgagatcacaccactgcactccagcctgggcaacagtgagactctgtttttttgtttgttttaaaaaaaaaaaaagatgagaattaatcatcacagtagctaagatgtattgagcattcatcctgtgctaagttctgcagtgagtattttgcttatcttaatcctcacaacaaccctatgaggtcagtattggccccattttacaaatgagaaaactgagctttagagaggttagtcatttgcccagggagacatggctagtgagttgagtaaataaacactaggcttgttgaattagcggtgagaaaagtagtgaattgtaaaccagtaggtggcaaaacccagacataagcaaagttctgccgctgaagtccatgcccccaactctccttctgagagcttaatgtgactaggaaagcaagggatgctttgtgtggctttgcggtgtgtgttctctgaacttgattaaaattaatgttcctgaagttccttagctcctttctcctttgagagttttatattctgtaatttctcttctctgaaatcctgaatcataatttaatgtgcttttttgtttgccttttcctctccacctagactataagatccctgaagaaaagcccttatttcttttgattccttagtgcccagccctaagaagtaacaggtgagatcaggggttgagtgtgttgaccactgaacccgtagtgtctggtgcagggctgggcagagtgtgggtgatctataaatatttcttaactaaatgagcaccatgcttatttaaggaaaggttagacagataatagatttggcctgggtcaacaatcaatcttgatcattcatatggtatgtgcataattttatttcaattaatcatttaagacaaaagcgaggtctataggcctccattcctctcctgccccatcatcccaccccactcccaaaatcacgcaaagctggtattcacactgttttagaaggaattctgagcaagaaatcctgtgagatgccttggttggtcctatactgttaggatttgtgaactagattaaagctggcctgcttaaaataaatgtatgttacgggtatcatttttatgagcaaatcaactgctacctaatatttcagttcaaatggtttcaagcacataaaaaataactgtgattttctcttcaatttcacatatcaatatgtgctctgctccatgggtcagagcaggaaagcttaagcaacttagaagtgagtttattccatgctttaggtctgaactggtccagtgcaatagccactagccacatgtggctgttgaactcctgcagtttggttactctgaattgagatatgttgtacgggtaaactacaccagattccaaaggcatagcattttttaaacgtaaactgtctcattaataatttaaatactgattacatgttgaaacgttattttggctatattgggttaagtaaagtatatcaaaattcatttcacttgtttctatttttttaatgtggctactataaaacttaaaattatacatgtggctaacattgaatagtggtgccctagaatgtaacaaatatgagtctgataaatttctaaccccttttaatctacccttgacttcactattccccaacttcttccaaagatacaaaaattaatgaaagcacccagcttccatctgtgtcacaaacaaaattctgttttgtttttgtttcttgactgagtcaaaactcatgctggctttgtgtctcctaaagctttaaactttattttctaattatattgactctaacagtaaaatcacttggatttatataaaaacttttaattttttaaaagaactcgttatgttattgaatagctataactatcccaggacaatgggtaattagaattaccaccattttccaagtgagaaaactaaggacgagataaaatttatttaaacccagccctgatccagaaaggctggctcttcactctcaggtcaatgcagaatataagtcgctttttccagatgacacagtggccaacagaactgctactggactggtcttactttttccactagaacagtggttcacagaggtagtttctcatgatctattataaagcataactttttacaaaaagtttaacttttcacaaaaatttaacttttttaagttaaaagtttttaacttttaaaacagcaaagttttggctgacttgttaatatacatattttatataaattagaaccaatgaaaagatacctgaaaataacatgtcttgcatacactccattcattcattcatgtaatcagccctgagtgtctggcacatataaggcagttagctatgccctgggaaaacttcgatgaataagatagcaagaaaagacaccgcatgtaacaaatttaatcatcatcaagcagttaaacaaacactgtgctgtggaatcacatagcaggaagacctgcccctaacctaggggctgggaaggacttcataaattagtgctgcctgcattgatacctgatggatggcatgatagagccagataaggggtgaggaggaagaatgagtaggaatcttttaggaatgttttcctaagaaagaaaggtgggattgataggcaaggaattgtacataacctagtacccaaattctctatgccacatcccagaagtatatcctgtacccaaacatcatctgtcatgtgatcatggatgtaccaacaacaataaagtttgaaaacccctgcatatggtcatactgcattcatcaaggtatttcagaccaccagaggggcatgtgcagtgctgtgtttgctgttacatgtttaacaaccatttctcaggaggggaaaaaaaaactgttttgtagcatttgccaatttccatggtctaaatattcccaccttggctgacatgaagctgccactgagacaacactgaatgtggagctgggaagagatgggtggtagcactcccttatatagaatttccctcatgcaaataccataggtgtaagtaacctcaaaagcactgatgaaagtgaaatgtggtaaaataactaggaggcaatgaattttaagtattaaaagtgtattaactttgtttttaatataatttatttatatattattttaaaataatggctgtgtttaacactggctcacagaagtttccacagattcactaatcagctgtcacacacctatacaagccagctccaatacaccaatgggtctggcatcttcagcataaagtatccatgatccttgtctaggacaagttctcacatttccctctttttctgtttcttacagatcagcaaacagcagctgcagacagtcaaggaccggtttcaggctttcctcaatggggaaacccagatcatggctgacgaagccttcatgaacgctgtgcagagttactatgaggtgagaatcactgttcagaagaatgccaagaccactcaagccctatgcctggggagtctgagctgcagggcaatggggacagtcgttttggtttactacagtatcatccttcctaaggcaaatgggttggtgattcgttacaatgttaagaaataacagtattttgttttagggaaaactaaatgtaagctactatttaacaacggaattttataccaggcaatatactgagtgtttttcatacaacatataacagtcttatgaattaggtctgattgtatttccattttactgatgaagaggctgaggctcagataggttaaattaattactcaaggtcacacagctatgaaaaatcacaacctgtgactttgagtcaggagcatttttctcaccacttacaccattttaaaaggatgttagcacctcccaaggatggtggcttcatgaacttccttattctttttttaaaaatgctgctttcttttctggagctggaaccactgtccaaaatgcagtgctgttctctagagaaaatctacaaaagagagaatatgttctgagtatgtattacaggtaaattttcaccaccagacctcagaagcttatcagtaaagtggatttgtatttctgcaaatatttttaaattttgttaagtgttctatctcagtgtgcatattggctattatttctacatgattatgaagtggacatgccataccttcctattggcaatgctttcctcatatgcacattttcaaatatgattatttggtcactgagtgacattttactttatattaatctattttaatgtgaaccaggtaaatactctctgtgtttggaatcctatgccccaaatgtcttatgcattgtcaaggttagatgacaaccattagagaccagctcctaggcactgaaagcttatgatatgctgctatatacaattcacagtaataatggtaaacttgaagataggtataagaaaaatgtaacaaaatctgattttcccctgggattgtttcattgatttccttccttccttgtttcctttatttattagatagaaaattatttcaaaacaaaaatgttggtgtgcctgctttgctggtgctctaagcacgtacttagtctgcccatctgattcagcccacaacagatgctttcaatatgttaattgattgaagcctcggtagaggcaaaatcctgatatggcaaaactcttcttcccacttgctaaagcacttgactccttccttcatggagagagtaagactgcaattagatcttgtgaaaatattattgattggtttgctaattagcatttaatagtaaacaatctttgtgatgttcgctgggaccaaccacagactccttttacaccattttcttcaagaaatttttatttggatctattttagaagtcaaatttgtttttatagttgtccaaatttaaatcttttaaaattttacaagtatcattcattatcgccaatgagtgtcaaacttgctgctttatcttatgtggtacagttttttggctgaatttcatggggagtagaaatgagatttggaatcacagtgatatatgatagtgaataacttgaatatatttaactaaggttttgtttagaaactgcctgggaatgaaattaattttccctctttgttcaagttctggaagccaatgggagagtaatggcagaacccttgtcaggccaagcagacccctatccatagttctccatatttagagtcattcaccagagtttataaatttataggttgcaaatcttaattagaaagctcatttgactaatggcataaattaaaagaaagtgtcatttctatctattaattaaatgtgaaaattaatagtcatcaaggtgctaatgagtctctggaaattaccattacatctacagtgatcccaatgttttcctctgtagtggctagtttattggaaacagtttcattttttgtctggtaagaatacaggcattgagaaattactgaatatttaatgttagcatttgagtaacataagaaaggatgtggggtattaatgatctaactgctgtcttcattagtaaatactttggagagtcttagattcacttttccagggaagtctaatcctctaaagtgaagtttctgtatcaggagatcagggttaacactttacttgggagctctccaagttgattacaccttcctttctcctttccccttcatccttgggctatggagaagctgatgtctcttcctgtacccaactctgggttccaattgcttctctgttggcccctgtcttagtcaggactctatggattataagtgaccgatacctaggtcatactggataaccctaaaaaagagatttatttcctcaattaacttaaaagtccaggagtaggcctggcttcagccatggctggatccagaggctccaaagttaccagcgggatgggtatcttccccccacctctcgactgtactcatccctgtgttgacttccttcttggtcagcttctctccatgtggaagaccttgacagccccagggcacatcctaccagtttagcacctccaggagcaaagagaacacccctgctgagctccctagcaaagacatggggtgactttgttggactgacatggatcatatgtcccttcttgagtcagtcacagtggatgggggtgaaatagactggggggttaaggcttaggacagccaccatctctggcacctgagtacaggctcagctgcactggaaccattttcaggaagaatgtaatggtttcttaataaaccgttaggctgctttttaccaaaacggggaatatatgctcagcagacaaaaccaacagatatcctccttccaaattccctctctttcacattcacacacactccaccctaccatgccacaacttcacactccagtttaccaacagcaataacgttaaaaaatagtgtaacagcaataatctcaaaatgttctgggatttctgtactttaaaaagtcagttttagatatcggtcttgttttgctaatgcatatattcattactcagtatccgcagagcattagttccagggcttcctcaaatacaaaatcctcagacgctcaagtccctgatataaaatagcatagtgtttgcatataacctatgcacatcctcccatataccttttttttttttttttttttgagtccgggtttcctttctgttacccaggctggagtgcagtcatataatcacagctcactgcagcctcaacctccctggctaaagtgatcctccctcctcagcctcccatatagttggactgcaggtgcatgccaccatgccagactaatttttgtattttttgtagagagagggttttgctatgttgcccaggctgctcttgaactcctgggctcaagtgatccacccgcattggccccccaaaatgctgggattaccagcatgagccaccacacctggccttctcccatatacattaaatcatctctagattactcataaaaactaatacaatgtaaatgttatgttaattgttgtcatactatattggttttatttatattactttttattgttatttcttattttttatattttgtatctgtagttggctgaatgcatgaatgtggaacctgtggatacagagggccaactgctgaattgatctctcagcatgctagagtagtaaagatcatcttttaataaatgaaaggagagaggaggtgctattccttttccatctgtgcccatccagcccagtctgaaccaagctagtcaccattaacaacaagttggtgaggcctgggccatgagtggggatgggagaaaggagaccaaggtccccatggttctcaagagcacacaggtttatttttgtcctttcctgatggccctgattgtcagagcggatcaagcagggcaacagattaatccattaatctcttcaattctggctttcagggccaagggctgggggctgggatgggtgctctgagatctggcccagcaattctgtctggttctcacacccctggtcctgagatatggcatcagagagccatttctctgtgttcctcacaccttttctaactatttttaagaaaaatgtccaaaatataagccctcccttgctctctccctccctcctcacactcacctcctcatgctcacctcctcacctccctgcttgattttagtttcttcacatgctggtcctggcatcagagaaaataggtggataaaaaagttttacaaaactcaaattcttcctggaagtgaacatgggggtatttgcaagaaaatgggagtgtcatatgtggcagaagacataaaaattcatttcagaacactgcatctgatgtctgaacttcagccagtgaagctcctataattgagctttgtttggggtgtgtgagtgttgtttttttgttgttgttgttatttttttgtttgtttgtattgttttggttttgttttttaataaatgcctagttcatttttgtcacactagctttgaatgttgcaacagacagacttctttagttgctagcaacagaaaccgactgtgattaaattaagccctaatcatcatcatcatcataacaacagcagaagcaacaacaacaacaatagtttgctgttgttgccagtattgttgttgttatcagaagaaacagctaagcttcagaaaagaaggaaaccagaccagtttaacttcaggaagccagatagtaagatataacagacacttaataattgggataaacctactctagcccagtccattctcatgccaacccactcggaatgtgaactcaagaagtggcagtcttactgaccaagctcagatcccaacccaccacttggctaaagaaggacaaagtcctacaattgacaatcccactgcaactatgtaatgagaaaggggttcttggaagaaagactgaggtactattatcagaagaggaagaacagttggcaggctaaaactgcaggtttcatctatgcaagaagacgtttagttattatggttgaactttttttatttaagaggagtataaatcaggtcacactggctatttttctaaaatgaagcaatatattttctaataagtagaatggctacaactattccatggtacctgagataccatgataaacaggtacatccataggggaagaataactacccactctaaagcattgattcttgcagggaaagcccagcaaggaggaggcaggaggtggcaggcagagtgattaagaggatgagtttagtgtccaaggccaggtgcagttcacatctgtaatcccagtactttatgaggctgaggaacctcagcctcttggggccagaggttcaaggctgcagtgagctgcaccactgcactccagcctgggtgacagaatgagaccctgtctctaaataaattaaaaataaaaattgtgtccgacagaggtgggttgagttctagtcctgttacacactgactctgggacctcagctatgtctgagccttagttgcttcatctttaataggaccttccttgcctaattgctctcaagactaaatgagaatatatatacctggacagttccattattaatatattaaggttagaatatattaatatattaaggttagaaatgagcatggtggtatggtgtccatatgctgcatagaaatagaagaagagagttgaaagttgatagaatcaattcactccctgggcatggaggaagggaggtgcaagatggagcaggggaaaagggcatagaaaagaaaagggaaagtacttttgctcctaatctagcaccacctaccacaaggtcatggcccaagatctgcttctgaaactttgcccagaatcctttactttttggtgaagaagatttttaagatttgaaaatacattttattttagaaatgaaaatgcaccttgcctcaaagaaggtaaaatttgtatttttccaggtagaaaagatgtgtttcaaatgaccgtgaaagtaaaacatgcccactataaaaataaaacagacaatgtagaaaaatctctgcatttacatggttaaaaaatacttgcaatcccatcatcctagataaccaaaattaaactttggtttctatctttccaggtactttcaatgtatctatgcatgtcaagataactatttggcttgcatattaaggtgggaaattaccacaaactattaaggacccacttcttttatttaacacagttgttttcagtctccttcctacctttccaaaggtcacacaaatggcatactctcatcagtaaactgtcttatttcctatggtattctaaatccagagccatgttcctatcctccaatcccacctcacccctgccattggaaggctctggtccattataaccatatatcatggacatctttggatggtaatgaaaaaatatatatcttttttcatggctgcatgatattctatttaaaaataacagctaacttgtattacattcttagccgaatagtaggcaacaggctaaccaacttgcaggcataatatcactgaatcaggattcagggatcaccaaaatcctacaaaggaaggttgttataactcccatcttaaaggtgaggaaattaaagcccaggaagattaagtaacttgctcaggtggcaaagctagcaagcaacagagccaggatttgaacccaggtgttctaataccagggcccatcctcctaaccatgatgtctacccctttcattatttatgtgcccatttattaatagcaacgaggtgtgtgtttcttgcaaaccttacttactccaacatctagatgtttttcttatttatattgaaaggatatgctttttcagaacaggaatgaatctgctgtggcttctcagcttatcagctagcaaatgggagctaggccaacctcatctgtaatgtgaacagtcactaagtactgatgtgtttgtatgtttctaaaatgaccttgaggttgcttggctctggtgatggagggaaggactgatggatgaggtcgagttgctgaattgactgtccttcacaattccatatttatttgtttatcttccatctctcattatgacctgtctggaagttggcagaaaagcagggaggatttatggatgtgcccagatagaactgggcttggggttaaagtctcttgtggcagccactaaaaagcaaaaacagaaacaaacacggatacaaaatacagacagagctcccagcacaattgagtttgaatagttgttttagagacacacaggcacatcagtacttagtgtttgtattcattatagggtgaggctggcccaggccccacttcctctttgacagactgagaagccaagacagatgatgtgcctgtagaaatagtttcctgctgccaccttctctcctcatggctgtcttgtctccattgggcaattcatctttactgtctccccagtctttggcctctttcctccatgttcttatcattccactcatctctcctctttctgggatctggcagttgtatcttaacacaggacagatagatccctccacttttcaaagtcttctcagtttgatcctcagcaaagaagaaaggctggattccttcattgtttaccatgaaggagagtgagactgatggaggttaggtgacttgtcttccactggtaattcagaagtatttattgagtagctactatgtacaaaggaaggggctagtgaagcagatgctatgcccaggattcagggttcacctgatatggtttggctttgtccccactcaaatctcatcttgaattgtagctcccataattcccacgtgtcatgggggtacccagtgagaggtaattgaatcatgggagcaggtctttcccatgctgttctcttgatagtgaataagtctcaagatatctgatggttttataaaggcgagttcccatgcacatgctctcttgcctgctgccatgccacataagacgtgcctttgctcctcccttgacttccaccatgattgtgaggcctccccagccatgtggaactgtgaatccattaaatctctttccttcacaaattacccagtcttgggtatgtctttattagctgcgtgagaacagactaatacatcactcaaccagttacaccagctgggacccaagtgccaacatctttatttcttaccccttgttatcaggccccatggaaaatctagcctaagtctcttgttttaagagaccaatataccgtgtgctggtttccccttgaccttctcgccccaatccagacatagtctcgctccatatttttcctgctagaggagtctgctttgctcttatagttcattcactcattccacaaatatttactgagcaccagctacatgccaggcactgtctcaggcactaagaagcagtaatagaaacaaacaacgactaccctgcctccctggaacttatagtctagctggagatcagatatttaccaaacagtcacaaaaacagtggcagatggcagctgtggaagggctttaggaaaaaagaatctggggctgagagcttataactgaggcccatttcgggtttgtgggatactaatgtgcatagatgtagaggagaatatagcttcattgttgattgaatgttttcaagtcaccccttatgtttattagcactgacaacaaaggcttaaccccttagtgtccccactgccatcacactcacccggtctcgtacaagcacctctcaactggcctccctgcctattttcttggctcccttcatcagtctcttttccacattaaagccaaagaatgtgaactggtttgtgccgtgtcccagcttaaaactttcaatggctttccaatgcccttaaaatgaagaccaacaaccctaatcccctcctcctcctgaatacctcctccttctcaatgcctccctggactctctggcccctccctgcccatcttacatctgtcacccccagccctcattgccacagccacactgactcctccttatttcttcaggcacttggggtcttcacacgtattgttccttctctctaaaataaattacagctctccattcacctatccatctttcatgcatcatctcaaaggtgttttctttcaggaaggctttcttgaccacatattagaatagattcctagctataggttcttgtggacccttgtcttgatagcacttgttccagatcgtaatcatatttgcatggcattattaggattatgtcagttggactccatgagagctaaatctgtgtcttcctcaccgttgtattcctgacacctggtacagtgtcttccacctagagagtaaccaaagaaaggatgaatgggttcatggaaaagtttataatcattacagttaaaaggatagccccaaaccttattgttcaattcctttggtgtatggataagaaattggagaatcaggccaggcatggtggctcacgcctgtaatcccaactctttgggaagcccaggcgggtgtatcacttgaggtcaggaattggagaccagcctggcctacatggagaaaccccgtcactactactaaaaacataataatgatacaaaaattagctggggatggtggcagatgcctgtaatcccatctacttgggagtctgaggcaggagaatcgcttgaacccaggaggcagaggttgagtgagccaagatcgcaccactgtacttcagcctgggcaacaaagtgagattctgtctcaaaaaaaaaaaaaagaaaaagaaaaagaaattagagaatcagagaggggagatgatttactcaaggtcacacagcaagttagaggcagacctggcctgagatcatgagttacagctcctgccacaatgctccattgcctttccagagacttcctccactagcctcaaaacactggtatttgagatctataatgtgttggttagatggagaaaccatccccattaagtgttacaggtttgcagatgaattatttagctcattaaggctcataaggcctgaggattcatttgaaactattttgtctataattaattttcaaattaactctaaggtctcatctgagtaccagttcccactcataaggaagcaggccatggcctctaccctgtgaggcaaaccctcagccatcctttctaaattagttcattaaagtcaacaataaaccggagcctttttaaaaaaaaacatctctccaccccagaaacgctttgtgatgaagcatgaggcaatgagatgcccccaggcagtgctgtctcatggccaacaagtgcatttcctgaaatctgacaggggaatgaacatttgctctgcctcttgaaggatatttatgcaccttctgaagtgtgaccaggacgcagctcaaacgtgtcagatgcttcctctccgtgaatatgaagcggcggcttcactgccttgtattacaccccagaaccatgtagctcatgtaagcttccgaatggtgggcagtggagcgaaaataagactttcttaatagaagaagtcttggtcccaggactcaaccaggtagcaccagcagaccaaccagggattttccaccaggcgggagaggttttcatcaagcaggagaaccctgcagggaaggaaggaacccgggtgaagtaaaaagactacccattggtagtcagacaatttgagctaccaaaaggaagtcccttcccctctctgaagtctcagtttttcatctacaaaataaacttaacctaacacctatattcattgttaattcacttttaaagtgtcaggtgctgaagacattctaggacctgaagacattgtgaggaacaagaaggacacgttccttgcccaagtagagtttacatttcaggaaggaagagagaaaattaaatatatgtttacctgatacttgtatactttcaattaaaagtatcattgaagggataaaaggaggtacaaatagtggttaatgtttaatgctatgtgcctgatatcatgccaggcactttacatataataataataacagcaacaagtgtaacatgggccaggcactattttatgtgtgttttacacattaacacatttaatcctcattttaaaatacatactggcctaggcaacacagcaagaccctgtctctacaaaaagtttaaaaaattatcgaggcatattggcacacacctatagtcccagttacttgaggggctgaggcaggaggatggcttgagcccaggagtttgaggctgcagtgcatcgtgatcactactgaagtctggcttacataacagagcaaagtcctgcctctatttaaaataaaaaattaaattctgggtgcattgactcatgcctgtaatcccagcacttttggaggccgaggtggatgggttgcttgagcccaagagtttgagaccagcctgggcaacatggtgaaaccctgtatgtaccaaaaatacaaaataaataaataaataaataaatagccaggtgtggtggcatgcacttagtcccagctactcaggaggctgaagctggaggtcgcttgagcctgggaggtggaggttacagtgagctgtgattgtcactatagtccagcctaggtgacagagcaagactatctcaaaaagaaattaaacattaaataaatactattatccccattttataaatggaaacactgaggtacaaagaggttaacttgcccaaagtcccacagccactaaggggcagagaacctatgcagcccgggcacaggtctgtataccatgtgctgcctctcatgatagtatcatctcatttaatccttgcaccaacctggtaagtacaattgttattctcatcttacagatgtggacacagaagcagaatgtgtaagagactactctgagtttgcacagccaggaggtggtggggcagggtgagacccacagtggttcctcctgggatgcacgtgaggtggactggcccagtgtccagccccagggaactggtacctctgtggtaaactctcctactgtctttcctggccttgttcttgctcaggtgttcctgaagagcgaccgtgtggcccgcatggttcagagtggaggctgttccgccaacgactcccgggaggtcttcaagaagcacattgagaagagagtgcgcagcctgcctgagattgacggcctcagcaaggagactgtgctgagctcctggatggccaaatttgatgccatctaccgtggagaagaggacccgcggaagcagcaggcccggatgacagccagcgcagcctccgagctgattctgagcaaggagcaactctatgagatgttccagaacattcttgggatcaagaagttcgaacatcagctcctttacaatgcctgccaggtaaggtgtttctcgcctgggcccagagctgtgggtaagcagagctgcattccaacttctatgagatacttcttgatttttttaaaaaaaggattaaaacttatattttattactctactggtaaaaagttgaatacagtttaggctggagtatattcatgcttttcttctgatttaaaaaataaataaataaaacatttttatgagcccttaaaagtctcaggggccctaggcattgagctcattgtgtctaatgggtaagttggccctatgagtaaggcttgttttccacgtgtcaaaagtgctaaaaatcaattttttaaaaaatatggttctgcctttggtgtttgccagttgaagggcttgtgcttcctcagctgggaagactactgaacttagcacctgcctgtcaagaataattttttaaaatggaaagcttgcaaaaggcccgatacctgtatattagtcacatcatgaatttctgagtggttctgatggcgagagctgaggctttgcttgggtccaccccaaaatgggcctgtatttcctctagatggaggattagggaagcgaggtatctcatatcttgatatcctgcctaagcttagcattatattcatttattcaacaaatatttattacgtgcctattttgcagtctgaaattcttactggatgtctcttaggagcagtttaaaaatgcacattcccagctgctagccctagagattctcattctgcagcctcagagcatggcccaggaatctgcattttaaacaaggaccttccttcctggtaattatgttgcccttcaccttcaaagaactatcagagagattcatctttgccttgtttgctaatattcccagtatataaaatcttggcacagagtgaatgctcagtaaatgtttatcgaattaataaatggataatggaaaattattttaactagtaggtagggtcttatcaactatgatatatcaccttgaattttctggatgttttagtaagagtctgtttagcatttcataatacaacacatgcatcacattcaaagatattgctggtatctactttcatctcatccaactttaattgaaaacattgattacaaatctggagatgaaaggttttttgtgatgggtcaaaaagtattttgaaatttcacatatcaatataaaattaaatttaatcattattttatttaaaatattactacatcccaccatgtagcagttttagaatgggataagcaggtggcgttagcctccaccaccactatcacctccaccagcatttccaccacaagaaggtgtcatagcttcaatattgaaaaatcatccacctgagttataagcaagattcagaattacagagagagtcaagtgttcctaaaccttctaggtacaaaattattctagggattaatttttcttcttattgcaacagcttatgcatattttctgtgcttgctcaaactcagcttcattggagtgaatccattgttatgccatttcttgtcttatctcagtgtttttgcacttgttgaattgagtggcaggatcatattttactgttttctcctaaaaaatgaattaatccgactcattttaccctcaaaatcttttttgcgaaatagaaaaaagtacagtaatattaaagaatatcttctctctccagaataaagattgtactcttagccaaaaaagaattacaagataggccaggcacggtggctcatgcctgtaatctcagcactttgggaggctaagacgggtggattacctgaggtcaggagttcaagaccagcctggccaacatggtgaaactgtctctactaaaaatacaaaaattagccaggcatgatggaggatgcctgtaatcccagctactagggaggctgaggcaggagaattgcttgaacctgagatcacaccactgcattccaccctgggcaacagagcgagactccatctccaacaaaaaaaaattacaagataaagtacttcttcttgggacagggatacttaagacatttagtattttactctctattcatatctaaatctgattattgtttcagggtttcatatcaatagaaattagggcaaaagaacatatgaaagtaatttatacatacaaaaatacacatgaattctaaatatatggttttttgatttctatgtctttagtaatctaagtttcaggagtgtattggcaaacaaaagtattttaaaagaaagaaaatattggtcatgataatatttcacaacatataatacccatttctatgacaatatagagatggctattctctaaacttactgtggcaataaattcttagtgtagcctttctgcaatctgttagtttgcagcagaaaaccttcataatgggaaaaccttttgacctaggagctctacctttaggaattcattacaagtagatacgcagaagtgtgtgcaagagtgttaagtccaaagatgttcactgcagccttttatatgatagtgaaaaaatggaagcatgcttaattcccagcagtataggattaattaattagattttgatttaaccatacaagggaattttctttatccaatagaacagcaataaaagagttgttaaagaagaaggcttgccatgtgggaaaatgttccttagatattgctaagtggagaatctggctatgaagcacaatatgcaggcacagtcccatttctatgggaacaaaggatggaaaaaggtactggacaggcaaagaacaaaatgttaactgtgcttatctctaaaggataggattatggttgatttttatgattttcatttgtgcttttttatgtctccaaatttctaccttaaacacagttattctgtaaatgaaaacaaataccaaaagtctcaacaaagaaaccatcaaaacaatgggatatgaagaaagttatcttctgaattgttttctagacttcaggcgttaacataccaccttcataatctttgccatttccgagtactacctggatgattatttaatgtttcttattaaactaactctcaaattcacctttttttttttttttttttttttttggagcttaagagtctcactctgtcactcagggtagagtgcagtggcacaagcttagctcactgcaacctccacctcccaggttcaagcaattctcatgcctcagcctcctgagtagctgggattacaggcacgtgccaccatgcctggctaatttttgtatttttagtagaggtgggtttttccatgttggccaggctggtttcaaactctggacctcaggtgacccacccacctcggcctcccaaagtgctgggattataggcatgagccaccgtgcctggccccaagttcactttttaaacctgtctttatcttaggtaatgtacataaaatcacagctttgatatattctttttacaaaaaaataatatgcattaaagtgaaacctaactattaaaatagaaactcttcattggctggccctcttagatcatctcacaccacagtgatgcagaagacacggtggcagtagacagtgccctgacgcactgaggctggtgggacagagctctctgactccatccctgaaaatagcctcagactgaccacagcagctttcatatgaagtctgcataggcaggtagcaaagcagagatttaatttacctccctcctctttccttgctggcaggctgtatgtagacaggcagcaaagatagtatacctgtcatgccttaccatcaggtgtctgaaattatacatttactcactttctggcagactacactcagctctgcacaactcttatcaactcacagtagcaagaatacagaaatgatattgtatcactttcatcctcactctgctgaaattgtttcctgtttaattttgtattttctggaccttcttctccttaccaaacaaagcaatttctaggtgcttcccaaacccaaaatgtgcttaatgttttcctcttacgcatatcgtatcctaggggaagctgtaatctgatttctgctgctgctttgtgaaagttcccatgctctctctttatgaggttctgccagtaactgccatttttatctcaaatgagaaatgacatttatcaaagagcgattatgtcagttacatatcagttatctgttgtaacatgaaccatgtctatcaaaagataagagaaaagcaagagagtttaacaaatgtctctgaatttgcccacggagtttcttaacatctattctgtttgtttgagaattagtggataaatctcataaaagaaattcatactcaacataatatccaaagtaaaatggcaaattttattatgaatcagtgttggttttatttttcatagacccttgggaagatgcagtcaattatgtagctatttgagttgaattctaaaggtaactcaaaaaaagtaaggtaggctgagcacacagctccattccagcactttgggacaccaagatgggaaggtcatgtgagtccaagggttttagaccagcctaggctccatctctacaagaaatttaaaaactagctgggtgtggtggcatgcacccatagtcccagctactcaggaggctgaggtgggaggatcacttgagcctgggaagtcagggctacagtgagccatgatctcaccactgcaccctagcctgggtgacagagtgagactctgtctcaaaaaaaatttttaagtgagataatttgagaataggttttattatctgagaaatgaggctaagacagacctgctttccatcttcatgaaatgcaaagctgacagcgatgatgatgatgacgatatgatatttaaaaacattttcaagatgcaccatctctcccctttccctttagtaaccttcaaatttggcgtaaatttgattctcagttgtaccagctgtctgctactttctactcctctgcttaactttataagttatccttaactatctcattcaaaactgtgcggatattttcccttgaaaaatacctcaaatgtgcattttagaaggagtaaggtctacatcttaattttttttttttttttttttttttttttgagacggagtctcgcttctcgcccaggctggagtgcagtggcgcgatctcggctcactgcaagctccgcctcccgggttcacgccattctcctgcctcagcctcctgagtagctgggactacaggtgcctgccaccatgcccggctaatttttttttttttttttttttttttgtaattttagtagagacggggtttcaccgagttagccaggatggatggtctcaatctcctgaccttgtgatccgcccgcctcagcctcccaaagtactgggattataggtgtaagccaccacgcccggccatcttcatgtatttttaaaggcaaatagactcttcttagtgaagcaatccagctaattttgaagatgtggtgaatatgagctaaggatgtcagttgtatctcgatgtttccattctgctctttgaaaatgccatttctggtttttctcttactgatcacactcttcccttctaaactaagtgcagcatgactctaaacttctccttggccattacatgtgcccaactggcagcagggataacatccacactccaactaataggataagacgataatctgttcatttattctctctgaatttctagaggtttttcagataagtctggaaggaagaagaaagaaatcagaaaacttgatttctcaatttataaacacctttgcattttcaatattggattctctatcattattgaactgctaattttcttaacattcaatttcctttcctccaaaccatcatcagcatggcctttgatgatgtggttatcttattacagcactatcttccttgaacttgatgaacacatggcagcttttcagatagtttattagactctgaagagaaacctcaaattatcaggccttcagctgtgacccagattgctgggttgtatccatacctcattacagagcccttaatctccatataactacatagctttttccttgtccagaagtttctggtaggtctgttgactgaacatttgctttgggggccagactctatttcttcatctcttttcttgatcctgtaacaacaatatagttcttcgcatgagtgatctttcactgaatatctacagaagaaatgttttaaaatctggagatgggaagtagtgacggaaggctaatattaaacccttttatttagaagcatactttcatcattcattcaacagattttagcatctactgtgcactaggcatcatgtgttgtatgctgaggatacagcctaaactttcttactttgtcatacaatggcccatgatgtggctcctgactaattgtcctctttgttcactacacacctctcaatgactttatagttgtcctgcttagattattgtttttgttgtcttggccgtgtaacagattgccacaaatttagcagcttaaaagaatgcccacttattatctcaatttttctaggtcagaagtccaggcatgacttagccaggtcgtctgttaagggtctcacaaagctggaattaaggtgctggcaaggctgtgctcacatctggaggctcaacagggaaggatccacttctaagctccttcatgttgttggcaaaactcctttccttgcagctgtagaatctccagatccagcaacagggagagagagagtctctggtgcatcaaattttttatttatagatgcactgttaaaaggatcacctggttgggcacagtggctcacatctgaaatcccaacactttgggaaactgtggagggaggattgcttgaggccagaagttcgagaacagcctgagaaacatagggagactctatctctacaaaacatttaaaaaattagccaggcatggtggcatgtacctgtggtcccagcttacttgaggggccaaggtgggagaatcgcttgagaccaggaggtgaaggctgaagtgagccatgataacacccaccactgcactccagcctggctgagagagcgagactctgtctcaatcaatcaatcaatggattgcctgattaagtctggcccttgaagttagtctccctttagattaatttagagtcaactgattaagaattttacatctgtaaaatctcttcattcttgtcatatactattgattagaagtgtatactcttgatagaagttatacactattgattaggttcctcccacactcaagggtgggaccaaagtagggcataactcactgtgggaggcatccaaacattgtttgcccacaggctttcataaggctggctccttcaggtatcattttaaatgtaacctttgtagagaagttctcccttaccattctgcctaaaatgggctcctcagtgtttgctgttttccttcctgaaacaataccctgtttatacagcacttaatgcagtctgaaattgctttgcacacttattttctgttattgtctatctcttcttctagatttcattgagcaaagagtgatgtctattgcgttcaccactatacagccaacacttagcacaatgctcagcacaaaatagatgcacaattaaatattgactaaatcagtaaatgcagagtccaaggcagttatggcctcaaggagcttaaatgcccacattacacaaggtgcatgtttggtcatttttttctggttcaacaaagtgcagcagtgtcacaggtcttcagtattcagcctgaattcacctgctggtactcctgttttataatgtggatgttacctgagggtcacagtaatctttcaggcataaactttccttctgaccacactcaatctgtctgttccaagacaaggttgatcaaagagggacagaaattaaccatgtcttttcaaagtcatacactgcccctagaagtcattagatattcaagggactgccagttttaagtgactttgcttgccagatgtaccttaatttcagcaatcttccaatgtgaaaatacatcaatacatatatactggccagatgtagtggctcacgtctgtaatgccagcactttgggagcctgaggagtgtggatcacttgagacgaggagttcaagaccaggctgggcaacatggtgaaatgccgtctctacaaaaaataatacaaaataatttagctgggcgtggtagctcacacttgggaggctgggatgggaggattacttgagcctgggaagccaaggctgcagtgagctgtaattgtgccactgcactccagcctgggtgacagagcaagaccctgtctcaaaaaaaagaaagcaaaaagatgcatatactcagttactagggacaaatttagaggcattaaagatgtggttggtacagggccagagggcaatatttaatttcccagagccacaattttctgaagaccccatcgtggtttttcttacttctctatcacttgtttctagaacacatggccagatatttctatctgactgcacctgctgttaccaagatgctaacagcaatggaaagtagaaattgagagacagtgggtatcctgcatctaaggagcagggaattgggcattttctatgcagccttcaaaactgctatagacatttcagcaatctctttcctttgttgccaaaatggattcataagtatgctcatttattcaaagtcttttcatatgcattgagccacaaaattgtaatcagagatgttaaagaggtatactttcagaaagatacatacagaaataatattttctgcttttttctaccttttgccaaacgacaaaatctatgataagccatctagcacagccttgcaaatagagatattttactagcctttgaacacgtttcaccagtccagattccccatgctaataatttgaatttttcttcttccaacatgcagcctttttgtttcctcagtgattcagacctaaaattagcagaagcttgggtagtggagtatagtgtattgattaaattttgttgttagccctttgtgtttcaatcctttttttttttgaaaatatgaataaaatacattaattccctttccttgatggctagtgaatgattctacatcattcttttagagtgaactgttagtggaggcttcataatctacgtcctgacctccagtttggacatcaattatacctaccaagtattaaatacttactatgtgccagacagtaagcctaatactttatatgcgtcatcaaatttaatcctcataacaagcctttaaagcagacatttgtacctacattttagtaaagaagctaaaaggggggttgtacaatttttttccaaggtcatacagccagtcagcaacaaagcttggatttgaactcaacatttcaagacttcaaagcaagctcctaagtagtcatcttttccatagagaagattttggagattaagtagaaagtttattgatcctgtctagactctaggaaggtggtagatatgtatgtattttgctaagtcttttatgaatctcttttatttggtctgctcttttttcccctaaaatttgttggaggaaaagaaagcttagttgaagactcaattctgtatattggctaagaattattttaatggacgcatctattcaatggagactacttaggtttgtttgcttcgctcatttacgttctattgtagcaatccaagtgtttcctgatttaatttttaaaaacatagttaacaaagccctgcagtcttcagaggatggttgaaggatagggaatgcttgtttttcttatcttgtcatgcttttgtgtgatctggccaattggatgacctgaaaagtgtagctatttcatgttgtttcctagctgggcaaaatttttaaaaagttgttctttggaggaagaacatacaacatcatacataaaattccaaattgcaaagcttttcagttaataaataaactaggagttggtaaatattttaggctttgtgaaccctgtggtctttgtaacaactgcttaattctgtcattgtagcgaaagcagccacatataatacataaggtatatgggcatggctgtgttcttgttaaactttatttacaaaagcaggcagctggcgtatttgactcaagggctgcagtttgttaacccctaaattaaataattatcacatcataacagcaataattatttactttcaaaaaattattccatggatgtaagatgttaccttttccacccaaaagcattcctttttcttaacagcctttctaacatctgttattttttgactttttaataatagccgttatgactcgtgtgagatggtatctcattgtggttttgatttccatttctgtaatgatcggtgatgttgagcttttcttcatgtgattgttggctgcatgtatgtcttcttttgagaagtgttcatgtcctttgcctactttttaattgggttgtttgtttcttataaatttgtttaagttccttatagatgcatgatattagaccttgtcagatgcatagtttgcaaaaattctccccattctgtcagttttctgttttctcttttctctgttgatagtttgttttgctatgcagaagctttttagtttaattagatcccatttgtcaatttttgcttttgttgcaattgcttttggtgtcttcatcatgaaatctttgccgtgcctacgtcctgaatggtattgcctaggttgtcttccagggtttttatagttttgagttttatatttaagtctttaatctatcttgagttaatttttgtgtatggtgtaaggaaggtgtccagtttcaatcttctgcatatggctagccagttatcccagcaccatttgttgaatagggaatcctttgccattgcttctttttgtcgggtttgtggaagatcagatatttgtaggtgtaaagtcttatttttgggttctctattctgttccattcatctttgtgtctgtttttctacaagtacaatgctgttttggttactgtagccctgtagtatagtttgaagtcaggtagaatgatgccttcagctttgttctttttttggtaggatttccttggctatccaggctcttttttgattccgtatgaattttttaatatttttttctagttctgtgaaaaatctcaatgatagtttaataggaatagcattgaatctataaattgctttgggcagtatgaccattttaacaatattgattctttctatccatgagcattggatgtttttccatttgtttgtgtcatctctgatttctttgagcagtgatttgtggttctccttgtagagatctttcaccccctagttagctatattcctgggtattttattcttttttgtggcaattgtgaatgggaattctttcctgatttggctgtcaccttcactgttgttgttgtaagaaatgctagtgatttttgcacattgatttttgtatcctgagactttgctgaagttgtttaccagcttaagaaacttctgggctgagactgtgtgggatttatagatataggatcatgtcatctgcaaacagggatagtttgacttcctctcttcctatttggatgctctttttttctttctcttgcttcattgccctggccaagacttccgatacagtgttgaatagaagtggcgagagagggcatccttgtcttgtactggttttcaaggggaatgcctccagcttttgcctgttcagtatgatgttggctgtgggtttgtcatagacagctcttattattttgaggtatgttccttcaatacctagtttattgagagtttttaacatgaatggatgttggattttattaaaagccttttctgcatctattgagatagtcatgtggtttttgcctttaattctgcttatgtgatgaatcacatttatcgatttgtatatgttgaaccaaacttgcatcccaggttgaagtcctacttgatcataatggattagctttttgatgtgctgctggactcagtttgccagtattttgctgaggattttacatcaacgttcatcaagaaaattgccctgaagttttctttttttgctacatctctgctaggttttggtgtcaagatgatgctggccttataaaatcagttaggcaggagtccctcctcctcaattttttggaatagtttcagtagaaatggtaccagctcttccttgtacagctgggatagtacccatttaataaggtggttggtgctagttattattagctaccattaattaatcaaattctcacatcttaagaaagttcctttctaatgaataatgaagtatagggtgggctggttctctggaatcagttattgcaacaattcatcaaattgtgccagggaacaatctgaagaagtgccttcaataagtatacaatgcaatttgaaggaataaaatccatccacaataaattctaactgttaaaaagtcaatatgtaaaatagtagacaattgtaatatatagtggcagtgtgaatccaggcttagctatttattatctatgtaacctttagcaagttaattaacttttctataaaacagatattaataactatcagatagaaataaggtatgtaaggagcccatcacatgataggaactcagtaaatgatagcctgggttggtgatggtagttagtggcatggtgataggggtagtagggggcatggcagagtggtataagtttcaacagctggagcactttagagctatcagataacaatggggtttgattggtcagctgctgcttcacagagaaggtattaggtgagctgggtttgaatgatgaagaaattgtttaggctgaataaagagagatgatctgagatgtctggtatcttcttttacccaattatagaccaaagtagagacaaaattgtatcataagtgtaatgtggttgaatgaaataattgcctcaattctttgctactgtgtattaaaattaaacaccctaccatggctcatggggcattaagtgagcttctcaaccccttaactttggtaccagccatcatgcttgctttgtgagtgggccgtcagcagagtaaatgagcagaggtcttgagatgtgcttgtgcacatggttttgctgccattgcactttggggatcttccaagagaagaccatgccctatgcagttgttactcctgtagcctgggcctctgcatgatacaaatgaaacaaatctaactgaactcacaacctggagccaagcccagctaagccaactccgaagcaacccatagtctaaaacctacagccatgctcagtctaggtcaacagaaccccaatcagttcacagacccatgaacatggcaatcaacatatattagtgtaagtcactgatttcaagggttgttggctatccagcattattgtgtaaaatagcttatgaacacaaacagcatttaaaataagtaagcattatgagtagtagatgactagtaagatacaggcataactacagtggggttctagtattaactaccaacctctctttactgtggcaactgtcctaatcggaaatctcttcctttgtctctttcattcactgtcttcaacctaaattgtccacttttctaaactatactggtgtgtttgctttctggcatcaatgctgatatgctagctttaaaagactgcttctttgaaattggaagtgaggagatgataagttggctgaggtaaaggaactcaagctaagtagagttcctcattattcaagagtaagggtggaatctgagtagattttggagctggacaagagataagaagtgtgaaatccttatgtatagggaggccaaaaagatttaacaaggatcattagaaagcggcaaagcccttacctttataagggatgtgtttattttactattgtgagaatacctgtatgggttagctgttgctgcataacaaacaatccttaaactcaattgcttaaaacaagaaacatgtgttattgctaacaagcctatacatgagctgggtagttcttatggtcttggctgggctcacttattgagtttgttgtgtttgttgtcagctgtgggtttggtaggaagctttgttctattagaaggccagatgactatggattgatctaggataacttcagttggaatgattccacaccctggactttttcacatggccattggacagggttctaagtaaaagtgtgaaagtacaaggactctggaagtcttagttcagaactgtcatactgttgcttccactgtattctattggcaaaggaagtcacaaggccagctaaaattcaagcgaggagaaacagactccatctcttgatgggaggagctataaattcatattgcaaaaggtgtcgttataatcagagtggaagattatggccacttttgaatctaccataatttctcaaactatgattattgctgacatgccctggcataaaattgtttaaagccaatatatgcccaacttattttaccaatttattttagtaaacagtcaatgttttattataaaataatgttttctattgctacagtaaataaaaccactacatataacatggaattaagacctgaaggtaattgacctctcctaatgaaaaaacaatcattttttaaaattttattttattttattttttgagacggagtttcactcttgttgcccaggctagagtgcaatgctacaatcttggctcactgcaacctccgcctcccagtttcaagcaattctcctgcctcaggctcccgagtagctaggattacaggtccctgccaccacgctcagttaatttttttgtacttttagtagagacggggtttcaccatgttggccaggctgatcttgatctcctgacctcagatgatccacccgcctcggcctcccaaagtgctgggattacaggcatgagacaccacacaaggcatcaattttttttttaatgtgtaagtatttttgttgttcagagattgttagcaaaagtagaaacataagtccaatcatgcttttaattggcagttttgagagtcactagtttgttatttcacatatctttcagaggaaagaacatattttctctctgatccttttgtcatcaagaagtactagctacttcattatgtcactctgaaatgggcaggcactgcttttccatcttaaaatgttgttttgattaccataaaatcagcaaaacctcatagaaacgtgagttgagagtgaaaataggtgtgtaagactggatgcaccattaatgataaaacaacattcaattgtgcacttattcaatgtgaattgagtgtctatcatacaccagacactgttccaggaactgaggatatagcagcaaatgtaacagatgagatttctgctctcaaaaaactgatgtttaatgggcaaaacaagaaaaaaaaagtatattatgtcatataaacagagatatgggctataaagaaaaacaaatcagaatgaggagacagaggataatggtggtatttgagattatgtagacagagaagtctctgtagggtttgtgacccttcagcagaggcctgatggaaatgaaggaacagcctggggaagatcatacctggaaaaggaagtgcttttgatgaaacaaagcaataagcttggttcaaaggataccaagacataagatcagtgtggatggagcacagagaccaaacagaaacggaaaggaagtacattcagaaggctgggctatcttaggccatacctcagagcttggatttactccaaggattataagaagctcttaggtgtttacgagtgagagactgacagatctgatttgcccagtggaaggaaagatgagaatctatagaatcttgatatgactcttctgtttacgttttcttttttttgctttttttttttgctgtaagagacagggtctcactctgttgcccaggctagattacagtggtgcaatctcagctcactgcagcctctacctcctgggctcagcaatcctcctgcctcagcctcctgagtagctgggactacaggcatgtgccaccacacctggctactatgtttttgtttttgtttttgtttttaatttttgtagacagtggatggcactatgttacccaggctggtctcgaactcctggcctcaagtgatcttcccaccttggcttcctgtatgacttatttacttagattgtgggggttatttttgtgtgtgtgtttgtttgttttgtttatttttttagatggagtctctctctgttgcccaggctggagtgcagtggcgtgatcttggctcactgcaacctctgcctccagggttcaagtgattattttgccgcagcctcccgagtagctgggactatagcatgtgccaccatgcccagctaatttttttgtattttaatagagatggggtttcatcatgttggccacgctgctcttgatctcctaacctcgcgattaacctgcctcagcctcccaaagcactgggattacaggcgtgagccactgtgcccagctacttagattttttaagtttaataaatctgtagttcggaaatagaattgttcaccatggtatctggatttctgcaagttgtacatgtatgcaggatatagtaagaaatccactagaaagaaataaggacttcttttcatattctagcattgtttcctcagtctttctatctaattcagtctaacttcttttaaagaaacaaccaacataaaggtggaaatttaatttttcctatataatgactcaacactttccttaggtttattctaagtatttgtttctttctggagtaagatagaaagttgtagaatttatgggtcaagaatgtttattcaagaaattataaaaaatgcttatttaaaaatttgcctactaggagaattgcatgcaaactgccccagatgattgtttaagtgtccaagatttgctctgtggatgtctcacctataaatcatattttaaataatatgttcatgtggttaattctttatgaacctactggaattaactgagtttttaatttgtttaaaaaataatgttttggggaaatggtatcaggtcgtgcagtatctttctcttcatgctaatttagattttataccaagttaggcagttggcattattttatttggtcttcacagctctacaacaaagcaaggagaacatcttcctatttccccttaaagatgaggaaaatgatacctggacaggtgaaggactggctcaaggtaacacaggtatccttggaacttgaacccaacctgtcaacctccacatgtgaatctttgcagtcttgtggtacttctcatgcctcatctctaaaactgattcccccttatggtaatcagggagatcagttgtatcagttagatcccactggtctagctgactgtattataatagctggatatagtataaactgctataacctaagagacccggagagctttattcttctgtgatgtaaaagcctgagctagtagttcttcaatttcattacactatcatctcctacagtatcatctgtgtgcatgcaaccaaagctgtctcaccaccaacacattcatattcagcccaaagaaaagaaaaggtggtagggataggcaagatgcttccttttaaggatataacccagaggctgcactcacctctgctcagatcccattggcaagagctcagtcacatgaccgcatttctttacaacaaacctgagaagtgtagttctagctgggcagctatgtactgggttgaactcttgtaggggttgagggattcaagcattgaaaagggagttaaaatggatactagcacaggcttagcagtctccaccactttctggattccttattattatataatatttaagacatgcaaaatgatacctaatatagtatcaatacctgtgtacctgttacacaggttaatgaataaatgtagtggtgcagttgaagtctccttccctcaatctcccccaagcgcagagtaaccatttattgctttgctgttaatccctttcttacatttcttaatactttcattactgaaatacatacacttaacagatctatagtagtgttttgactattttaaatctttatatacatcatattgaactgcaattttctgccactgcttttttgactcatcattaaagtggagagattgatttatatttatgcatgtagctctatttttctgggtgatatctcaatatgaatataccgtcatttacttaatgaaataagtatttttttgctattacaaaaaaatgcgttataaatacttcttgtgcacatatataagaatttctccagggaacatacctagaagtataattactgggacataaggtaattgcatcttagttattggatattatccataatgtttcaattagttgtacattcccttgaatagaatataagtaactattttactctttacaaatagccatgtttcaaatgtaaaattttattacaatgaagcaactggatgttttctacattgctatggggaggataaagctcagtagttccatctcttggtaaatacccaagagaaatgagcgtatttgaccaccaaaagatatgcacaagaatatttgtagcagttttatttctaaagttagaataaaactaaatatctatcagtagtagaatggacaaactatggcatagccatacaatagaatacagtaacaataaattttaaaaagaaggacagctgctgccacattcaacagaaaagataaatctcatagacattgtattgagagtaaatgtccaaacccaaggagtatgtattctattatttcatttatataaaactcaagatcaggaaaaactaatctatggcaatagaaatcagaatagtggctacttcagagggaaaaggagggggcactgggtaagtactgatttaaaagtacaccagggagcttctgagatgatggaaatgttctatgtctgtaatgtccaaaatggtagccactacctcagtaaataaatttcaaattcagtttttcaatcacactagccacatatctactactcaggagccacatgtgacttgcggctgctaaaatggacagcacagacatagaacatttccaccatcacagaaagctcttttgtgcagcattggtctatatctgcagttgggtggtatttatgaatgggtacataggtaaaaattcgtcaaactgtgcccataaagctcgcccttttaggagtcattatatgaaaaagacacatgcatatgcatatttatagcagcaaaattcacaactgcaaaaattatggaaccaacctaaatgtccatcaaccaacaagtagataaagaaaatgttgtacatatacaccatggaatactactcaccgtaaaacggaatgaaagaagtaactcaggaatggaaaactattacatgttttcacttttacgtgggagttaagctgtgaggatgcaaaggcataaaaatgatataatgagctttggggactctggaggaagggtaggagttggggtaagggaccaaagactacatattgggtatcgcgtatactgctcgggtgacaggagcaccagcatctcagaaatcaccactaaaggacttatccacgtaaccaaaaaccaccttttcctcaaaaactacccaaattaaaatgtaaaaattaaaaaaattttgcctcatatgtatgcctcataaacaaaatatgcttcacaataaatatgcctcataaaatgggaaggaaactaagacaagaaagataaaaaaggaaaggaataaaacaaaatatttcagtgccttttaaatttgaattttgaatgtaatatatttcatgacctcaggagaaaaatgtacaagagctctgtacaaaagtatcaattattaagacttttaaaatggagattatttctcattaactttaattagactccttctaggtttgcagatttggcaaattattaaaacaaaatgaaaacattaggctcatctctcaggcaagtttcttcaaattctgaagcatccatagacgctcttctggcatctttgccttcattacatttctatgtaactaatttctgttgctaatttgattccatcatgaggtatcatttcaatcattttctctccgacaccagcatatttgcctgtgtagagatgggtgaccccaactgtgatcaaacgcatacagagtaatgagttaggttagagtggcctgatttctggtttatgaaagttaattggaagtatgcttaatctttgtcacagaactctgattaacccattgcctagtttacatttgcaagaaataatgcatttcagcatatagtctctagattatcagggagcataagagaaaagccatcgactattgtaggtcaaaatagtcttgcactggaaatagacacacaccctccatcacaactgaacagagcagaatgtgtcggaggagctcggtgacccttggcaacttcttaccctctctgaacctcagtctcctcacttcctgccttctctgactgcctgacagagtattatctcccttatatttgtttccaccataagacattacaaccacaggaaaagtacagagtacacatgtcctgtcatttagtaccaggtgcagcattccctctatgagtttatgagagtgcaaggtgcatgtttatttccttaggccattgcctggcctgcaggaaattgcaaaagaggtttgttgaataagtgaatcagtgaataagtgcatgaatgctatattgtctcttgtcgtgtaactttcccttgaaacatagtggtttgaaacaacacatgtttcttatcttacaatttttgagggtcaggaatctgggcgcagcttagctgagtccacttcttcagggtctctcacaggctgcaacgaaggtgttggctggagtcactgtcctcccaactagggctggatctatagccaagctctctcagtggttgttggaaggattcagttccttgtgggctgttggactgaggtcttcacttccttgccatgtgacactttccaacttgacagcttgtaccagcaagagagagtctgtttgcagtacagcagtcacaggcttttctaacctaatcactgaagtgacattccacggcttttgctgtatctgatttgttaggagcaagtcactaggtccagacctcatgcaagaagaagaggttacacaagggcatgaataccaaggcagagaaaattaggagcctgttagaagctacctaccacaaatgcctacttcacaagactatgaggaagttcaaaatgagacaatgtttgtgaaagttctgataggtctgccgtttgctctttctagattgttctttcccccttgaatgcactgcccctacatccttctcatctgttatgtttcagcttacatggctccacctctaaggggccttcatgatcccggagccatgcttttagcccagcgcccttttgttttcagcacgaattaccctttctttcctttctttcctttcttccttctttactttttttttttttttttttttttttgcatatgatcagtttctttcaccaggaagtcagctccatgagggcaggagctagcctgtctgattcactcctcattcaccagtgccttacatataatacacctcaagaaatatgtgttggcaaattgtattcctacctcacattgcaatttatttgctttgtaaaattattgccagttggagagctagtacttgtgatggcttttcagaagtttagaaccagagctgcaccagtataggggactctttcttgttctgggattagagagtatacatgccaacaaagcaaactaatttggggtacaagttattaaccacaatgacaaatgtggactacctcagtttggaaggtgagacaccattcacacacatgatactgaatttgagatttttgccatctccttaccttgccttctccagacttctttatacctccaaagtaggcagcagccttacacctctatgccatccctctcagctccaccctccactgcagaagtaaggactaaatttcacaatgctgtaatagccaccatttagtgagtgacagctacatgccaggcattgactaaagattttatacatgtccttcacaattctcatcacaacttttatacaggagactgaaatacagataaagtaaaatcaaaacttcagggccatcagaattggaaggccaaactaattcctctatgcactgtatttaacacccactcaccaagacctctctcctctccaacatagatttacaaagactaaagatgagggaatgagcatgtcttgtttctggtcatagttatatctctaatcatgtcaccttggacatgtcatttttaaacctgtgctaatcaatgtctttgaaagaggtctattagaatttcaactcaaactgctaacagttattggactgtcagaagcctgggcccaaatggccatctcatacatatgccaaattcctcttccattccaagccttcacactaaaatgtttcatgatctagaatatggtctttgtgcaattttgccagaagacgtcaggaaagtatgcaactcattggcaaaagtaacagctttgcaatggaagaacagaaagagacttctgcaggagaaagcagttttatttctcctgcagtgtctggtctcccagtctggtgcaaccctgaaggtaccctttgaaggagtggcctgcagaatattcatggcagaatgtttattggccccatcttagctcacagtgacccaagtcaccaagcttagaagcttagtaagaaatgagcatgtccctgcagtgtacctgccactccagctatattatccaaacataggaagtgagatagggtgaggagtatgaggggctgagaggagctcagtatttgactagaatactacccaaatctttcagctggataattcgatgttttaggggctgtgctgtgcattgtaggatgtttggcagcatccctaacttctactcactagataccagtagcataaccttctattggtgacaaccaaaatgtccccaggcattgtcacacatccccaggagatgtgggaggggctaaatcaccaccagttgggaagcactggaccggggtaggaatgtgacgtcagtcaggataggccagatatgccatagcaacaaccccatcatctcaatggctacaaagaagaccgtcatgaagtgacagaaggactctacttcacggatacttcacagattcacagtctacttcagagactctggctgatagagcagccaatgtatccaatatcatgaattgccatgccagagggaatagagtgctctgaaaggtctcaaaccagaaattaaatgctttatgccaaaagtttggtatcacttgctctcacaacccactggccagaactagactcactcaatacaaggagagctgagagtatagccttaccacatgcccagcagagacgagaaccagaaatacttggcaggcagcactaatggccaccacagatgcaaagaaggtctcccttccttgttgatgtagaatgagaaagtgttaaaggcaggatatacaaggttacccagcacttggcagaaaacaacaacaataataacattgaggtgatagtgactacaatttggattatgcttattatgtatcagacaacttaattctcactcaacaacccaataaggtaaatacttttattcttttcattttaaagattgtgaaattgagatgcaaaatgcttaagtaacttgcctaaaaccactctagtgagtagcagacctgagatttcatccaaggtctctctgatattaaagactgagctcttagaccccactttataaatcagtttggctggtgtgcaaaccaccttctctcattatggggctgaattagcaagtcatctcccctgtaacctgctctgcacctttgtggtttcagttaagggcatttgcaaatgccttctatccttccactccctgacaatttttcttaatggattccaccattcctggagcatttggaagaagcccttagtcattccattatgagggtgatcatgctcagagaaacaagtaaaatctgtctgcaaacattgagagagagcaatggctccgcatcaatttgggtcctaagaaaactgacacactaaatcaggtagtggagtcagcaatgtgaaccttttggatgctgtcaccaccccacttgaagtagatccagatgctaaggccaaggggttaaatacaaaagcatgtaatgatagaaaggattagcatttatgccaggtattagtataagtgtgcataatcttaagtagatagtgttaataccaccattttatagatgagaaaagttgtgaaaagtgaactaacgaaggtcacccagcaggttttttgagggattccggatttcattccaaattgcaagcagttatccaccctagtggacacaagaagctgcttaaggttttaaacacacttgctcatctctttctagttttccgccgcccccaagtcaagcttacaatatttattttaaagataatagagaataaaacacagatatgtttcactttcttcttcctttggttgaaggggttatctgagaatattaaacacaagcagtcaggctttgccaagaagcctccagaatgagataactcagtcacttatgttattatcattaagagaacatttacatttggaaatgaaacaacaatgaatccaaaatctccctcaagctccagctctagttttcaatgccatatttgaggtgggtgctgaagacctttggtaacaattatttgtgaaggggaaagttaaggaaatgaagatatagtcagaaaaaggaaaactgagatttggctcagtatcttccagaaaaattaaatgaatttattttaggaaaaagtgaggtgagtgttagatatagaaaaaattttcctaattaggttgtaaacagattgttaaaggtagtaaggaacatataacatccacctccctgcagatgttcgagaggaggacaatctttgctgggagaaacagcccagatggtagaaagaacatggactttgcaaacagacccttttggatttgagtttcagctctgtcatttattagattggtgcaaaagtaattgcggttttgcccttataattgcaaaaaccgcaattacttttgcagcagcctaaatattagctgtttgacctgggacagcgacttcgtgttgataagcctcaatttccccacttgaaaaataacagtaccatatgctctattggccttgtagagttataaacataatcaaagggtgcaatgtatatatggccatttctaatctgataagagctaagcaaacacaagtagaaccaaaattgagtttgtgtcatttcttaaaacctactcttgctcctgaacttacagaaaaagaacaagactatcagccagaacattttcattttagtgtcactctgggtataagtgagctaagtatttgaggggaagcttcatcagaatttccatttcctttatccaattcccatcagatgaatcacaaactctcagaatggaaatgttagcttctaagtgaatggtagttctgtccctcaagacaatggttataagaggcctcccatggttttctcatctagtgttgtattagtattattgtttgcaaaataattcctctaaatgaggaaaagccctacatctccgcaggtgcctccttaaaagggcattgcacactttcacagacagctgttgagaatgacagtttcttttgttgaagaggctacccattttagagtctgtgactattgctatggagacaactgcaaaatcagagaaaaggtgggtattgggcctgtaaaatcaacaatgctccacagatttctcaccaactaaacctgttcttacaaattagttttgcctattttgaacttcatataaatgaaattgtaaaatatctaccctcttgtgtctgccttctcttgattgacttcacatctatgagctttatttatattgttgcaggtaacagtagtttgttctccttcactgctgtgcagtattctggtttgtagtttgaagcttctagtttgaagctactatgaataaagttgttctgaaatactcctatacatgctcttcggtgtatgctagcactcaattctctttcttttgggtagaagcacaggaatggaattctggagatagatatctagatatctataaatagatactcagctttagtaaatagtgccaagaagttttccaaggtgtttttactaataagcacagctaccagcaatctaagacagtctaggtgcttcctgttttcacttccaaaatacaccttacccgtgtgatcttaaagcaatgacttctttttaaagagatgcgtgcaaaaacctgtacaagtccatgtaactcccaaatgcctaccaataccagatggaaacttgaatagagcaagaacttgactctgttgtggaaagttttactagtcttactgtgccattaagaaagaagaatttttgtctgagggtttattggttggtaggaagcagaagggttaattacttttggtaaatagtgtttttgcttcctttggctggaatcctttattattattagcaattgatcaatacacttaatgggtcactcaaagctatcgcatatcccctgcataaccagacactgagcaatcttggattcctgtaattaaagataaagcaaattaggtttcctagtagagataattccatgtctcctctagtgaggactgagtccatggcccctgacagaaggaggtagatactcaatccacctgatatttgtggctaaggcctgatctactgaggaactcagggttgttttcattcagtccaaggggtatgactctttagtctggaaccaaagttttattacaaatttgaatataggaaagtcaaggaggtacaaatccattacttatgctatgaggagaaatgaaggaaattcttccaaccagatgaattcaaaagctcttccatggacctaaagtggacatctttgtgcctgtcatccttcccaaggtggatttatgccaggccagagttaccaacaatagctgcagacagtgactgcccagaggctactcatccctccatccttcaattacccaaggatggagcttcaaaaatatctactgtgttcctccttcaccctgttgatcccctcatcttttccttctatgctctgcctttggtcagagtagcattcttaaccataggccgtcagcctcctcccttctcagtggtcagggagcaggcggtttgccaccatgtgatgagcctagtgtccaaagccagactctggcaggttctagcaatgtgaccttgggcaaactgcttatgactcaatgcctcagttaccctgtgtttgaaatggagagtggtgataatgcctgctagtaaggcactgagtgtcaagtgtgatcctgtagaatgccatgataaatgtttcccttggccactgctgccatgagttagggtgactcctctaaaacattgatttaggagcaagacctaacatatttttcttcagcggttagtacagacttgcttgtgagcttcccacatagtatgaactaagtaaataataataatagcaaatgtaccggtgtttcctgtataccagcaatgtctaaatattttgcacataataattcattttatcatcatacgaccccatgaggtgggtgctattatcattcttgcttcaatggttgaggaaactgagttgttaaataaactgttcacaatcacagagctaattcgtgcaagagccagggttcaaacccagagggtctagccctgctatactaacttttcctttgaacatttatgggataattgatccgggctgaagactattgttaggatttaaatgtacagagaaatgtctaaacctgcactgtccagtaccataatcattagtcatgtgtcactaatccaactttaattaaaatttactcaaaatagaaagtaattcctctatcacactggccacatttcagatgctcactagctgcttagggctgttaactaccatcttggacagtgcaggtgtggactattcccatcattcgagacagttctactagattttagatttttgataaaggaagcaagagagagaagttgaggttgggttttgaggagaagattgggaattccgaggctggtagtccagaagtatgggaaagaagcaaaggcagaaaactggaagtcttccaacaggcagacaggctggccaggccacctggggagcctggggctcactggcacagagcactctcactacagtcagacatgcctggggttcaaacccaggctctgtcaagaattagccgtgaaattcaagcagatcattttgcatctatttccccaagtgtgtttaagcttatcctgagaatagctgaggggccattggagggttttcagcagtggagaggtatgatcagatttgtctttttcggaagctatcttttgaaggtttcgtggagagcaacagagaaatatgagttggggaaatgaggatgctggttctcatgtgtgggcccttgggctggtgacagttcttggcagagttttcactgatgcattgctaaatgaggaaggtaaagactgtgtgtgtgtgacgcataacaccacatatatgagaataccaacagtcccagttgtactttcttgagaatgctttattatttggaaactaccgcttttctacttttttttggcactaaaattccttttgtttatgaaataatgttcacagtaggatagtaaatagtaggaatttttttatgtcattaccagacaaaattaaatgtatgtctgtgccttgattcatttgtttttaaactgttattgtttcttagtccatgaaatccccaaacctgggaacttctgagctgcatgccattgcaattgtgctcaggtgagagctgatgagttcatcagtaaaagggaggcaggtttgagagtgactgagataaaagctcgtagacatgtggatgaggaaaaaatcagggaggagggaatacaggaaaggtggtggtctccaaagagcccatggtgaatgaaagtgcagcagaggcagtcagtgaggaccttgagccctgctgcagcatcatccctgtttctattttgcacctgttttggaggagctcctgagcattcttcctgagtgcagatacatcaaggttaagtgcttgcagggaaacagctggcgcccatctcactgcaccagcaagccacaagtgcagctcccttggacacagaagtgcccacataaggccacctgaactgtgacaccctccacccagtgctcttcctccaccctgccttgggcatgtggccctgagacaaagcctctccaaggcctcccactgaattctgacctctctgagaacgtggctacctcagtgcctctccagacagagcccgcagaggcaggagaggaagccagcaaagtgtcagcgtgcagggagctgccaggctcagagcagcaggcttctcgcattttaagcagcatatgcaaattaaattagcaagggttccacttcatctcctgagcggctcagacacactccccaataattcccaagccaaactgacccagtttgaaattaaaatcaggtttatttttagagggatatatttccccttgcctcagtctcagtggatttttttttcctatttagcctgataaacatctgagtacattattcccagacctgtgtagtcctctgacagctacttgatagatcaaatgcatagtagagtctagctcatgtatattcagacagcagaggtgagccccacatgccctcttacgtgaaaggaaggctgtctacactgtgtccattttcctctacccgtctgcaaccttaaggctggcatcagggtccgctgaactggaaaagctttagagtttaagatgatttagagcctggtcacactcgggttcagcagtatctactggcgttcatcggagacctacaacatcttctcttgacaaaaatctagtcgatttgaattacctcctcgcagctgggtttaagaatgtttttcatcttagctaaaggcactgtacttttcccttgtagcactttctacaagaagttattcccataattgtgtggttaacatctgctcctttttcttaaaactgggagctttctgatggccccagcttgcaccctttaccatcctcaaagcctagtactatattaagtcctcaactaatgaataaaattagctgctagatcagtggttctcaactgggggcaattttgacaccaccaccttcctctcccagacatgtgtgagttttttattcagctgggggtaagggggtttttctactggcatctagtagaggccaaaggccagcatgctgcaaaatgtctcacagagcacaggaccctcacggcccccaccacgcacacagacacacccccacaaaaaacaattacccaacctcaaatgtcagtagtgatgaggttgagaaactatacgctggatcaatctgttcatgtgtggttatgcctaagcagggcaggtttgctctttcaattatggaaactattgggtcatacttttttggtcatggttggagagacaattgccagaaaagaagctgtttatcttagattttcctcagtggagcaaagatagaagttgatttactcaaaggcaaatgagcctgtgaaagcattgcagcaactcactttctggctccagcctccacctgtgtgacacaggatctcagccagtccctgagtctcccttagttacttctgagatgttcatgagatgttcatgagatgttcacttgggcttatatccttgtttatgaagccacttgagggtggtcttcaccacaccactgtggccactgtcctccataaaggttctggctcccttccgggatcctgtctgaagggacttccaaagctgcaaagccttgaggtgccctgcagcctttgcctcaccaagtcggcatggccgtcttccacagagaggtaggaagaagcccctctccctaattctgtgtgaaatctttgctcaacacaggccacagtgagcattctagagccagacaacctaagtgaaaattcagaggctgccccttgctgcttctgtgattttgcacaagatacttaactcttccaagcctgcatttcctcaactataatgacagtgccaaccccatcaggtggttatgagcactgaatgaggagatgcatgcatccttagtggagtttctagcacctgacagctaatatttgttgcgtgctttctattactgtggtgatgttcttatgtggttgtcattagcatcatgttttgaacccagactgggattcacaaccaggatctgacactagtggctgcatgacttgggcgattacttaaacttcccctgcctctgtttcctcatttgcaaaatgcggatttaaaatagtacctacttcacaaggttgatgtgaacattaaataaattaaattaaataatgtgcataaagcctttagcatagtgcctggcaatagtaataataattattgtcatataaattatttaaatgattattaactgaaaatagttaatgttttgtttggcttttttgttgaatctaagttggaaagatctgtcaaactagatactgacaatgttgtaaagcagcagaatagtctggaagttgtctgtttcaggaagcgtcacagcagtccaattaaagtgttttctgaatctcttagaaggcggtgatacggtggtctccaaatctgtgtgcttacctacccacagcttagagcactgaacttcaattttccaactttcctactgttgtctgggttcaaggacaaactctcctccacggtaaagtaatttcctccataaaatctgctcctgagtaaacctggctaaaatgcccccctggtgaacagtattgttaggcacatgcagttaggggtcctggcggttttctcaccaacaaaaatctcttgtgggagaatggtcccactatcctgagatcccagccgctctgatgagcagaagcactttatgccttctttcctcacacagagacctgaatgtctatttttactttttcttttttcttcttttttttttttaaaaaaaaaaaaaaacctgccgggcacggtggctcacacctgtaatttcagcactttgggaggccaaggtaggcagatcacgaggtcaggagattgataccatcctggctaatgcagtgaaaccccgtctctactaaaaatacaaaaaattagccgggcgtggtggtggacacctgtagtcccagctactcaggaggctgaggcaggagaatggggtgaacctgggaggcggagcttgcagtgagccaagatcgcaccatggcactccagtctgggtgacagagcgagactctgcctcaaaaagaaaaaaaaaaaaaaaaactaacaatataatggacaatatggaaagaatggtgattaacaatatgtgggctttgaagtaaagcagaatcaggccccatctcttacaaacaagctgattttgcataatttgcttggcttccttgagcctaatttctccatctgtatactgaaattaaaaatgtttttccctagggccaggtgcagtggctcatgcctgtaatcccagcactttgggaggctgaggcaggagggtcacttgaggccaggtgtttgagaccagactggacaacataacaagaccccatttctacaaaaaataattttctaaaaattagctgagtgtggtacatgcatgtctgtagtcctagctactcaggagactaaagtgggaggattgcttgaggctagaagtcccaggagttcaatgttatgatcttaccactgcactgcagtctgagtgacagagcgataccgtgtttcaaaaaaaaaaaaacaaacaaacaaacaaaagcaaaaatgcccccctgataccattcctgcattcttgtgaagttgaaatgaaatagataattcctataaagcctatatctgacacatgttaacttttcaacaagtttttatgattgttattattgttgttgctatctatggttactttttgattaaggaagtttggattcagctcttccatgagtcagggtaagctacattgtactgtggttacagttcaaactctcagtaccttaaaagagaagtgtttatttctttgttgtgttttgtgtccatcatcagttgacagagactctgttatcctatgtcccaggctgatggtgcagccccgttttcaaatgatgctcccgctgtgccagagcaaaagaaagctctggagggtctttcaccagaaaatacagctttcagcctaaaagggacacagagcacttctgttcacaactcataggccagaagtagtcgtgtaaccccaccaaatcccaaggttaaaagtagtcaaatcctaccgtgctcccagaaggtggagagctggaaatgttttcctaacaactgaatgatgaatgaccatcacggccatttagttggtgtaatggtaggatgagcctttccttaggcaatggctacatttttcaggatgtatattttccagggatgcattacccttatttgcagattacccaattatttatatgtaacaaatccttgctaaaggtgggcactgtgcttggcactgagaatctaatggtaagcaaacacaggtaaagtccttgcactgcataccatacagatcattgaggaagacacaagttaatttaaatatcacaccagggagtttatagttgtacactgagattaaaactctgaaggaaagaaacagagctctgtgacggaatctgatatagtctgtggggtcaggggtactttctcctaactggtgcttgagtatggtatgtaaaggatgagtaggttttcactaagtgaagtagggagggcaggagaaacatttaggacagaaggaacagcatgtgccaaggccctgggccaggagagtgtctagatgtcacaggggttgaaagaaagtctgtatggctagaacagggcccaggagggctatgataaaagacagtgccagaaaggcaggcaggggctaggccatgcagatcccagcttaggtctcttcaggatctgagtcattatctctactgatctgaagcctttgagggactcagctcatttaagggattgatatataaacccagacggcatcaccaggacctctgaatgcacaaaggagtccctgtgtttggaaggccttctgattccttcccctcacgaaaaatgttctatagtcacaggtccatactttacctgtgacattttaaagcaaatatcttcagcctgtctccaaacccaaagcccggagccagcttctgtacaacaaatgtgtccctctctgtttgcacttctcacattcaaggaggcctcccacggactctgggaaggaaatgtgatatccacgcacagcagtgccactgcctgcagagagcaaaatgctcctgatgcggctgacaatatgttccctcctgggaatgtgggttgcactctgtctttcagaaatgtaggattagaatgtgtcatctccttaaccttagaggactggagtttatagatctgctgccaaactgactcaacctactgagcccaccccagtctcatgtctacacatgaatgagaataactgagcaatagttactcaactaggaaacatctaggattctccaactggcattctaggaataccacctggctatgctatagaagacaagaagcttagattttgccctttggacctgtacagaaaaacagcaagttctctggtcatttctctttgagttcaaagataacagtctagaaactctttacaggtagaaattgtttgacctacgtagcttcagaagaaagttcctggttcatagtggtctctcaaacatttacatgagtagatttttttaaaaaaatgtattcattcattcattcattcaccaagacatcatgtactgagcacctacaatgagtcagacatggtgctggaaaggtgataaatgggttcttggcactagggagctttcattctgctaagaaagcacagataataaacatgtgactaatgaaataagattgcagatggtagtaagggctatgaaataagtaaaagaagacaatagatagaatgtcaagaaaagggaggagtgatttctttagctagagtggtcaagagaaaaaaaaaattactctaagatgtgacttatggcccaagaaataaacattgagaaggaggcagccgtgagctagatgggaaataagtttccaggtagagggaacagcaagaagaaactgagtgtgatgtgttgtgggaacacatgcgacagggaggatggtggtaaatgatgaagtcagaaaggtgagtaggatctaatggggtcaatcaggtagttaatgatggtgagtttggatgcaacaggacaccattggtgaattttaggcagaatggtaataggatttcatttatgccttgagaagatcaccctggctattttaaggaaactggtctgaaatgtggatgtagggagaccaggtaggaatctgatgcagtgagagatgatggtgtcttgtgatattgagaagctgtcaaattcagcagaacaatatggaaacaaggccaataagaatgctcaactagatatggaatgtgaggggaaaaaggaaataagcatgattcccaggtttttaaatataagcaatgggttgaatgtaggtgttattttcgaagatgagaaaggaaccggtttggaggagggcggagtcaaaatttctcttttgtgcaagttatctttgatattttgattagatatctaagtggacaattaaatatacacggagctcaggaccaaagatatgattgggttattgggttgtgtaataaatgctaaacaccacaggactcatttgtgttgttaccagaccatttggcatttatctttcattcaacaaagatgtgtttaatacaacagcatgtgattctgtactgagccctagcagatgtgatttcatcttggctggtgatgagctagtaatccaactctttgttggttgttttatctgtctagtcttcaatgtagtgggtgtagtgagtgagaggtgaatgatatggagatatttgcatatagaggaaaattacaaaatcaatctattccagtatgtagattttctgtggctgttgctgacagagaaaactgccctgccaccaagaagttatgaaataaccaaaaattaaaagggtggcttgaatggtctacatcgtgagcttcactagtcttttaattatctctgccttcctaacgttgatcttatgaaccattaacatttggagaatctgcaggtgtaccaccaggaaagtagaaaaactgttccatttgggataggaacactagcttttcaagatcttgtgatgtctccaaagtatctactaattcaaccaaaaaaaatcagtcaaactacatgataggcgttagtcacaatgagcagatgatggaggaccgatatactcttcagttaattggtctgataccccataaatgtgatgtaaggacaaagatcatgtcattgctctgtcccaattctgtcatttttttaaaggtttggttttgatatagacagtaaagtcatcttgtttgggtgacagtatctaatgtaatgccaccttcagaaaagggcaaagtgctttgatctgtcagaccatgtagcaagcaaatgatatggaacattctgagtttgcataaaggtctgactttacatttttaaaaacaaaaccaagccaaaactatcatttaggtctgaaccctaagctttctagatttttccagaaacttttctaccattctctactaaatctagatttattatcataggccaggcacaatggctcacacgtgtaatctcagcactttgggaggccgagatggacggatcacttgaggccaggagtttgagaccaacctggccaacgtggcgaaaccttgtgtctaccaaaaatacagaaattagctggtggcaagtgcctgtagtcccagctacttgggaggctgatgcacgagaatcacttgaacccaagaggcaaaggttgcaatgagccaagatcatgccactacattccagcctggacgacagagcaaaactctgtctcaaaaaaaaagtgttttttaaaaaatagatttatggtcggatgcagtggctcactcctgtgatcccagcactttgggaggctgaggcgggtggatcatgaggtcaggagatcgagaccatcctggctaacatgatgaaaccccgtctcttctaaaaatacaaaaaattagccaggtgtggtggcgggtgcctgtagttccagctactcaggaggctgaggcatgaacccgggaggcggagcttgcagtgagctgagatcgcgccactgcactccagcctgggcgacacagcaagactccatctcaaaaaaaaaaaaaaaaaaaaagatttataatcattataaattgaaatgtggtaccacatattacaatctattattttcttgtccacaagcaagggataaacgtgaattagcatagtctgatggtattccaaatgtcatatgtggtattttaaataactaagggaaatgtcttaaatattatttaaggactttatctgcaagtattatagtatttatgatatttaatgtgcatatgttaatatgtggcaatgttttctaaggttcatgtaaaacattttttaccaaaatatggtatcttttgtgactcaagcaaatgtaatataatgtttaattccccagcaaaaatatatataaatatatatttatatataatacagatagatagatagatagatagataggtagatagatagatagatagggctggccaacatggcaaaacctcatctctaccggaaatataaaattagctgggagtggtggtgggcacctctagtcctggctaaatacctcacatgtgctaaaataaagagaatagtataataagccccatgtaggtatcatccagcttttatcacctaacaagtcatggtcattcttgtttcatctttgcaccccccattcttccatcctcagatgattttgaagcagatttcaaacatcatgtcatctgtatttatttcagcatgtatcttgaaaagacagcacttttacaagaacaaccacccatagtcataggcaggaaaccgttatgatgcctataacaaatttacaaacatttcttatcatctgctatcaaatatggtcacatttccatgtttttgtatatatctggaaattttttgaaactttgtttaaatttaaattgttctctgaatgagcttcatacatagtgaattgggtactatctctctcgagcctcttttagtctataggtagaaacttaattttttttaaataaaacttttactgaccccagaaaaaatttgtgtcatatgtggcaggagatcatcatcaataatattaaaatgacagtaatattttgctcctaggcatcttttctttaggagtctaacccaatcatattttgtttatatctgtgaattttgccaaatagtgtttcttgtttagctaactttttctgcccttctaagtgagtaccttatgttttgaaccacctgatactttgcaggcaggcttctttctatgtcttgctttacaccaaatgaccttcctcccttcacccacactgctccccaccctcatgtcttccctttgcctttggaatcacagccgtgtggtaattggctttcccatgatctttctggcctccatttaccaaagctaaacagcagttccaaaacagtaagtggaagggaagagtattcttctaatgtgatctctccacattagaaacatgtacagtacccagtcacaaaaatgaagaaaatgagcaatgaattaaccatgatgcaaagttatgtaatgtatatataattcctttattatgaaaatgactttttaattcaactgctttgtaacagagaaattaatagaaactaccaacatgttttgcttgcttgtctgcttgcttgcttttcttttgtaccaactagctgtgaccttgtttacattacctgcatttaagagtttcttggtattgaacagatgttttgtagttcccagctccttaatttataagttggatgagcctcaatggcctcatctataaaatggggctaataatactatataaatactgaggttgattgaaccaaaggtcgaggtattggaataatataaagaatatagagaaatttttttaaaaagctgcatatgaggttcagaaaaggcagaaattcaggtggctataaggctataagtagcaggaatgaatgatctcagggcacaacccctgagaaacatcagctccaacaggaaagattccaagtccctggagagtgacactgaccagggctgggttacagtatcactccttgacaaggctccttaatggacaggtcccactgatgcagggcaggcgagccccaaaactgaggcttagcccaggaggggtcttggcttcacccagaaaagaattcaatggcaagccagtggtgttaaacagcaactttaatggaagcggcagggtacagcagcagcagagcagggctaacgcacaggcagtatgcccagaatagcagcccaggggcagttctgcagtcatatttacacctacttttaattacatgccaaataaggtgtggatcatgcagagatttctagaaaaagttggccacttccaggtcattgccctgaaaaggggtgataactgccaggtgttgtcatggcaatggtaaattgacaaggccttggtgggcatgtcttatggagaggtggttttgtctcttccttgtttcagccagtcttcaatctggtctggaccctgagccccacctcctacctcaccgacacaaataaatacagtgaggaagaggtcatccccctgaaagaaatggtagtcctttaccaggagaaggagaaatggtctgggcaacaaaaaaaccaaaccaaaacaaactcccatcacattatctcacagagttttaatgaggattaaagaagttaatacataatgttcacaatatctggcatttggtaaaagctcagcaaattgtagtcagtattattattacagtataaaagagaaaatgagcaacaattcagccatgctgcaaggctatataatcattagcaattccttcaccatgagaaagtcctgatgtggttactctagaattctcagaattggccaggtttgaggctggctcatttgcatccattaactatatggccttcagtcttaacctttctggcctgttcctcctctcacaaaaggtggtaataataccaagctaagtcagaggactgccctagagcacaatttatgaccagttgtcaaagtctcagggaaatccacagattttagtgccaaacatctccagtggaatcaaagggaagaactgaggcaagttacacacaaccatgtttcacatatttttaaaagtgcattttatttataaccctgcctcattccaaaaggatttttggctgctcatattttatataaatagcaaatgtttcaactcttagctaatcaaattaaggatgcaagctggagaaacgacattaagaggtgaacaacaaggcttcatttttaattcatcatttaagaaacgcatctataacctaaatagaaaatgagcaaagggcataaacattgaataagtacaaacatgcaacaagcatatgaaaaaagtttcaacattgtgagtacacaaagaaatgaatatttgacagcagtatcagatttttcgccttattggaaggatttaaaataaagactaccaatatccgtgttagcaagggtgcaggggacttgtaccctcacaccttgctggggggaatagaaacaggcagtctttctggagaacaaataagatgggatctatcaaaattaaattaaaaaataccatttgacccaagaatttcacttctagtagtcttctttaaagaaatattcatatgtgtgatcaaagaaatatatacacaaatatacattatttttaatagcaaaaaaatttaaaacaattaaaatgccatcaattaagttgtttaaaattttcatacaataccgttgaaattttgtgtagtcattaaagaagtgtatatatctcctgaaatagaaagatgtcaaaatatatattttaaagtgtaaatactaagttgcagaaaattggcagtatgatcccattttataaatatgtatttctagatgttttagaaggactgaaaagcttttactcaggattgtgttggttttttaagttgctgttgagtagccacgatgggattagtgaggtaacagaaggatactaaattgttcagtcatgcatatagctcttagaatataaagcaataccatagatgaatgaatcaataaacaaacaaatgaaatgagcaaacctgctacaacccaaaagatcagatcataaccaagctgctaggagtgttgacctgaggggagacttgggattcagttttacctaccagtttcagctaccagtggacaatcacttcagccttcctatctcagctcccttgcagggaaaatcaccaagctggccaagctaatcactctcactagctaaggctcataatccagaaaaatagcaattagacaagaacttgaaactatcttacacaaagaattcaggggtattttggaggagtctatgaattatatttaggaggtccatgaattcaactgaaaatcaaattgcatctttatttttactaacctttacctgaaatgtaacatttcattcagttatgaatgtaggcaacaaaccaaaataatactagcagaaacatttatatcgtgttaacaattgctgctgataccttgaaacactgtttacacttatcactataccagattaccatagatattaggtttgttgctagatcttgtaatttaatgaataaataaatacctattattaaaaatgatgtttaaaattattctgatatatgtatatcaatagaattggatgcctttataatatcatatattttatgcattttaaaaccttacactgaaaagaggtctataagctaaataggactgtactgaggaattcttggccccaaagaaattacaaatcccaatgctttgctttttattgtttgctttcctgttacagaagcaacagtgactggcttctgggggaggggcacaaacctcacaaaggtagcaattcactgggggatcctgaaggaataggcacagaggaagtcataagacaggaattaaaagaaatgataagcacggggaggaggcagcgataataagctccggttagcctgagtgtttaatttcctctttgctctgataattaatttaattaagattaatcttactatttcctattctttatcacctcatgaagaaattgcccaaagacaagttcacaaatgtggtgggaggtggcagaggtgggaagtccaatgttctagaatctaaattggtgactcggagccctagctgtgcatcagaatcacctggggagcttttaaaactctctcagtgggagggaatagggataatgtatattactgactgagagaggcatgagggggccttctagaaggctgaacatattacacatcttgatctggcctgtggttaaatgtgtggatccatatataaaaattcattgacctatatatttaagatttgagcttatgaggaacgtgaagcatggagaggttcggtaactttcccaaggtttatctcagattttttttttaattatatctcaactttttaaaaaaatagcagttttctggccccacctctgaagagtctaatttaattgtctgggccagggcccaggaatcagtatttgtttaaaaacacctgcccctcccccaccccagttgaggccagcgtgcatccaggattgagaaccacctagacgcttcatgagatggaatcattcactcagtcaacaagttcacggagatttcagtgctaagtagtgaggacagagagaaaaataatctctgttctcaagacttttaattaacggaataaagtaataattactttattagatattaacatagatattaacatagaacctggccaggcacggtgactcatgcctgtaatcccagcaatttgggaggccgaggtgggcagatcacttgagttcaagtgatccagtctggccaacatggtgaaaccctgtctctactaaaatacaaaaaaaattagccaggtgtggtggcaggcacctgtaatcccagccactcgggaggctgagggatgagaattgcttgaacccaggaggtggaggttgcagtgagccgagattacaccactgcactccagcctgggtgacagaatgagactctgtctcaaaaaaaataataaatacataaataaaataaaaataaaacccagtggtcctccatcttcagtgtccatcctcagaatcacttggggagcgtgttgaaattatggcttccaggctccacccagagattctgattcaataggtctggactgaggcctcaggaatctgcttaagggaacagtaaataagctaggtcgggcatatgcctaacgcatagtaggagagcaacaaatagctactgaaggtaggagttgctgggccaagtgctttgtatacagtatctaagtgaatgataaacaacaacccaataagggtatgtactaaagaaaactcacaggaggaaactgtagattggagacattaaacaaaacaaaacaaaaatattgtccaaggtccaacagttaataaaatcagggagtggagatttaagcacatgtctctttaattctccaaaagtaaagccctgcaccctgaaccagagctttgccacacattttctacaattctaagagtctacataaacttttcaaagtctgatcacgcatgaagaaatgtggttttgttctgcttgaccctgaggaaagttagtgttaggggaagagaagagggagtgacccaatttgtcagattattgcttgccacaccctttgtttgagccagagctggaggtaccctaaatgaagccagtattaactgtcagatgttgggacagggaatctagaagctgttgttagaattaggctcttataagtaccttcaaatgcctttgcagtgaaaaggaaggtgttccagcatgggagctcattttttcacattgcacagagcctcctcccagggtggagcccttgcaaagagagaggctccagtagctaattgtgttctgtgtctgcacttgctttctgcttgacttccagtcccaaggcttccctgaaagtcgaaatgctcttactccgcccctacccctttctttatcctgttcagctactgcagatgtcacagctgctcagcatttggcttcctcattgatcccacagtggaggcaattatagcagggtcacaagcgacttggctcagcttctttgttatgtctgctttggctctctcctaataaagactgggaaggagataggattctcctacagatttctacattccccaactcagcccatcttcgtgttttaccctctccacagagatagctctctcatgaaaatgaagcagggagtgtaggagagggctcaggggacaggatgcctgagttttcatctctacatatagtaaccttgggcaagttacccaacctcttggtgtttcacttttctcatctgtgaaatgaggataagaataataatattaacacatcagatcataaaaattaagggtttgcatatacttagcacaatgttggatatgtactaaaatatatatccacacatatatatacatcaacagtactatatacacgtgcatactgttacacacacaaatacatataatacatatacaaataacatcattgttatttcctggcttttttttttctctccactttaacacttccttgtgctaggccaggcacagtggctcatgcctgtcatcccagcactttgagaggctgaggcaagcagatcacttgagctcaggagttcaagaccagcctgggtaacaggtgagacttcacctctagagacaatttagaaattagctggccatggtgtttgtgcctatggtcccagatactcagaaggctgaggtgggaggattacttgagcccagggggcagaggttgaagtgagccaagatcatgccactgcactccagtctggacaatagagtagagactctgtctccaaacaaaaacaaaaacagtactgtgtctgtgctccaaactctccttataccaacactgttcaatacaaatataatgcaagccatacatgtcattttcaatttcctagtagctccattagagaaaaaaataagcaggtaaaattaattttagtaacatatttaacatatctaaaatattacttcaaatggtcagtagaaaaattaagaaattttacattgtgttttcttatgttgatgttttttaaagtctaaactctgctatatattttgcaataacaactcaacttagattagccatatttcaagtgctcagtagctacagtgaaccattgactacataatggaaaacacaaccttattctatcacccaactttatgaaaacttgccaatccagtattttcccttcaggtcccactatcagcttttgattcattcattcagaaagggtttattcagtacttactatgtgttaggcatcgtgttgagtgttatggatataatggtgatgtagtcctatgaattttgtccccctaaaacagtgctccccaacctttttgggatcacggactggttttatggaagacaatgttttcacagacccggggttgcaggggatggctttgggatgaaactgcttcaccccagatcatcaggcattagttagattctcataaggagcatacaatggagatccctcacatgtgcagttcacaatagggttcgcgctcctataagaatgtaatgtcaccactgatctgttgggaggtggagctcaggaggtaatgctcagtcactgctgcagcccggtttctaacaggccaaggaccggtagtgggtccgtggccagagggttggggacctctgctctaaaattcatatgttgaagtcctaacttccggtaatagaatataactttacttggagatagaatcctttttttgtataaatgtaaggggtagaaatgcagttttgttacatggatatattacatagtgaggaagtctgggcttttagtgtagccatttcctgagtggtgtacattgtacccattaagtagtttctcatccctcaccccgcttccacccttctgagtcttcagtaattattccactcttggatattgtcttttcagaggtaaacaagttaaatgaggccagtagggtcagccctaatccattatgatgatattcttataaaaaggggaaatctggatacagacacacagagaaaacaccatatgaagacagaggcaaagatgagggtgttaattctgcaagccaagtaacaccaagggtggctgccaaagcatcagaagctagggagaggcccggaacagactctcccttgtggcctcagaggcaaccctgccaacaccttgatcttggacttccagcccagtattgggagacaatacatttctgctgtttaagccacccggtcagtggtacttgtgacagcagtttcagcaaacccatatagttcttttctctcctatttcaagatagggaggcctccaccttcacgagtggtaaagggccctactgcaaagtccgtgatcaaattaatgaggaaagtaaaggtaattgcaagctaatagggacaaaggcaatacatgtataaagaaagaaatatacaatcacaaattatgttaataaggtgtagtgactgagaataatattggggtggcagaaaatttactatgatgaggacatcatggtaggcttcattagagaggtgccgttcaagtctttatctaaaggaagcaatgttctggggaatcccaagcaaaaggaatgcctaccaaagtccctaaagtggaaaagcagctgccacactctagaagctgtcagaagccatgtaaccccgagggtggcagcccagatagtgacaacattacttgagggtgggtgagaagccaggagccacaaagcagggccttggacgccatcactaaccatgtgggttttattaagtgcagcagaatagctttaaaggaggcaaatgacatgatgtgatatatgttttcaaaagaccaccatggctgctgagagcagaaaggaatggaggagaatcccagtgtattagtcagtgttctctagagggacagaactaataggatagatgtatatataaaagggagtttattaaggagtattgactcacacaatcacaaaggtgaggtcccacaataggccatctgcaagctgaggaagaaggaagccagtctgagtcccaaagctgaagaacttagggtccaaagtttgaggccaggaagcattcagcacaggagaaagatgtaggcttggagattaagccagtctagtttttctatgttcttctgcctgcttttattctggctgcactggcagctgattctattgtgcccacccagattgcatgtgggtctgcctttcccagcccactgactcaaatgttaatctcctttggcaacaccctcacagacacacccaggaacaatactttgcatccttcagtccaatcaagttgacactcaatattaaccatcgcacctgggatatcccttgttatgcctgtctgctaggaaatgaggagcaactgaggaaagatgctggaagagatggatatctgtgggcaaaggaggattcctcagtttgtcttttgtgggagctacctataggataaggacacttactgcctcgaaagggagagaagaatctcaaatgacctcaccccagacactgtttggtttcttcaattagagcacaggacacaaatggtgagagagttactcaaagtctatcatcaagtgagggcacagcaaatgaaaccagttccattagtgtctcccagagcccctcctctgtcttacttgaaggaatgttacttttaacccaggttacttttaaggctaagctggaatcccaaacatcatcaaggtgcaggtatggtgggcttggttcactgatgaggggtgttcctgtgcacttgatctttccactttgttgactccattgggggcattctcccatatggtgctttccaggtgtgatacaacaaagagagggaaagagatctttccatgctgtgattcgttaattgatttggaaagttgtcagaaaatagtctacacaatgcctacgaattctgaaaaagcagaaattatcaggtgctgtttgatactggatccttccatacctgataaaatttgatggcacctttttatacttccagtaatgctatggctggctgatgttatttaccttatacaagaggaataaaccatcccaaataatccctagcatttgtcagtgatgataacttcaacttcagtgtagcaaatccatcatcatgacaaagtccaatgcagagtgggcagaagaaaggaagccagccaggtaaaaggtagaccaaattagggattctagttgggggcacaaaaagtaaataaataaaatggtagttgaagtaaatagagccccattggataccaccaaatttccttagatatcattaaattgtatgtgagcaacagggtgaatcaaatcaaagtcaaatttatactcacatgattatagcacagacaagcatctcacagctataatttaccaggagtgattggtggaacagattcagagagcagggaaggaatattctgtgagggtaatgaagaatgaagttaccttctgtcattcaggccaggagaaatgcccctgtgcaattaaactactgtctcaaaccctattttattttctgcaacacaagtgtaattatctgaaattttcttcttggtctaatgttcttgtttattgcctttttccccctactagaatgtaagctccaagtaagcacagaccttgtttgacgcattcattgctatgtccccagtacctaaaatcttgcctgacatggagtacttaatatccctggtggtaggaaggaatgaagtcagagttaagtcctgcagcatggtgagttgacattgcttgactaaaaattccctacattccaggaattcatttgtggacaccctattacagatgagggaactttcagaggaacatgctttgctatgaagataagtcaactggattgaacattgttttttatgtgccgactgctgcattggggatctttactcttctttcaaaattacacctttttcaactaaaggaaaatacaaccaggcatttcatctcagcatgatttgccttcttttcatcctgaagtaacacatcatgtgacctttgctggtctcctgtagctgtgccacattaccctaggagccactggttcaaatctattttagagctcatgattcattctaactccctcctcagggcatgtcacttctaagatttttctcttcaacttgccactaatcccactgaagaaaaaactggcgttagaattcaattttagcttcctggcaggacaggccaaatgtcagcaatatttgaggactgtagacagacgttcccagaagcattctcaaatccacacaacagagtccctggctgtgagctctaatgccaattccctacactagaagtcaaaaaatacccactgattttccttaaattaactaaggaccattctccattcctaccaagagctccctccctggattaagtgacttctggtagaaaagcatctggagttcccagaatttattcattcattgggtcgttcagctagagatgtgaactgtctcaagtaaatgttcatagatttctcaaagagttgaagggcgtacacacatgaatttatttaaagagtaaactgcattaatagcttgtaaataattctagttccaaaatctcacaagtttttaataatatatttgttttataatggtgcttatatctgtaaaaagatgcttatgaacagaattctgacataattatgaaacagtcgagaacatgggctccggcaccaggatatctcagctaaaatcccacttactggctatgtcatcctgggcaagagacttcacctctctgtgcctcagcttcctcttccatgaaatggggctaatggtgatacctaactgcatgggatcattgtgaggattaaatgaagtaattcatgtaaagtgcttaactatagaactctgctgtccaacatggtagcccctacccatacagaactgatttaaacttaaattaattaaaattatatgcaagtttaattcctcagttgcactagccacatttcaactgttccatagtcatgtgtgactagtagctgtcataatgaagaaggcagataaaacatgtctaccattgcagaaagttctactggacagagattgccagaacagacttaaaaccatcccagtaactccaacatttcctttgtttccatgcagtcagtgacccggtactatcgagtccttaacatttcacgtttgttcccttctctgtgttcccatcatcaccaatctatttattccttgatgatactgctcaactggtcttctgacatctctcctcctctgtggcaccctgcagagtctcccaggcctgaactccactatcattcttcccccgacaggctcagttcctagaattggaactggcaacttaagccttggtcttcatgctccttgaaggcagaggccacattttatttatatctgtatctcccacaatctttggcttataataagcattcaaatgtttgcatgaatcaatgaatctgtaaagcaaaagtatctgagacaggcctgaatttatttagaagtttatttggccaaggttaaggacatgccctggaagaggtttgtgactttctccaaagatgattttgagggcttcagtatttaaaagggaaaagcagactagaggggaaaaggcgaggatatggtagcattactgaatccacatgttgcaggataaaagaagcaggtagggaaatagtcaattaggtatacatctggcactcggtaaataagcattttacataaggtaagctgaacatagagtagctacctgtggagatatttaacttttaatctatagctatctgcttaggaataaaaggaaaagcagtttcttgcatgactcaacattcagcttaaccttttccttttgacatagtgagttggggtcctgagtttttgttttcctttcacagatctatggataaatgagcaaaccatgctcttccagggaatagaaggctctacctggttcatagtcattctacaaggcatctttctctgaaccacatctgtgccctgaggcagtgcctacaggtgtgagcctgcaggtgctttgaaatcagagggcaaacagggcatcttttcttttcttttcctttctttctttcttttttttttttttttttagactgagtcttgttctgtcaccaggctggagtgcagttgtgcaatctcggctcactgcaacctctgcctcccgtgttcaaacaattctcctgcctcagcctcccgagtagctgggactacagggcatcttttctaagcatcactttgcccttgggctttggaaagagactcctcagtggtcacagagttccctgtcatagtccagaagcagtgctcttatccacattccattcatacctgtaccttaagtggggtggctttcagcccatgtattgggatcttcagtcctgcagccccaatccccacaaccactgacatcagcagtaatgatggttccccaaaattgcttccctctttttcttgtcctaaaagagtaatgtgggtgtaacggcagtttctgggatccaactaagggtttctgttttagactgaatgtttgtgtccctccccccaaattcatatgttgaaatcgtaacgtccagtgtgatagtattatgaggtggggcctttgggagataattaggtcataagaatagagccctcatgaatgggattggtgcccttctgagagaccccagagagcagagagctctcttgctctttccaccatcttgtgaagataaaagaacttggccatctgcaagcctgaagggggcactcaccagatcctgaccatgctggcagcctggactgagacttccagcctccacaactgtgagaaataaatttctgttgtttataagccacccaggctatggtattttgtgatagcagcccaaactgactgagacagttcccatgctgtttctactactaactgtgcagccttcagttcagttaaaaatcctgtgctcagttttcccagccctaaactgagaataagaatgggatgtccttcatagagtcgctgtgacaattaagggagacaaagcacgtgaagtgcaagtgcatttcttgaggtatggcaagaggtaaacagaggttagggtgtcagctctagagttctcactttaatgtcaccaatgagtcataagattaggtccccaattcctccctataaaatgtacatatcatctctagtaggatgactcactattagggattttgttaagaccattgtaataatgagaactaagattttacttaaggaacacttactattaccaaacacaatgctaaatgtccgacctgcattatctaacttaataacctgagtaatccaagagatagctaccaagatgaaaaccaaaatgcctctttatgaccaagttttcagtgtcacaaaccatcacttctgctgaagaattacaatccttagaagcatgtcgccaggtccagcccatactaagaagaattaagctccacctcttgaagggaagaccatcaaagactttgtagacatgtgttttaaaccactacagatgtaagatatatttcttaccataggtcgtagcctaaaaagtttgaaagccactcctctgggtggtttatattatttaatttatcagataggaatcttagatccatagcatggtagagatagaggacccatagagttcatacagacttgtagaataggggttggcaaacattttctgtaaaggagcaattagtgaatatttgaggctttgcaggccacgtggtctgtgttgcaactactcagctctgcttttatagcacaaaagcagccatagacaatatgtaaacaaataggtgtgtctgtgttccgatacaactttacaaaaacaggccaggcacggtgtactcccagcactttgggaggccgacgtgggtgaatcacttgaggccaggagtttgagatcagcctggtcaacgtagcaaaaccccatttctactaaaaatacaaaaattagccgggtgtggtggcagatgcctgtaatcccagctactcaggaagctgaggcaggaaaatcactagaacctggaaggcggaggatgtagtaagccgagatgacaccactgcactccagcctgggcaacaaagcaaatctctgtctcaaaacaactttacaaaaacaggtcatcagccagatttgacccaggggcacattaatgaacaatgtttattaattctgactttacagtagactccaagggttttttacttaatgaccacgtctaggtcacacctcagttcacttagattagaatctctgggggtgagaacccaaatatcaatatttgttttaaagaaagttccttagtgatactaaagtgcagccagagctaagaagaaccacggacaccaggcacagtggctcacgccggtaatcccagcactttgggagactgaggcaggaggatcaattgagcccaggggttcaagatcagcctgggcaacatagtgagaccctgactctacaaaacagatttttaaaaagttagctggggaagctaagctatgaggatgcaaaggcatgagaatgatacgatggactttggggactcgggatagggtgggagaggggtgagggataaaagactacacatccggtacagtgtacaatgcttgggtgatgggtgtgccaaaatttcagaaatccccatgaaagaacttgttattcatgtaaccaaacaccacctgttccccaaaaacctactgaagtaaaaataaagtgcttgagccgtagtgacaaaaaacaaaattattatcagtcagaaattttttaaaaaatagctgggcatggtggtatgtgactgtagtcccagctacatgggaggctgaggcaggaggattgcttgagcccagaaagccaaggctgcagtgagcaatgatcatactactgcactccagcctgggtgacaaagcaagaccctgtctggaaaaaaaaaaaaaaaaaaaaaaaaaaaggaagtggggaggaaaggaaaggagaggaagaaggagaagaaggtgaaggagaaggaggaggaggaaaagaataagaaagagaagaaggagaagaacaagaagaagaataagaaccaccactaatgtgggagatgatgactctacttaaggaaattgaggtcccacagggcaaaagacgagccctgagtcacacccacattggtgtgcctggaccagctgatgtttaccagaaagatgcacctgagcaggtatttgcagacagaaactaagtgtaaagtgttgcctacacaaaacatcgtacctgggcaggccagggtcctgcacccctcatagaggggcttccagaagaactgtgtcacacatgaaacagtgggaagtaacttgagtgcaaagagacaagtgcaagtcctggatgcctcatgtagtaactttgggcaagtatattcagctcttcagttccctcttttctcattcatgaaacagtagcaaacattttagagcatttattgcatgaggcaatatgctaagtgctttatgatctctctctgaatgatactttctgtctctcaaccattacaagagacctaaggtgggtgatgctacagcatccattttaaagaagagggaagtaaggatcaaaatatttaagtaaaaggaacagtcagcagagtaaacagacagcccacagagagggagaaaatctttaccatctatacatctgacaaaggactaatatccagaatctacaaggaactcaaattagcaagaaagaaacaaccccatcaaaaagtgggctaaggatatgaatagacatttctcaaaagaagatatacaaatggccaacaaacatgaaaaaatactcgacatcactaatgattagagaaatgcaaatcaaaaccacaatgtgataccaccttattgctgcaagaatggccataatttaaaaattaaaaaaatagatgttggcatggatgtggtgaaaagagaagacttctacactactggtaggaatgtaaactagtgcaaccactacggaagccagtgtgcagattccttaaagaactaaaagtagatttagcatttgatccagcaatcccattcctggatatctatccagaggaaaagaaaccattatacaaaaaagacgcttgcacacgtatgtttatagcagcatgatccacaactgcaaaaatatggaaccagcccaaaagtccatcaatcaacaagtggataaataaattgtggtatatatatgatagaatgctactcagccataaaaaagaatgaattaatggcattctcagtaacctggatggaactggagactaagttactgaagtaacttaggaatggaaaaccaaacatcatatgctctcactcataagtgggagctaagctgtgaggatgcaaaggcataagaattacacaatggattttggggactcgggaaaggatggggagggggtgagggataaaagattatgaattgggttcagagtatactactcggctgaagggtacaccaaaattttacaaatcaccactaaagaacttactcatgtaaccaaacaccacgtgttccccaaaacctatggaaataggaaatgtaaaaactatatttaagtaatttgcccaagatcccatgagtgggttgattgaggcaagatttgcgctcaagtctttgtgtctccaaagccgatatatttgactgccttgctacatctctcagggttcttctaaggattgattcagataatttgtgaatatgtgttataaatattagggtactgtacatatgtcagcctttatcacagaaggtcaattttcacattccaggatatcaaggaggggtgctctagatatgctattgatcagaacatcctcatgtgcaaatgatcctattctggtcagccaatcctgtgtcccctaattgatgaggatgccttactggatcagtaagggccagtcaagaaacagaagccagtctgttatgtgaacagaggatcgaacatcaagaattgttagcaatatataaagtagttaactgggtaactacaaaggtaaaaggataactttaagatatcatataggcagcaatgacgggcagcagcccccatcccctagagttgaggaaacaaagggaataggttggaattatttaaacttagtttaagggagggtagaggcacacaaagaaaaaccagccctcagaggagagatgctgggcactgatgctggtgcctctgagctcagaggcagggccctatgggtctaatatgcagacttctgaggcagggatgcaatgaggtgcaaagagggtgtatctgcaagtattgacaatgtggcaaactggagttcactgctgctggggaaggcactgtggctgccagtggcagggggtttgcaggaatgtaaaagaagaaaccaggaaggagcaagtacctgttccctctcccaccctgcagctttccccatagcatcacttattggcagaacccagcaaggagcagctggcagagcagaagcctggtttgcagagtcctggccccaatgtcacccagccaaatacagggtttgtagctgagggagagtaacttaattagcggcccaggtcacctctttgactactgggcatccagacccacacttttatatgtaggggtcaaggcccttggccccctgaagtttccctgataactgacaaaaggcagattaatcgaagaaaagacatacaaatttatttaacgtgtatacgtgggagcgttcagaataaagacccaaccccctaaaagaggttcagaagcttatatactaacttgaagttgcagaaataatatgggctcagagcatggccaaaaacaggtttgggggccaggctggtggctcatgcctatagtcacagtggctcatgcctatagtcccagctactggagaggttgaggcaggatcattggagcccaggaggtcaaggatgtggtgagccatgatcatgccactgcattccagcctgggtgatagagtgagaccctgtctcaaaaacaaaacaaaacaaaaaagcaaccaaaacagttatggtggcaaattaggttttagtgacaagacaacttacaggaaggagaaaggaggaggcttggctagcaaaggtattcttgttatgtatcatagctgaaatttcacaggtaccaacccttagagaggatagtcaggtaaatgtttctttcagatctttaaggtgtcagactcagtttatctttcctagatatggataaagcctggccgtattaatgcagattctctatagatgcaaatttcccctacaacagacagctttgcagggccacttctgtttgctggctctctgtcagcgatctcaaaatatgtcaaataaatatatttgggggtaaaatatttttatttccttcatatgcatatttgaatttccatacaacagcaaaacaactgtcttctccttgtaagatgcaactatcctttgtacaattgagaaaacattctttccctaatcccaaaatcaggtcaaaaaatctcagcaatcatcacatctatctttgtgttctgttaattccttaaaagctgagttttctgttatctaaagactaaactgtaaatttaatctccaataaaactcatataatataatgagtggaaggaaaaactaagatgtggaaaccagcagagctcaaagttgcaggatgggaagacaatattctgtgaatgtcttaacagtgagagcagaccttcccacttccacccttgattgctgggcccgtgaattctgtggtgctggagaaaacagcaccatataattatctgattgatggcatctacttcattctgtaagacagagtcccatttttttagggtggtgtctcctaaccagcaatataactgagtcttcagtaaaccattctacctttaagttgggccatttcctttcagatactggggtatgggtaaggacctgttaattctatgggcagaagcctgttgctgcacttactttgctgtgaaataagttcctggatcagacataatgctgtcaaaatgctttgtcagtggatcaggcattctgtgagtccataaggtagtgctggtagaagcattgtacaccaagaaggcaaattcatttccagaatattacaatgaggactgatttctgtcccttctatgatggaaggggtctaatgtaattgatctgcccccaggtaactggctactcctccagggtatggtgccatattaaggactcagtgttggtctctgggtttgcctaactgtgctaactgaagtacaaagacaattaaaaagtttaaagtaaacaacattgacagtgatagaattagttaggacacccttaaataaatgcaccaataagataaataccttagagcatgatcaaaccaattatggcacagaattcagttaaacatagatttatctatgacctgatccaatggactttgataatcaaaataatgttattttcaccaggttattgttatcttaatattattgccatagagattttctaagagtgtcactaggcagtcagcagtggccttagctaggccagccttcgtgagaggaagtctgggttaagcccatgtgtagcttctatccctgccaccatggccactgagtacctaggcccattgagcgagcactggggtgaccagataaagaggcttattgacatcaacagaacatgtcactttgtcctcctgtcttgtgatatcctttgtgactgtggttgtcctttggtgagccttcatgcagaacacaaatgaaatgggttagaactgatgaacataaacttagcagataggatcatgaaacagaaagtgaagaaactcagagtttttattgttagctcatcctggtgatagacatgaaggaaaatagaattttttttttttttttttaagatggagtcccattctgtcacccaggctgtagtgcagtgatgcaatctcggctcactacaacctctgcctcctgggttcaagtgatcctcctgcctcagcctcctgagtagctgggactacgagcatgcgccagcatgcttggctaattttttttgtatttttggtacagacagagtttcaccatattgcccaggttggtctcgaactcctgacctcaagtgatccgcctgtctcagcctcccaaattacagatgtgagccactgctgggattacagatgtgagccactgcacctggcaaaaacaaaatttaaaatatgttcccatcaatttattcatcaaatatgtatcgagaacctgctctgtgtctggcttgaggctgggttctgtatacacaattgataagcatgacagatgctgtccctgtccttgtcatgtgtagcttacaacccagggtgagaagcaggccatttaaaagtgaaaaagtgaatacgcaaaataatcgtggctcatcagaaggactgtgaaggaaatgaacagagggagttacaaagagcaatgaggtgggggtgatgagcacttctggggatgaaatggtcagggaggacccctctaagaaagtggactgaagcagaggcctgaagggaggggcaggaacttgagtggaaattgggagggaccgaatgttcctgagagagggacgagaaattgtaagcagggctctgggatggggaaaaacttgacgccaagaaattggtaaacgattgaagaaaaaacaaccagtgaaggagagagtgcctcaagatgagaggtgatattagcgagctttgtagaggtcacatcatctactaagaggccatgatcattctagatacagatgagaagagacctggatggttttgaagtatgggcatgacatgaccttctttacataacaaagatgtcagctgtccctaaattaatctaaaattcaaactgatcctaatttaaaagcaccagcagtttctatttcattgctttaaaaacctaatttgggctgtgtattacaggagtgaagcatcaaagcagagagaccaggtagatggtattgttaccatcctggcaggtaatggtggtagcttggactaggttgatggcagtgagagttgaaaggaatggcatctttctaaaatatggctatagcggcagatttatgtttgtgataggccagtgagatgtaggcttatggatttccaaaagactggaataatatatgcataagttttatctcctgggccaacaaataggtttacctcctaagccaactgtcttcaaatggtagttgtggtgagcaattctgaggttcatgggaaagaatgcagatgaattagtgatgtctgctgctatgcaggaaaaaaaccgtactcataagtgtgcaaggcatttgctttctctggactaaatggttcctttcacctcagtgattcttatcctttgttgagcagaattaccttggaagtggggttaaaatgcagggactggcacttcatccttttgaaattttaatcaaaagctttggggtgagttctgggtagctatatatatctatatatatgtatatagatatatttttttaaacaaactccaaggcagttcagatgttgaccagtttgaggactgatctaaaataccatcatccatatttcaagagtttttgtaaagacagtggtgttgaaaatttcagatgatggatgctaagtgacaatgtttctgtaagaaaatcacatgcatctggagttataaatttatttcataagataagaccatattattatcaaaaaatcctatcttttttttcttcaacttttatttttagttcaggggtacatgtgcaggatgtgcaggtttgttccacaggtaaatgtgtgccatggtaatttgctgcacatcaacccatcaccaaggtattaagcccagcatcttttagctattctttctggtactcttcctcccctgaccatacaccgacaggccccagtgtgtgttgccctgctatgtgtccatgtgttctcatcattcagctcctgcttatgagtaagaacatgcaatgtttggttttctgttcctgctttagtttgctgaggataatggcttccaactccatccatgtccctgcaaatgacatgatctagttcctttttatggctgcctactatctctttattcactattttaactcaggaacctccaggaaaggaagcaccattactgactgctgttgaaagaatttttttttaagtaaaccttatttttcagagaagttttaggctacagcaaaattgagcagaaagtagagatcttctatattcctccttcccctacacagacacagcctcccctactaccaacatcccccaacagaatgatgcatttgtaacagttgatgagcctacactgatatatcattatcccccaaagtccatggtttacattagggttcgctcttggtttacattagggttctataggttttggcaaatacataatgacatgtctctaccatcatgacatgatatagagcagtttcgctgtcctaaaaaatcctctgttctctgccttttcatcactccctccccctcaatcactgacaaccaccgatcttttcagtctccgtaggtgcactttccagagtgtcatatagttgaaattacacagtgtgtagccttttcagattggctttcctcactcagcaacatgtaactaagcttcctcgacatcttttcaaggtttgatagctcacttctttttcatgctgaataatattctattgtctaaatgtaccacagtttgcccattctcctactaaggaatgtcttgtttgcttctaagttttagcaattacaaataaagctgctatgaatatctgtgtacaggtttgtgtgtggacataagctttgactcctttgggtaaataccaaggagtaaaaggaaacattgttgacatgtgttttcctttgtgtacaggtggatggacctttaagaaattctgtgagtaggcaggtgggttctctccctcacccctctgttagactcatgcagtaatccagcttaagcattaatttaggtttctggacagcaatcttaagatccaggacccagcaaggttggtgggtaccaagcagaatttggtgggcaggagtgtgcttcctaccatgccgcatggacacagggacagtccgggttctctttttaacttaacacagatgagaatggacctgctgcattgtattgacaagtcaggcactgacttccctgtggccttggaaagttacttagcctttccctatctagagcagggctcatgatctctaatgctgaaaaagttcacacaaacgagtgaagtgaacttgatataagaaaagtcaactgtattttccgtgacctacagcataagaacaaaacaatatgaccatgcatcatcttggagattatgatactctgtcataagaaaaacttgacaataagtcgcaacttttgttttccctctcagtatattgggaatggtggggactatggccaactggacagttaacatcccacttaacaggggcagctgccaatcagctccagctccagcattgttgacagatcttccagaaagggaagagaagccaaaaatttccattaaaaaaaatgtagattgcccagtacagtcaaacacacctttactccaaacatggtcgacatggtagctgcttgggactctagtccagagaagaatcagtacctctcacagctaaaatgcttattactcctttccagctttgcccagtgtccaacccaaactagtaatcattctgctgaacttgccatgggatctcctcaaacatactttgcttttcctgttttctcctgctagaacgccgccccccctcatctctcattgtcaccttttgaaatcttacccatcctcccatctcaggagctacttctttctagaagcttttccacttgcctcaaggagctattaacacattgtgtgaattgatttaacaaccagaaggaaaacctaaggctttgaaagattaggacaagggtctgataaatttcggttacttggcaggaagaaattctataatgtcaggtacatttgcatccaaagggttatacaaacatgtcgtccaaatacaatctaattttttatgccctacaacccccctccagagaatggtataaaaaaagactacattttataaagcagtgattcagttatcattcggggagccccaggacactggcattcaagtgaaagtcttggctaacacccaacctgtatttctagacatcagtttgcttctccttgcacacttttacagcagttggaggtcataacctcaagatggcatcctattctcttggcattatctcttgattatgtttacattacaattttaaagttcattgtgtatggtctctttagattcacatttcctcttataaggaaaatgtttataagccacctaaggtcataacaggaaaataaatggaatggaggaatgcattttttttttcagctcaggtacagcatggaaaaattaattgtgctgttctgcctagagaaaaacactttagtgcttgaaggaaatcaaatgtcagccattccttattcaacatgtgttcactgttagaactaagaaatttttctacgaataaatatcactaaaactcttgaaagctgtcaaatcacagcctagtaacaaaggaagtgaaaagaaacatcatttatcacgctgttattcctattcacacgctggaaagattttttttctgggactcatctggagaaaattgctgtcaatgtcaacttgaattgtcctcttcctcccttcccacattacccattgctgtaccatggatgccctgtggaaagtgggttacagtcttctgaatcccttctgccacccagacactctgagggctttatgatccattgtgagggttattagtgagaagggagagcaaggtgacactgagtgtctgaggatggcaagttcttagaggtcagcctgagaaaagccttttcaaaacttgaacatttccttataactttggcaacaagagatgatgacagactaggacaggaaggtatttaaagatggcaagagcaagaataaaatgaggctcttaactagctgggtgccttagaagagttggcaactggcagagcagatggaacactctatgtggaagttaagacctgagtttaaagcctgagtcttcctccaccttcctgtttgcagtggcacatagtaggcaccttaaaaatatctgatgacctgggtagtaatagcaaaacagtaacaacatctcctacttattgaccacttccagacaattcactagctataacaatgctattagagactgctattcccatcttagagatgagtaacaaaggctcacaaaactcacttagctccatggttctcagtagagaatattttgcccctaggggacatttgccaatgtctaggaatatttttggttagcatgacaggggaaagaaagctactggtttacattgggtagtggccaagtaggctgctaaacatcctacaatgaataggacaggccctgcaacgcagaactattcattccaaaatgctagtagtgctgcaatggaaaaagcttgattctcgattaactgatggaagcatattcttctaaccacagtgccttaccacctgaccagtataatatgattgagcacctagcaaagcacatgctcaataaatacttgttgaataaatgatgaaagggatttgaagaattgttttactttaggaatttttctttacctttctgggtctcaatttcctcagctgtaaaatgggttagtgacttttttcacttgcacctgcttcacagtattattacgcagtttaggtggtctaatatatttgaaagttctttattagttgtagaaaaagactgcataataagagctttttaccatagaagcaagcgttaagatagaagcaaaaaaaaaaaaaaaaaatgcgaagggaaccccggaagtagcaatgaaaactcaatacacaatgtttaaatttaaggataagatttcagtatacacaatagataatattagcagaaagaaaaagtactcatgataatcacccctgaaaactgaaaatcttcaagccaattcatcctggccctaagtccctggtaccctggggtctcacaaccttccctttctgattatttacttcctagtcatttaattaaaaacaacaaagtcctttcattggcagcagttaagtgctttttcttaggtcttattaacgttcactcaataaaatgcccctggctgttgatagaaattatttctacttgaatcaaatggcattttgcagtatttcttgccccatttgggactgtttcacaaattccctgaggtggtcatcgtgaacttacaaacctatgatctgatgttgaaggcagttttctttccttgattcgagtggtgaattttagccattttaaattgctgagtgacatcagccctccagaaaaacaagaacagatgggagggatttgccacccccgtgttgggccccctcaaccctgatctaagcaaacaagactgttgatccctcttgtcttccataacaaatctcctttcggtgttttgcccttggccataaaggaagaaacccatgcttgtggctgttcccaggctgttgctacagctgctgcagatgtgctacttggtggcagcccacagctgtcaccatcattgcaatcattttagtaagaactagcatgaggccagcaccttttgagcattactatgtggggaggaacaaaggatacatgtaataatgacaaattctctagtccctgatggcttaaaatacatttctgcctaactacccaatgcattctgggaaggctctgtaagcaaaagatgctatcaaaatgcataatgttaaataaaaggtcattttaaaatcctactgaaataaaaatgagttgggctttacttattatgagtcaccaatacaagacagacaaggtacattacgaaatatattccataaacaggacattcaaaaaggcaaaatcagaaagaatgggaatgacacacccttaagtacatgctattatgaaatatggggattatgttagcctttgcttgtctgcagatctgcagattgacaatatttttatcttatatcatcacttgtagtgtacattagctccatttctcccctctagccacaggacaaaaaagagaaaaacttcagaaattcaaggaaaataactttctagttcacatttagcatttaaatgtatttctattatttgggggccaaagacgcctttctgtccactgatgtcagctgacccattgacttcctcccctacctgactttctgaaagaactttaaatagatggggtttttaaattgttgttttccctctgcaggaagacatagatattttatgcctctgaagtgttataatacatagagaaaacgaaaatgttcttctgtttgctaaaacatgcagggttttttgtttgtttgtttgctcactggaatatagttaacttattttcttagcctcattcttcgtaattgtcttgcttaaaaatttgtttaattgacacataataatcgtacatatttatgggttacatagtgacgttttgatatatgcaatgtatggtggtcagatcaaggtaattagtatgtccatcatctcagattttatttctttgtgttgggaaacatttattatcctcctcctagctatttgaaactatataatatattgttaattatagccatcctatagtgctataaaacaggggtccctaacccccaggccacagtcaggtaccaggcattactgcctgagctccacctcctgtcagatcagtggcagaattagattctcataggagcgcaaaccctactgtgaaccgcacatgcgagggatctaggttgtgtgttccttatgagaatctaatgcctgatgatgtgaggtggannnnnnnnnnnnnnnnnnnnatgaaagatgctctactatgtcataaatgaagtacaaattaaaacaatgaaataacaccacatatacattagaatggccattatttggaacactaacaccacaaaatgctggtaagaatgtagagcaacaggaactcttattgctgatggaaatgtaaaatgacatatagtcactttgcggaagagttttctcttttgttttttgttattttgttttacaaaactaaacacactcttactatataatccagcaattgggatccttgttgtttacccaaggagttaaaatcttatgttcatacaataacatgcacacagatgtttagagcagctttatttataatttccaaaatttggaaacaatgaaggcatcactcagtaggtaaattaatagataaactttggtatatccagacaagaaaacattactaaacactaaaaaaaaaaaaactcaagccgtgaaaaacataaaggcaccataattgtatattagaaagtacaaaagccaatctgaaaaggcttcatactgtaagattctgactatgatattctagaaaagctacggagacagtaaaaatattagtggtttacagtaatttaggggagggagaaatcaataggtaaaccaccaaggagttttagagcagtgaacatattctatgtgatactataatcatgaatacattaatttaaaaacattatacattcttaaatctataaaagatataccaaatgtgagccctactgtaaactattgacttggggtgactataatgtgccaatggaggttcatcaattatagcaaatgtatcagtttattgaggaatgttggtaaccacagaggctatacgtgcctaggggtagataaaaactttgtatatccccccaaccaatccccccacccccccgatgaaaaaattatcttccacgaagtttggtccctggtgccaaaaatgttggggaccgctgctataaaacactagaagttatttctcctatctagctgtaattttgtatcctttttttcttgactccaccactttctagctatataaataagtcacttcacattctggacttcagtttattaaactccaaactgaaacgttaggattagtctgtttttaaggtccctctctcttctaaacattaacattattatcaccagtttttttatttatatggcacgtttatacttcaccaaacacttccatataaactctatgcattgtttctttgattatagattccttaatcttgatcacttgtgtcaggaatgtctacctgtttgtgtgccttagtgggtgttaccaggccagctaggaactcaaaattttgtttttgctcaatttcagtaagtttccttagttgaagtttttgagtgaaatcaccactccgttttcatctaattcagagatctgttgcactgtgccttgtttgcttttgtggaagcaaagtaggtgtgttgtgaattacaaaagttatcaaatgggtgaatcccttactatctttcattgatagcgacttttcaactctatgaaatcaaagtagtaaaatcagtctactttgattgtgagctataagttcagggacagagtttccctcaaaatgagctgcataatcttaacctgccatagggttttcttacagttcctttcacttctatcaagaagagagaattctcctccagcatctttctcagaagagtctgaaagcccctttcccagaaactgtctagtaaatgtcgtcttgcatctgattggtgcatgtactttgtactaaagtatcctgtccctaattccattactctgaccaggtgcatagaatctgctgaatgtcttaaaccagggaagacactcacctagaactgaggatgggttgagctttccccaaagtgtgtagaccactgaggaaatggtggatgtggattgaaatttaggatatttttacaaaggaaaatgaagagaaggatgtttagttgaatcttgggtatgccctttactcgggcaagtcacttaaactccctaaccattaatgttctcatctgaattgaggataaaaatctttctttccccagtaacagtgagtacatccagtgtccacatcttagtttgcaatatccttctcccataaaaagagccagggctccttgtttgaaatggctgattctacggctggggtaggcaatacacaagctgagcctggatcatcattagagccaaaaagttgaaaagtgctccaaaaaatccccccaaatgatggacatatgtcaaggggaactgggagccaacagaaagaattttcaatgcccaaatttgagcaagaaattaaataatatactgagttataactcaaaatataaaataaactttcctaagtccatactgtaataaataattggatgaattaataaattaggaaggagacagaaatggaaaacatatttcccatccaaaagaattccaaataacttaaatagatacaccccaaagacgtggagcaaaacttgccctgtaagtttggactccatgtagtaacttacttcaaagaaagcagtatagagtgggaggagagaaaaagtaactgtacagtaaagaaatctggaaacctttgccttagccaggtgatcaggtttgctatcagtgagaagtcatgttgacagcatatacctttgatatgacatattgagaatggctcttcgcttctgtagtcttcatcccccaaacccataaataaacctatccatgagaaaaactctagacaaacccaaatcaagggacattccacaaaatacctgaccagtactcaaaactgtcaaggtcatcaaatgcaaagaaagtctgagaaaatgtcacagcccaaggagtctgagacctgatagcaaaatgtaatgtagtgtccttaatgggatactggaacagagaaaggatgctgggaaaaaatctaatgaggtccaaataaattaagaactttagttaataatgaagtatcaatgtttgttcatatgttttgacaaatgtgccatggtaacatgagatgttaacaagaagggttgctgggtgtgggatagacaggaacattctgtactatctttgctacttttctgtaaatctaaaatgattccaaaacagctgatttaatacaaaaaagaacctttcttacagaattgtaatcacaaacgagcctttgtatgctataaagtgcctagcctatgcatggtaggcacttggtatatttagtcggtttggccaccattggcaatagctgtattcacccttaacccttccaatccatcctctgtgtgagccagaatgatgtttatgtaatgctcatctgaacttctcatccctcctcccaatatgtctcaccctaatctctagctttaaatttttcaatgacgtcttattgcttctagcatgttcatagagacgcttagctttcccatgatctacaagaccccacacacaacttggccctgcctgccttcccagaccatccccattttactctcctcctcacccttactccagccacactgacctgcttccaacatttcctctggccacaggccattgagacatgctatttctgtctgaaatgctcttcacttctctttgcctggttaacttctacttatctttagttcctaattcaagagctgctaggccagagttctttcacataatcttgttttcatcctttgcagcagttatctcttggtaagtttacattaatgtacatggttatttgattaatgtttgcattcctccctagattatcaattccatgaggaaaaaacagtttctttatactcttcattgtattcttaggacctgtaccttttctggagcagtctatgcttaataaacatttggagaaaaaagggaaaggagaaggaaggaaagaagaaactgcctctggtaccatcctttttagaaactggttattttccagagatccagatctcttaaataaggattttgcaatgttaaactagtttcctaacctctcagctttcaattctgttcagtagcaaagtgagagaaagtattcaaatggactagtttgaaaatcctgtcactcactgaacactagcgatttcacagatgatttctgaagcactcaaatttagagtgggaagaaagtccttgcagaaggtgtacacaaggcagtcatgagtagttagcatctctagtgctttttgggcttccttgcaagaactcccaattaagctccagtccattctggcattttctggtcatttagtgattcactgcttcctaggggtgtagattccctgtgctaaagtagaataaacagtgaaaaaaatagctcctgcacttatccttaatttccaaaaaaagtggagttctttctttgattccagaaatacttgtattgtggtacagccacaaaatctgtgaactgtgaagtaggattccaattacttaagaaggaaggctctacctttccaaattgtctctgtcccttgtgctgccaaaaattgctcactagcatttcctctgattattttcttactgcctttgaatttcttagttaataagacagcccgacaataaatacttcgtaatgcatcaacagatacagacacaatgtctcttctgccatgattttcctccaaatgaggtcctctggagaacaaaaggcctgaattgccatttttctccctcagttttcatccacacccagcaccctttattttcccctacctgttacagaagtcagtctgaaatgaaatgtagaataaagtggaggaatcttggggatgatgtagatgtgttatagtcatcgagtcagtgactggagaacctgagcttttcaaaatgacactctgtaacaaggcccctgagggactgcattacatgggaatccagtgtaggtttttgttcatgtagacgtgtcaaacaacaaaaatcttgcccaccatttatttcattcttcagggcctatgaagatcaggagagaagccagctatagtttctgccctcagaagtttctagtcttgtaggaggattagatgtgtacgcaaataataacatcaagatagaacaaagtgagggccagtggaagggcaatagaaggaagatccattttcttctttctttccactaatactgtttattgaaactttaacacaggccaggccctgtgccagtctctaaggttatgatgttgagcaaaagccatggaactcataccctaatggagaaacagaggtcagtcaggtgaccacaccaacagatatacaattacaaactaacctgggttctgtgatggagagggcatagttttttcaaagtctttgagaagagtctttgagagacaggctgtggtgaaaaacctgccctagggcagaaggatggcaggtgctaacttagggaagagtaggggaggagtctgttagacagggcaacagcacatctgaggtgggttctgaagccaggagatcctagtcatgcacagatgtgttcccagccaagaaaactgtgtcagcaaagacagggaagggaaatgcatggagcagggtcggggaatcaccaaatggtcaattcagcaggatcacagggaacatggcgggagtggaggctggaaaggtgggcactgagcccagaccatgaagaaccaggatatgtcctcatcatttctaaagattgcctcatggaatccacatggtttcagaacctctcagggctgtagtgtaggaatgagcctctaaactcccagcacaagcaccaccaatattgtcactatttctcacagagaaattcttggtttcatagttttgtattatgagcatctgggtggtactttcatttttaaaagagctacactgattttttaaaaattgaaaatcatcttcatggacagtgggagacaggaccagatgtgtgctttagatcaatctgcggcagcggaagatagagaggagggagggagacaagttgagccactatcacagcagtccaggggagacatgtcaaggtgctgaagtaaggaagaaataggtaatgaagagaaagacacaaacgtatggagagctgccagacagaggaggacaggagagcatttggcaaatgattagatgtgtgtgacaatgagagaataaagtcaaggagatgctgaggtttcaggcctaaatgcctggaagagccaaagccatttataacaatagataattctgcttgaggacagcttggggtagggtgggccaatgtgttcacttcatctgtatggtttcactgattcctcataccagcccaaagaggaaggcgctgtgcttatccccatttttcagaaaaggaaattaggcttatagacatgaagccactctttcaatctcagaatttccaaatggctgactcaacttggctcttagccactgtgcattatgtctcacctggacaatttctgcagctgctccacctttttttccttgcctactctccgtcttccactgccccaagagtaatccagaacacaaacctgattacggtgctcccttcctaagtaacctttagtggctccccatagcctgtagaggtagttttcttttttaaaagttgtgtaacagtttttttagaaggaaagtttatggaaggatctttatataaattataattaatttatcaatgattctgcatccagtggaggacaaatatgacacagctttatttttttccagtttttaccttcagcattgctgtgccagaactccctcttccatctaatgactccttgtatagacttcttagctttccagtcgctttcaaaaacccagtctcatttacaatgtcaattttatatccaacttaaagctcataacctccctgcctcttctgtgactagcttttccagggtcaatgcagggagttgaaaagtcttgggcagtgctgacggggaaaggcaaagttcattttacttagttgggctggtgagtgcaatctcctctccagttatttcactacctctccattggtcccactgtgtggtggcagctaagtgctggtgctctcatgagagacatggatgagttacttgggagcccatcagtgggagctgctactcttagggagatcttcatcagcttcctgtcttccaaccacacataagctcccatctctgggacttcatcctagagcttcctatagccgggactataggaagtatctggaccagcatctggaccagcatctctctggaccagcatccacctctaggatgaagctccagtaagatggccctagttcacctataataccttcctcagtgtgcgtttaacctgtaagaaacccacacaactttgacacatcaaatagtggcagtagaaatatagccacaagtaccccactccagcgggctgtctccctccaattctttgtgttttagatctgctcaactagacacaaggcaggtcaaccagctggctgcaaagcagactttcaacagaaccatgaaaacaagatgctcactttttttcaggaattccaatctctaaaggttattttcttggtggaaagcagcaggaagcaccacaggtggggtaaagaaaagctacagcaatctcttttctcaggctaatgccttgggaaccctgaggggtttctttttctttctaaccagtccctcgcctctcctttcgctgttttcttctcatatacaactggtgaggaaagtcattggaatgatgactggggatagtagggctaggttggacaccttttaataagccctggagggtatgaatgttccaccaaaatttatgtctccaattcctgaacaccaggaagaatcccattcaacactctgctgcagaagtttccttaggtcaacatggtttctcttttgcagttttgttcatgtaaaacttgtatgtaataataggcatgcatttaggcttaaaacatttttagcagggaaagaatgctataaatctggggcccagaaatctcaacttctccctcacttatcagggaagagaaactggcttaagatgttcttctgtaaaatgaattcattgcagtttcttccttctgtacaagataagtgtggtttctcattccagtggaaaaaaaaaattcctgagaaacacagatgttagaatcaagcattaattttttcttccttatgaaatagtgacattagcaaacctaaaaacttaactaaaaatggaatttagtgagaaaggagggcaatatattttgccttactggaaaaagaatggggattttctacttttatcttaaagtgaagtaaataatgagatagtatgattgccttctagaaacctcctcattgtgcctatttctaccccacccccagattttctgcatctcttattctgattcggctctgtgcagcatctcaggcttttaaatcaaggagaggggattgtgtgtttgcatgaccctttccctgcaagcaacaggttgaaggtgtggtttgtgagtgtgtcaggatcagcagccttgtgacagagtgttagaagatagtgaatgcttccagtcactctattgcagctgtctcctggaacaaggaggcttgcaacataaatatgcatacaacacaggggtcagcaagaccccagttgtttaacccctgtgtaagatattacacacctcagtgagaaaaaaccccaaagcactccaaagcagaattccggaaatacctgtctggattgttcttgcaaacctggtgccttcttgaacaaattttttcaccacatatgaactgtcaaaattctcattcttatctcttttcttcctcaaattattttagatcttagcccagctggtaatactgggaagggtttaacagttagaggattaacattatgaagttaagcctccattgtcagtttaataatattctctttgcccccataatcaaatgttgtcagggcaaacatcttactttcctgagatcagcatttacagcagggtttctcagcctcagcaccaatgacattttaagctggataattccttgttgcaggggctgtcttgtgcattgtatggtgttgaacagcaccccaggcctctacccactattggcagtggcacctctcaccctccattgtgacaacgaaaaatgtctctagactttaccaaacatttcctagggacaaaattgctcccccttccctatccaagtaataactactgagaacttatagagatcatagaattttgtcagaaaaatcccaatctgagctagtgtcaaatctaaacctttgtgggtttttctggttttttggtttttttgctgttgttgttgttttggttttttgtttttggtgctagtggtgaggaggaaggtgaagagactggttgggggagacttgacccttttgtcttataaattgtgatggctaatgtcacagtttatgaagactatttcctgaatttctgcagctttgcttctctgataataaactgaaggttgccatgaaattaatcactctagaggggtttgcagagggaggtatagctccaacccttggctgttctcccgtgttggccagtataaattgccagtgcctgttggtttagagattaattattaatgataaggaagcttatgaatttttcagaattttctcctcttagggtgcatgtctgacttcctatcaggagcataagatcccttccatccttcctgcatcaaagccccaggctgtcacccagggcgctatcttgttccatgcaggctggctgcatgtgttgactctaaattttttaatcagccattttccaacacaactgcacatgtcaggctgtagagacagaatctattaagcacggtcagaaaccagcaggggccttgtggcatcatgatttgatatctctatggcagaatttcacaataaaaaattcacaggagtacacagtttgctgaaatgtcaccaaaacgcctgcaggacttaaaaggaggtgaaacaccatcaacaccgacaataataatctctgaacagtcctttcaacttctggaagaattttcacaactatttaggtatctgattttccccaaaccctgtacttttagatcacccacttatttttatgaaataaaatgaataggtagctgatcctgtcatccttaatcaactgagtcgataatgatgaccattacaggttgaatgataaaagcatagataatttttcaattttaaaaaatcgcatagaccatgttaggatattgacagttccctgttacatggaggatgaaatatttatagacaatcactcaacaaatatatattgaacacctcttttgtgtcaggaacttgctgagatattaacctgaaaatcatttgggtttcacttcatcttaaagccatttcttaaaaatgtatttttccactctcttaccttacaatacaacaagcatcttgttgaaaggcatcattttacaaatcaattctgtgtctaggaatgttagcataaaagggcagagtattgatctgatatatatatttggtattgctttttaaaaacacaattgccatcattgtacatttacttttttgtgaaagtaagttccttttgtaaaagtggttacttaaggttcctgcatacgtttttgttccttctgagattttacagtaattggggaggattttacagtaattggggaggagaggagggatttgccataatcactacagaatgttttctctgaagaccctaaaaagcattttcttagcttttgcaaatatgaaagggcaacataagcaggtgaactacctaatcttaaaaacagtttcacagaggattagcctggtgtctggattacaaatacaatttcaagagataagaagtcatctgtcttcatggtggtttaccatttaaagtgtttctcaggctgggaacttgtaggtacattagaagtaaattagattacgagaccctagggccatcttaatttgaacttcccagtgctgaatttgtgtattgcagccaatattgttttaatttatactggttaaaatactgcttatttgcaggtttctctctcagaggagattactactttcttctatttccctcctctaagccaaggtcatatttgcctttcacaatgcaaattaaattatgttacaccatgttcacttgagttaatttaaactcaagctaagtttaaattagttgtagaagtgtccacataggccaggtaaactagagaatcaagcaatttctagatattcaaatagagtctatattttaagcactttaaccaaaatctacaatcttttttgaggcagacacactaatgcttataaaatattttatgtattttttttttcattttctaactttctttgcagctaggttagggccacaagattagtttcagcaaactggctttcagtcctccatgttctattttccctgtcacactgagcctgaaagctacatgttgaggtagcagagtcacaaaatggtggtgcttccatgtgcttggatccctgagtaattctgtggaagagagtcccccataattggcactgggtaagtagagtaagcaagaaataaatggttattgtgttaagcaactgagatttcaaggttaacttcttaccatggaataaattaacctatcctaattaattttcctttttaaatttatttttcaatatttattttgttttcagtacaacacatgattatccttgcttatgattgacatgggattatggacctcagcttcaccaaacatacaaaatctacttccaacttcttgaatatagtgagagtaggcatctatatagtccaacaaataagaactgtctcatgtgttaaagtagatgatacccctgatacctttgtgcatttgcacacaatgcagtatattataagcaggacatacttgataaatgccaataatgtaattttgggttttttagttcgttctttttctcccatctgttggagaatttggccgcttactctttttaataccacctcctcttcttaggcacagttacttttaaaagaactaataaaaaaaactacttggttatggatttgatactgggaacaaactgtttctttgacaggtcttaatcaagatgaaactcacccttttaaaatatttttgactttgaacaatggcaaccccatggtagacaaactcttcagagcaggcaaaatgagataatgatacatgtaggtagacttatgaatagacccagtttccaccaggtactgtttaatgatcagcctgggactggaaattaagcacatcttatatttgtgacatgttgctcaaaggaaacagtggtgcatgtgacagttctcaagtaccctggaaaggttttaatttaattaattcacctcagttttaattgacatgggcagctctgtgatttacagatctgaatgttttttactacttgagctttcttacacacgtgcacatatatacacaccactcacatgcatgcacgtacacattcacaaaagccacaattgcagaagctggaaaactcaatttccttttgaccttgtgaataattttataccatgctatcagtgtttgaaaatgaggttcacttcttcttaaaataaagagcaggtattttttagcaaaagcattcgatttgattagaggtattttaaacatcactggatgtttttctggacttcctgttgagctcattattttgccatttataaaatgctttttaccatgacttgatgctgcttaaagagcaagattatttaacagtacaaaaaggcatttcatttcccataatgtttatgtcaaaatctccagagaatataatcacctctggcttgttttgaaaaagtgaccatttcccatcaaatcagctgcccaaactaaatttcagaaattagtaaaaactaaattgaaaaacgaatggcaatgaaaataattatttaaatatatgcaatgttttactagttttgaaaaatataactcttctttttgttgaaataattctgaaagttatcaagttatgtatttatcctgctctcacagttcataacataatgcctgaaacaaggcaagtgtttagtgaatatttttaaatggttagttgaatactaatatttctaatttccagatgaggaagcagagactcccagagtttaattggttcacacctctattattcccaccactttagtcagttattctctgtcctttctgcacttaaatactcactttcatttactcattcaacagaatttaataagtttaaaccatttgcattcagatttctatttaggtcatgatttgagcacctattaagtgtcagacaccacactaagtgcctggaaaaacatcaccttaactcctcaaaacatccctgccacatagatgttattatctctatctcaaatttaactctgcaaatatttcttactcccttaccatacatcagtcattggctatttttataatgaacaagacagacaaggtctttgccaaaggcacttacagtcttgcacagaacatgccaagaagcaaatcacacaaatgtgatgggagtgataaaagaggaggttcaggatgttagggtggcctagaagaggtgaccttggctgagaccaagaaggcccctaaggtagcaatattgatactaggctttgggttaatgatttactgttaaccagacaaagatgacagagggccaggtgcagtggctcacatctgtaatcccagccctctaggaggcccctgtgggagtttgaggctaggggttcaagaccagcctgggcaacgtagcatgaccccgtctctacgaaaaatacaaaaatcagctgggcatgatgatgcctgtagtcccagctagtcaggaggctgtggtggaagaatcacttcagcccaggaggtcaaggctgcagtgagctatgatctcaacattgcattccagcctagacaacaaagaaagaccctgtctcagggggaaaagaatgatgacagaagaggaaagagaattcacattgaccaggggccaagcaagagtatgtcatgttcgtgaacctagaagtacagaatggtctgagcgtagagaacaagacagagtggtgggagatgaggctggaaagctgtgcaggagccagatggcaacagctctcaacgccttgataagggtctcaggctcttactaccaagggaagtggaacgttattgacaggtcttaagcaggagagtaacatgagcaaatgcacgttccaaaaagatgagcagcctgccttgcaaagcctgagttaaattcgtacttcatggcgtgtggttttgcagcatcagcaccacccaggagatgtttagaaggatgaattcttggttgtcacctcaagcctgctgaatcaaaactgtcccagggtgaggcccaggactctgtgttttaacaagttctctggttgatttttatgggcaccaaagtttgagaaccactggattttaatagaggttttcaatcctggctgcacgttggaatcactcggagggtttaaaaaaaattggctgggtgtggtggctcacacctgtaatcccagcactttgagaggctgaggtgggtggatcacgaggtcaagagatcgagaccatccgggccaacatggtgaaaccccgtctctactaaaaataaaaaaaattaaaataaattaaaaaattagtcaggcgtggtggcatgcacctgtagtcccagcttcttgggaggctgaggcaggataatcactttaacttgggaggtggaggttgcagttagctgagatcacgccactggcactccagcctggcgacagagcaagactctgtctcaaaaaacaaacaaacagaaaatactgctgcctgagccccaacccggaatatcatatttatttggtccaggtgcagcctcaacattaggattgccttttatctctctctggggattcaaatatgcagccaggagggagaactgctttgtatcagagggaagcaagagaggatgaatatgaaatcggtggttgaggatggagatgatgggagcctggcttagggaagtggatacacagcatagaaggattcaagagatatttaggaggtgactgcacagctagcaagggatagaccaggcctagtcccctgtatttttcttcacaaaaccgcctgcttcctctatacccttggttttggctgccacacttacacagaaagacaacacccactctcttctttgaatggcttcagttccttgtgtcttcaggatagtgcaggtgaattggacagtctcccagccccagatataaagattattaagataatccattaaaaaaaaaacacagctgtatcctctatgctggataaaaaacatagtctctggcctcaatagtaatacattatggccttaaccttgcaacccctcatatttgggacatgatgctaagtgctttatgagtaccatcttctttcgttttcataacaagcctctgctgttggcattgttactgttaggactcccactttgcaaataagggcacagacagaggcagcttagtagattgtccaatgtcagggagctggaaagtggcagagcaaggatgtgaagccagatctgactgtttccagctcctgggtctctgactaccatgcgctatgactgctctggggtggaagagagagctaaggcacagggcacatagaaagcttgctagcaattcctataaaagtgggttgatgcctggctaaagtaatcaaggagggcttcttgaagaaaggcctgaagccaaattctgaatgacacatcagacttgaaatggtagaaaggaaaagaagaggggaggtcatttcaggactgcggggaagatggggaaagactggttgagcactacaggatcataaagaactggattggttttctgtttgggtttttttttaatgtatttattggctgcttgttcagaaaattgctgcatttggagctcttgggttatatttactgcattgccagaagccagcaaagacataaaactggtgactcaaatacagcagggttctcattggctggcaaaacctgggagctaaaccctgcattttgcaatcaagaagtacatcattcagaatggaaactttgacctacccaaggtcttctcttgcaaaggaaataaggcatgataaagaaagacacaaatgatcttattttaactcttccacagattaggtagtatcatctccttggatgattttttgtaacaacagaatgtaattgactgcatgggagaccgaactccatgttctttctacaaataaccctgaaacagagcccttagtgaagactcggatggatggcaaggctgcagatttcatcagagtctcttccagtaataatagtagagttatatacacctacaatgtgttgaacccctgctgtctgagaatatttattgtcatcattacaatagtcctttgaggttattttagtgcagcagctatagatgctccgagaggttaagcatctggccctgatcatacagtgaatatgtgtcacaggcagcattagatctcaaggttttctgattccgaaatccatgatttttttcctaaggattattccctctatctcgagctaattatctctgaaactacaggcaaactacttaaccttttaaagcttggtttcttacccaaaaggggaggaaatctgctatactactttaagtgctgcagaatcagaacttctgtaagggagaatatatgcaggctatggaatgccaaggactaatggctgctaagatttactgaacgtgactgcatgccaagcactttgctaattgtcatatgcatccatcttatttaatctcttatcgatcctatgaggtaggtattatcattattgttcccaatttagagttaaaagagttgaaaaaaataaaagctagggctcagagaggtccaatcactttcctaggattgctcagctttaaagtggaaaggcaaagatttgaacttggacagtggagtgggggcacctgctgaccgtgttctacaggctctacatttaaggtggacacacaagagacaggctttaggaaatgagaggaaggaatttggaggcagtaaccaggtcttgaatgcggcaaaaacagccacagttcaaaccccagtgcagtcttgtggcaggagcttgggcacccccatctcctggttgggaactgacactgtcccagctgtaactttccagactgcagtgcaccaggaaggcagcatttgctggagcagcttgtctctgaaggaggataaaaaaacatggggctgtggaggaaaggagggccctgccagctgatgggagtgctttatggggaggtgcctccaccctcctctgcagtggctcttggcagcctccatctcagacactaatctctgggaacccagggggcacactgggaagtagagagaaagcaaagtagcgagaaaacaagctaaacccaggtcagcaggtggcttgcactgcagctgcttatagagacccctgtctccatccccaattcccagaataaggaacgctttaatcaggaaagagactgattataggccagcaaagttcagtctttaccgatttctgcagagaatggcacttgctggaacacagccactaggcagcaagacagagcaaactagaagttagctgattgggaatttggtcccagccctcactgatcgttgtgcgactgtgggtaggtcattcctttttgggtcacagctgattaactcagtcctgtagctagtcaggcagtcattttattcatctgccaggcatttacccagagcccactctgtatttgccgctgtaatgtacaagtagcacctacgtaagtaggtgccagggatccagagataagcaaaataacacccatccctgcccttatggagcttacagcctagtaggcaaacaccaaatcacataagtacctgtaaattaatggtgatatatgttagtaagggaaaggaaaggtgcatcattataaggagagacaggagaaattcacaaatctggagaacagagcagagttgctgcaaagctgaaggatgaaggataagaaagggttaccagtcaagggagagataaggaagagtgctccaggcatgaggaacagcctgtgcaaaaacctggcagcaggagaaagctagccctcccaaaagcctgagtgaagtatccagtggagcatactgggggaggatgtggtgcccgacaaggctgcagagctcagcagggggccacaccattagtctgaggttactacattatccctgaaactccttccagccagtctggatcactatcactttagtcctgaggctgaagttggttcatttactctgaagctcagaaccataggtttttccagaaagcagaacaattattcaaataatgcataaagtaatctgcctatttctgtttacattttctgtgtatttgaatcacatcctctctttggttgactgaaggctgcctcttggcagcgacactgatgactttggaagagtctagggttgaagttgcctccttatcatcgttagtgcatgagcaccagaaaattcaggcatgcccaggggtagctggtacccaagggtgtctcccaggcgcactgtcaaggccaattctccaaggcctctgaagctaatgaggaggctccaggcccaggccctttgacaatttcttcatccccctagaggtcagacagggcattcccaggtgtgaatcattttgctgatacgtagacctatttgcatagtgggattgcttcctccctgtctccccccacccccaaaattctgtctgcagacgtgagaaaaatgaagcacacaggaaaattgcctaggtgagcacatcccagaatgtgttcctgggaacacatgatcaggtacatttgggaatgtggggctgcatgaggttgccttggtgtaggatttcttgctcatgtgtgttgtgtgtctccagaaatgggatagagtgagtttccagactttatttgatcacagaatcctttcccatcgaggatctagagaacctgcaggactgatattccctagaatataactttgggaaataccagtctaggcttttcagataatcctgaaacacaatagctgaaatcttgtcatttctctcagatgaagggactgtgcaccgagaggtcacgactttggctcaagatcccacagctaaaggcaaactaaggatcagaacacaggttcctaacattcattccagggtcccagggttccccaccctggtctgatttctttcatatatcctaaaggcagggaggagaattaacatctggtgactccccattctaaaataggggataactctataaactttgctaaactataggacctctatgtgccaacacctacctcactgggtgctttgaatgtatatcatctgacttaatcctcataacatgccagggtaggtatcttatcccagttttacagataaggaaactgaggttcagaaagattcgattgcttgttcactctgtgtcagtaaggaaatggcaaaaaaaaaaaaaaaaacaagattggaaccaagtcggtctgacttcccttggacaatgcagcacattttgtcattttgtcctttcaaatagctatgcaagataaaatgatgtccactctgcagatgcagaaactgaggcatggtgaggttaagaaacttgacaaggttgcaagggtgcaactccaccctgctatatctcaagcctgtgtttaaattggccctacagtaacaggacagagttttcatctctgcattgacggaaagagtaccacccatgagctagagacaattgtctctggtggacttgaactgatggctcaggcaatacctgtctacacttacacagtgctgggcttagttctccatcactttaaaggaaaagcccaaggaattattttcctctacttgactgacaagtcaaaacaaccacacagcctctgcttgacctcttctagtaggaagattatttgtctaattaggtaaagagcctttatgcgcatgtacatttttgaaccctaatgagctgccaacgtgaaaggcttgcccttggcttggttctccagctgatctttcctttcctcagtggaaaagaccagcgcaataaacagaaccttgtttccatggaagctcactctcttgctttttctttccagcccttgaaaaggtaattacttgatttctctttatattttgggatttcatagagtggagctgtcaagctcctcacgcgaggatggccttctctatcatgccaagctattttagggagcttcagttgcatttcccttttcatcctctcttcagatcattagctgtcaggcagcagtggccgccttctggtcactcccgctaattaaagtctaacagagcaaggggactcgaccccagagaaagtgggagacagaaaagccagggaaatttgtcaagagatgggagcctctgatcacatcatttctgctgcacagactgtcagaccgacaccctacattcacgccagtgagggacactgtcccatctggtgccttctcttctgaacctttgacgccccactgtggcccatgtcagaaatgcagccaacatggactgctctaaaataacaacacaaggagcagcagccaccattcatgagggtttgctgcatgccaagccatggactaagccctttatatccgttgtctccgttgattctcatgacaacctcaggtctcattaacctgattatttagatgagaagagctggagcacagagaggttaagtaacttgcccaaggtcacacagctactaagtggcacaaccaggataaggacacacccattgctattatttcttagggaggaatccagcactgctacagcctccccaaaagaaatcagtcatgacaagtgacagagggttgacatttctctgtccccagtggtggctctatggatcaaactggcccgtgtctacaaggaacaaagtgaggttgctgagctagttaactgtcaggatcaattagaaaaccaaacaaggcacttaagtatgaagccaacataatgcagagcaaaagagttccagtttgaggcagagcagacttggtttcaggtgactagtaccactttaccagaagtgtgatttggggcatgttcctctaccttaccaagactcagtttccacatccgtcaaatggggataatgataccaaccttacaaagttgtttcacatgtggaattttccaaactgctctgtgatttttggtggaataattgtgtaaaagacaaggttaaatgcagttaaaaacaattatttactctagaatttctccaagtcttgattatgttgacatattacaaattttcaagaggaatcatcaattcctcaccccagaatcctttttcctgtgtgaatgcacattagcctctgtttcttgggaccctttagaaaaggctgtaaaacaggtcatagggtatttggtgtttggtacaggcatcaataaatgctaatcctttcttctttatgcccaaatcatgcctgttcttgctggatttaagctccatggagtcagggacttgttcctttcttattccaatatcttgacatatcaagatattccataaaaatttaatgaatgaatgagtaaattagtgaagtaatgaataaaagaataaattaagcttaatgtagaccttgcctactcatcttcattgccagcattttctgctgtttccagttgccttctatgaagccagtgggagaacccaaatgcctctggaaaatttagtaatggagctggttctgttgggctgtattttcccacttctgttttaacctgtacgagcaccatatcttccgacgaaattctcctaaccaaatcatttggctcttaaccaactttagacaataaccaaatcattttgctgcttcccagtgaagtagttgaatgtttcatttgcatatgtattttgaacaagacatttctgagtgttcccagtggatttgcacttagagctgaagaacttttgggcttcccaagggaataaaaagaaaagcagctcattggaacctaaaaacagcactgaggacactgtatttcccacgtgtgtgtgcctgtcaacaagtggttattgggatggacgactggtcagtcatgtgactgcttttgggtggtgtgctttacgtttgtttagaagagagtttccaactcatgttctatgagtattatgcaaaaaataaaaattctagcttcagtttaaaaatggttgtgttggggccaggcatggtggctcacgcctgtaatcctagtactttgggaggccaaggcaggcgtatcacgaggtcaggagttcgcagaccagtctggccaacctggtgaaaccccatctctactaaaaatacaaaaattagctgggcacaatggcatgcgcctgtaatcccagctactcaggaggctgaggcaggggaattgcttaaatccaggggcggaggttgcagtgagccgagatcacaccactgcactccggcctgggcaagacagcaagacctcatctcgggggaaaaaaaataaatagttgagttggtcaaaatctaacaaattttcttactgcagagcttctcgaagactttgtaacagaacaccctttggaaaatactgccttagaatacctagccaaatgttgcaatccagttttcatgatctaaggaaaagtccttctcccaaactgtggaaaggggaagataaagtgatgctggttcctgaattgaacagggtgattaaaatgtacagcataaagccagatggattttcaatgtgttttgtaaaataaaccaaagaaggttaattgtgatgcttcaaaagtatgaccatatattttccagtgttattgtttatatcataatccaaataacttatttgctatatcatttcacagcataggtgagaatcttttttttttttttttttttggaggcagggagctttaaactttcttctaaaattgattttagaagaaagggacttagaaaactcacatatttcttatgctactttttgttttgaattaatatatactaaaaagaggaataaaaaccattttatttaaatgccactgctccttagtaaacttttctgtgaataaaatataacttgctgaataagcagactcaatacagcttgaaaggaaatgctggggttgcttggaaataatagtttcaactcataaaatggaaatgagcaactatggcctgccacctgttgtaaataaaattctattagaatatagtgggtctcattcacctacagcccttacattcacttatatattatctatacttacatattgtttagtgctgtcttcacctgcaagggaggagtggatttattgcaacagagatcttatggccctcaaagcctaaagttttgaatataggtccctttacagaaatgtctgctactcctttcaaagagtcacagaaatttgtaaaagggatgaagactacataactgacccctttttctttagatagaaaaaactgaaaacagagaagttagggaattgtccaggcttatttatgcctgggtgctctgatctttatatccaaatagttctctttatcagggaagacagggatagatttcaacttagatatcaacaccagctgattggaagtagccatctggagggctggtacaggtctcagcgttcaaagagaaggaacgcaatgacttattaatcctccatggtccagaggtggagagcggctggacccgtgccatgtgtgcactggggatatgcactatgtctgctcctgacatttctaatagttatattgccgtctccttccttgtacatctgccgtgtaagcactttggtcactgggccaaaaagaagtgtgcattggtcctcattagaaacactgctgcccaacagttcagaagagattgatgattcttttgcaaggtcgttcaaatgcctgtcttagcagctgcctaccatatcacgctctgtctagaagaattaacttggaatttcactcagactggatttgtcggttataagaatttttttttaactgaaatatgtccatggagcacagtgcaagggggtataaaatggaatgtcctgagtttattggcacttgtgacccaaactaaaagtctcaatgtctgtgcttttgtgcagctggacaatccagatgagcaagcagcccagatcagacgagagctggatggacgtctacaaatggcagaccaaatagccagggtaaggaaacattgtggttgtttgctggggtccaggccaaagtcccactcaggaagcacactgattattgacagcctctaaaggataaagctgagaagcagagaggagggaagatgaggacaatcaccctcattgggccctcagccctcctttctcaaggcaagctctcccagagatacctcatgcatttcctatgctccagtgaatacccaagctcagacctccaacattccttctgagttccagacacatagctccaacagtctactgaacatttccacttaaacattttcctggcatttcaggttgaatgccttcaaaatctagctccttgtcttcctcccaccccacacacataactatatttactcctcttctcttgttctatatccaatcactgtggatgaaacctcctagccattgtcagtttctcctttctccctgcaatgttccacactcagtcagccaccctgcctccagtgactgcctcttaaatgtgggtcagatctcttgactgttttccagccctactactggtgctttgatccaggccctcatcttcagcacctggatgttacaatagcctcccaatgggtatccctggctgcagttcccccattttctatccatcctgcacacagttgcccggataaaactcatatacaaacatctcaaaacagagcctcaaaatccttcaatagattccctcattgctcccaggacaaaatctaacctctttagaatgataatcaagactcttaaccaacagactctaccctttcattttagcctcaccttgcacaactttcccaccggaactcccgagtccaactacagagaatgtctccctccaaatataccaggccctttccaggcttggtgtctttatacccactggtgtctcaacctggagtaaccatgtttctcccctcacttagcaaactcacctactcagccttcagtacctgacttaaaacaccttctctaagagcttagcagttagtcctttccacctttgtgttcccgtcagatcgcatatcaacctttattatagcagctcatcgaatggtgatcatttatttacatgtctgagtctcccagtatatagaactcctcaagggttgaggttatgtcttactgttgatgactacagctaagtgttatctaccattattgctatccctgccatctctgatattattaatagtagtcatgccagtcatattagttgagtgctgattctgtgtctagcatgctaaatgcttcacatgtaccaactcagtcaatcctcaaaacagccctccaaggatatttcagttatcattcttggtttagagatggggaagtccaggttgaacctgctgggcaccagcaaagagattgtggcacaccctcagctcaggtctgtctaaatatcagggctggcaccgggcttatgtcaggcacaaaatttaaacgggcctccgttaatcaaaataaactattttagtaaagtatttttcaattacaattaataccaaaaaaatccatgaagaataaaatataaaaattgtaaatagcatcaggctcctgatgattcctactgtattcacaggccctgtgggcatatgagggtgggggttattagaaacagcagggagggtgggcacagggtagagcttttcactttatggaaagaggtgtctccagacttggaggtatggaaaagaatcctactggaggagaagccagagagattccaagaagcatcaaaatccccctgtgcttaagcagttttactgaaatgttttgcatcttgtttttggacacctttaaagtttataatcaagtcagcctggtggctaaaaatagtatgcgcttatggatttggctaaaggtattataaaaggttacgctttaaaatcccacttaatgtgacagtaaacattaataaagctttagaatttacttctcctgtaaaaatgtttcctactggtggattatccagaaaatggaggtcatttggtccattcatctgcattttagacaacgagtatattcccaactaaaaagtattcatcccatctaaataaaaatcacacacacctcaaaaacaagctcatggcacctttaatttacttgctttgtttactttaaggcttaacatgataatttaagaaactggtgttaggctaattttaatttttaatagaacctggatgagccaagatgctcatctctgaatagtaaatcaaagaactctctcccccaacccccaccactaaatattctgaagctaaatgagatattattaacaacttagacctaagcattcttagacaatgaagtaggcaattaaagtggatcttgattattatttacagagcacggaaaatgatttcagtatatatggagggtccctgtctagggtattgagggtttctatgagatagagtgccctctactgtctcctgttctttcagaaattgactgtcttctgcaatgttcgttcatgccagtggcccccttgctatatagctaactggtcctggagtgagctcttcttcacccaggtggaagcagtcagtttccagcctgccctggccacacgtgattggtccagaaatggaaacttgatgcaaactaaaccaatgaattccttcgtagggcctgtggactgtgggtcagcaaggctgttgtcttccagtggtagaaagatacctgtagcaatgtgcacttcttccatatagggaaaagatgatgagaaaataaagccaacacatagaaacagagacagagtctacactgagatgtcaaggagcccacaatcctgaggacatccgtttaagtccccgattgtaattattcttaagcttcagccatgtacctgcttttccctcagcttagttggatcccaagaaaaataaattctccccttgcctaaaccagcctggctaatactgatgaaaattgtgaaatatctcctccactaaatattaaataaaatatcaagatctcggatattggctagttcatgaagagatattaagacaaatcacctctgcttatcttctttttagcatgccccgatttttctatttccagcatcacagtgaattttcgtgaggatgtgcaattcaacccatatggctgaatgtcagctcctgtaaatatcataaccagaaattcctggatatagatgtcatccatcatatgtaactcactccgttctctgaattaaaagatgggtagagcacttttgattgcaaataagaggcaccaactcaagcaagcttatgtaaaagaggagatcggagacggaggactacttcacagaacctgcagagaaactgcagccagaacccaagaaagaacaaccagggcctgcagagtgatcaggactctccctgcatctcccatctccatgtgtcacattcattatcatttctttcttatcccctgcaaattcacaatgctaagaatcagaactctcactggcccaacttggttcaagggccaacccctggtgcagttaaccaatctacaatggaaaaaggggtgaaagtctcgttgaatacatggatgctggggatatatcatttagggtgagggtgggaagaagtggggctgtgggtggagtggacattatgaattgggaagcactccagatgtacccaatagtaataactatcacttacctagtgttttcctatgtgccagatactcttttaagcattttacatctgagaatctaaccctccaacaacctaatgagaaagatgctattattatccccatttcacagatgaggaggctaaagcagagacattagagaatctgaccaaggttctctaatgagtctgcactcttaaccagtatgcatactatcattgcaaaatatattcccagatataggccctcactttccccctcataccaatccaaggatccattatgccctttactcaggcttttaccttgcctcatcctgaactctctctctgctaatcagtcctttattaaatgtgtcagtcagacactggctgtgcaattcacataaaatctcatttagacccgtgatgaacaatctttggcgttacattaattctcccaagtataggcaaatcaagaagtgtacacatgttcaagtgcacacaactactatgcagaaaactgagttgtctaattccacgtttcatgctatttctttagaatactcagaagaaaggcaggaagttactccaggacaggactcccccaattcttcactccctgctggttccccctcctggaaactgctttcttttctccactagaagttgctgtgtgttccctgcagcttatccagaagcccatatgaagcagcagcattaggcagatttggctcctagaattcagaatcctctctattttgatttttttagaatctggaaaagatattgtagggaccctggttattttgccagcagcattctcatcatcacatatttccactgaaagacatgtctgtcctctcttcctaggagggaagggaggcaaaagcaagctgacttttccttacccacaaccttgcagtgtaatctgtcagttcaatcgcaccagcatctcacgaatcatcagacagagacggctgcacaagaacatcagacagagatggtctcactgtgaacatcagtcatgctgccttaaaagttccagaaagaaatatgaatgcattttttaaaatctggtagaaaagacttggtaatccctgctcaaacattttcccaaatcctctcatgttgatattaaagtgttcccaaatttcacccaggaattaagtctaagttatttaaattgtgtgatcaaaagttgacatttgagcttaagcagacagattgtggcattagtgctgctgtgatatttgccagttcttttggccgaattttagtgtaaaattccaaaattattgagctaattatttaagacaaatcatacagcttttgtagtgtcagtggcagaggtctgggagtaaaacaccattggttcttcaagccgtcgttttaaatatgaaaatgccacttagacccgtattctacacagagcacaattagtagctcatatcctggccctattgcaaatatcagtaagaaataatatccaaatatttatctgatggaaaagttctgttccacacattgccataaaccagatacaaatggaatcctctcctaccagagaaagatactaacccccaactttcaaactaatgttggacatggcacccatgctgtgttatgaagtaacataagtgtccagcacatagtaggaacttctttcaacttgttgcctgaacagttaaacaaaatgtgtgtgcagggatcccctctctgactctggcctttgtcaatagctaaaaatcctgggaaatctgagctcacggaaaaatataaatgccaggggggtcctctgaagcttgttcaagtggaaggaagtccatctagttcataaaagctgaggaagtaagaccaattgggtaaataagctggcctagaaaactataatgcctgagcccaaagtgccttttaatgtctgcaatgcctattttgacaaattaataccaagacctctttctctcatttaacctgctgaccccatcctcattactccctgtgcttaatcctacagagtgcacattgtctgggtaatggtggaatggccattgctgtggagggctcagccatcaccagccttctgctgaccaggatgaaaggagatgatgcatacaggatgcaccatgcagagagaacccccagagttgcctcagctctatagacatttggagccagatagttctgccttatcctatcatagctaagaacaaaaactctgctaggtttcaagtttaactctagtaactattgcttaacacttctgcctcattttcttccaaaaaatagggataaatagaagcatgtgcatcagtgggttgttggaaggattagataaggtaaaataaagcatgtaaagttttcacctagtgtccagcacatagttagtactcagtaagtgccaactaacattattatctttactataggcaccatcattattagtactattgttgtttgtagtggtggtggtaggagcatagtgcttgcaaggggtgtatgtgtgtaaagagaggctgtgtgtgtcagtgatcaaaacatattcatgttatgatctctacttttcacaataattctgtgaggtttattatcctcatttcaaatgtgggaaccaaaattcagatgggtgaagaaatctgtccaaacttacaaagctagtaagcagcagacccagcattcagggtcgagtccgtttcactgtcatggactggatgagttccttgatgccctctttgtactctgcacgcctctgttgcttcatgtgtcactaactggtcactttctggcatgtccccccataccatcacctctcggctggttttctcatctccagtgacagccataccaacctgacacatgacagaagcccaggaagtgtctgagagattggattaaatagctgcagcactgtcagtgagctccagtgtctagcaccggcccttctgtcacattcctccttctgatcacccaccaactttgtcatttgagtctttggggtctagggaacctcactctgaaggggggcagccttgtcatcatttatacataccccattcatcctctctgggtaaaaatccaaaaccagaaaagaaaagccagcagccaagggaggcattagaactttcaaatgctatttttaaagatgttccaaaatccctcagagcataaataaccctagtgggaattgtccttgggaggctatctccactgaggaatgttatcagcccaaaacaaaaataaatggccaacagagatttttttggaggactttgcccacccatacgctatgtttctcataaagcaatatgaataaacaattcttctgtcaaggctgatctatttttgtgcttgaaaaagtagcaatggagatggacgactgcattttccttattttggcacaagttcagctttgaaatgtgtttgcaatgggtctgccactgaaaaactccactcaagaaactcagcctggattgacagtatgctatttcttcccaaggcttaagtccttgcaccagaaaaatgtccttgttttccttgcagacttcagtttttatgagcctctttttatgatgtcattaggaactgtccaagttctgggaggagtgatcattctttggattttcccaatattttgctagatagaatttggtggagctaaccctcagtcagcatggtggcatctgtaaccaccgggcctcctaaaaaaatctcaggactgtggagttaaaaggcactcagtgagtccctaagataagttgtgatagaaggaaccgcacttgacaagacagtctctcaaaattgattagcaagaacccacttcacaaacgctagctattttcttcatcctcctggcaactaccaagccagcaactggcattaaaatcagaaattccccacttaccaagttcccccacccacaccaaataccatgtagttcactgaggttttggccccagtatgaggaggcaagatacaggtcagtgtaatgagtttcaggctcttgggatgtaacctttgttccgtgacagcctttaatggggcctaaggactactctcagaccatgagttaacctacctcactcttcccttcactctccagagaggccatattccaagaaatatgaggaaatattgtgtggctatgtaaagttgtatacaccttcttggattcatggttgcctacagtattttccatgggaaggagaaaagagcagtggccctatctcagccaactcaacctggtggcaaactcttctttatccatcagaccctcatcccaaaggtcaccacctctgggaagccacccttgattctctcaggaaggatttgcatcacattatacttccattacagtacctaccttgatgttctgttatagatctttctccccagtagctgtaagctcaaggaagacagtttacatcctctcaacatgatccccctagtgcctaactctgtaccatatacagtgtttgtggcagtaaatgttttccaagtgatggggacccagcagccaagtcctcgcatcttgatggtttttcataaaagaaatccaagttctgaggttcacacttgtccctgatcaagtccaagaatgacaaaatttcaaggccactgtgcaggaagttttagagaaatacaacgtttgagattcttttgtgatgaatcattagtagctcttgtcaagatcatcagcctgtcatctcatttcagaagcatccatcctgctctttccctcacattcatgcacagcgtgtttagaaagcaccacacagtgagcttagcccagtcttaaaagcaggacgtgattatactaagaagttccagaaggaactggtactgtgacgttgcggagtggatttcagacccccatattttattcacatggaaaagcagaatctcggtgttctttcagaacttaatttatcatctatctacctcctcctcacagctgaattttagctacattgatatttaatatgggcatttttgacaagtcattgatctattcactcaattcatatgtattgaatacttattatgtgccaaactttatgctagacacagaaaattcaacaggagtattaagatagatatggtcctgaatcattgcccagcaggaaagacagaaattaaacaaattccacaattgattgattaattataattataacaagtgtcttagtctattcaggctgctataacagaatgccatagttgacataaacaagagaaatttgtttctcacagttctggaggctgggaagttcaaaatcaagccaccatcagattcagtgtctgatgagggcccactttctggttcataggcagctgtctttttaccaggtcctcacatgctggcaggaacaaatgagcagctctccgaggcctcctttatacaggcactagttccatcatgagggccctcatgatctaatcatcttcccaaggcccatcttcaaataccataacattgagggttagatttcaacatataaattaggcaaggacacaaacattcaatccatttcaataaatgctaccaagaaggtaagttagcaaatacaacaggaggacccaacccagggaagtgaaattttgaagctgaaatatggaagatgaaaacaaggctgttagttatgcagggagatagggagagaggggaacaagacttatgacagccttcatgtaggaaggagactggcactggaccagcacaaagacatctccaagctctatggagaagaagcactctccgtatttgactgaagctgtgagatggcaaggaagaaaaacccttttaactaacagtgggtgggggaattactgaaagaaaaataaattcttaaggaacaaaattacaggagaaataactagtcctgtggaaattagaaaatgataaaagtcagagttcctttctgtaactctagaaagcatctttcttttcttttcttttcttttctctcctctcccttttcctccctccttcagtccctgcctcccttacttcttctctctctttgtctctacctctttctctctcttctttgttaagtgtcttattctgctttgacctgatccagtgtggcagccaaccctgagtctgtaagatgttactgtttcagttctaccagccaattgcagtctcaatgtctctcagtctagttcaactgcttgacagagtaaatctgattgatgacagggcactaataaaattagttggttcatcttgactcagatgcccatatgttacacagcttatttttttttttttttttttttggccacacagaattggcataccaattcatgttccatgggatctaggtggggttctactcccagccacaaggacagaggacataagctatgcctatgcacatcagcacagcatattactggccatagaaattggccagtaatatggccaattggacatgtacttaagttagactttgggtgagaatttggggatgaaagactgtctccatcttccttgcatattacaagaggaaatatgcacttttccgttagatagcatgatgtgatgttgtgcagtccacatctttagcaacatttctgtgaagataggggagccaaactgagcatgaagccaccccagaggaaccaaagccaagattttaacaaaaatctcagttgtggtgatatcacctgagccctgattccagcctttcctgaagctgggtctaccccaggatattttcttttgttgttttaagccagtttgaggtggatttttctgtcacttgcaaaaaaaaataaaaatgtcaaactgacttggcttgcttctcactccatcagttatggaatagggcttggggagggcaagtttatgtttcaagtggtaaatgactgtttgggaaggtgattgatccaaagcacattccaggtgacttagaagtatgaagaaacaaatagcatggttagcacgtgttgcaattacaactaaatgtataagcaagaaaggaaaaaatagaggtcagttatgataccaaattgctctatcttctaaagaattttaatcacatttttcatcacttcattaatttggttcaatttttcttgaaaacagtaactattattcttagaaatagacacagactatgtttgaaacctctcaaatgagctccttttgaattattcatgtgagaaaatctctgtagatatccagaaatagggtctctttctgtttccctcacttaaaaacaaatgactgcattttactaaaaagaaaaactaaactgaaaccatatttgaaaaataacaccccatttttcttcctacaaatcaaatttgctgaaggaaactggggaaaaatagaactgtaataaagcatttcaatgtttcttactatatgtttatgtacgtgtttcttacctgttacaatgtataaataactagcaggcaggcagctgtctactcaaataggctgaacatttttctagcacaaggccatgagatctgggtgaatttcactagtagtagatgtgattctaactctgggccatgagacaaagaccttctttataaatcagctttctattttctcctctgctcatacttttctttttcttcccaaggaacgcaaatttcccaagtttgtatccaaagaaatggaaaacatgtacattgaggagctgaagtcatctgtcaacctgctcatggccaacttggagagcatgccggtatccaaaggcggggagttcaagctccagaaactcaaacgcagccacaatgcttccatcatcgacatgggcgaggagagtgagaaccagctctccaagtcagatgtcgtgctgtctttctcattggaggtaaaaagccctgagcccttgaaagtttcttggcacagcaagtaggacatgggcgattagatgcgtcacaatcagcttgttttttctgttgcaccccaggagcagttattaaaataacagcatgctaagcttaggtcagctaatcagcaagtgattccccatctccaggagcccacatttttcttaaggaaatgcaatctgaaaaccacctactaaatttaatcttgcattactttctgtcttaaaacagtgctcaaggattttataaagaccttatataatttagaaagttaaaaattttggcagccagttttacagttataagagaggcaagctagcatcatattgtggtgagctgtaaattttctttcccatcatccttcctgttggctacaaggtagagagtcccttgtggtggaggcttttttagtttatctcagctcccaaagtaagtacccattcaggctagtattgtggcaaaatgctcaacatgtcaataagtttctctataatttctcttcacacattttcttttcatatgtatataatctaaggagtagttctgatctacctatgtcagaattacatgggaaggtagttcactatgcagattcctgggtaccacccagatctactgagctaggatctcgaggggatgggaatataaaattgtgcagccattttggaaaataggttagcattttctgaaaaagttaaacataaaactaccatatgatctagcaactccactgtcagatacccaataaaaatgaaaacacatgtctgcacaaagatttgactgtaaatatttatggcagcattatttataatagcccaaaatggaaacaacgtaaatgttaaccaactggtgaatggatcgacaaaatggggtatacccgtacaatggaatatgattcagcaattaaaaggaacaacccactgatacatgccatgacatggatgaacctcaaaaatacgcctggtgaaaaaagccaggcttggcatggcggctcatgtctataatcccaggactttgagaggctgaggtgggaggattgcttgagctcaggagtttaagaccagcctgggcaacatagtgagacatctctacaaaaaaaaaattttttttaattagctgagtgtgatggtgtgcagctccttgggaggctgaggtgggaggatcaatttagctagggagatcaaggctgcagtgagccataatcatgccactgcactccagcctgggtgacaaagagagaccctgtctttaaaaaaaaaaaaaaaaaaaaaaaaaaaaaagaccacatattgtatgattcccttgatataaaaggtccgaaaggcaaatctacagaaataggaagtggattaatgttccctggggcaaggggtgaaaaagggcataagaaatcttgttaggaaaactaaaaatattctaaaactaatttatgatgatggtcatgcaacttagtaaatgtaccaaaatcactgaattgtgcatctaaaatgggtttattatatgatatgtaaaacatgccacaatcaagttgtcagaaaaaaaattctagacaggatgcagccctggactgtatactttaaccagcccctacatgcttcttatccactccaaaatttgagaaccacttgtaacttactaaagttcaaaaccccacaagggttttatgataaccctagatttggggagaccaagagaagagatcaaatttctgtgcagttgattagaatatgtaaaaactaaattaattttctaaaacatcattaaagcctgctgtgaattaactgcaggtaatttgtttttctgtgctaagtttggatggagatactcacattagtgttttcaacatgtattgtgcagttggaagaggcagtattcaattaaatatagagtacttagtgtgtgaaaaaatcatccgtgtaatttcacagaaactttcttttttaaaaaacaatactgccacctgaggtactgaatgtattttcttaggtgtctgaatttgattattgccaattaaaggtgtcaatttattccctactgcctcttgtcttcctacagaaacggggggaaagtggtttattgattttcatgagtattttaaatctgtaattttctttcctcttttttttttttttgacacaacgtctcactctgttgcccaggctagagtgcagtggtgcaggtgcagtcttggctaactgcagcctcaacttcctggactcaagtgatcttcccacctcagccagcctcccaagtagctgggactacaggtgcacaccaccaaacccagctaatctttgtattttttgtagagatggggttttgccatgttgttcaggctggtcttcaactcctggactcatgccatctatccacctaagccccccaaaatgctgggattgtagatgtgcaccaccatgccctgctaaatctgtaattttctaattctttgtcagtactcgatattacacagctgattatctgaaatatagatgtagacaagtccgtactcctatgtgtacctgattcagatggtttgacttgtaattgaaagtacagaaagaaatgtcctaggattcccaaatactttttaaatagaacactgaattgcacatcatagaaaactgccagcaaaaaccattgcacatctgtttgtgaatgtgttttggtgggcacaatgagggcaggcaagaagagggagaaaggattgtcatctcatcagggcagactaggatttgaatttgcagcttggtgcaagtcatattttacataattatacacttgcatggctggaggggccaccaggtagtaaataactttgcagtgagggaaggaaggtccagggtgcccagtagccaggccttgggcaaaggacaaagggcaaagggcatgtgctaacagaaagcaacaggtgtttgtagaatgccactgtgggccaggtgctttttcatcataacacagtgaatcctcacaatagtcttttcaggtatttgcaggtgtagtaactaagcctcagagaggttgagaaacctgcacgtgattacacagcttgtgaaaatgcataatcaggatgtgaagtcagatattttaaattccaaaatttgtgctctttcactgtgccttccatttctttctatttatatggttcttcccaatgtaaaaatgttcacttatgtgcatcgtctcatttgatcctcacacaacagccacgggatacatatttttattcccactttacagatcaggaaacaggccctggagatttgaaagaaaaatgaagtgacttcaacatcaaatcatttgcccaacatcacgcgagtagtacaatggttttgaaagtatggcttctgggtcagcagcatcagcatcaccaggaaaattgttagaaaaagaaagtcctgggctccaacccaggcctactgattagaaactctggagatcatagagcctagcaatctctagtttaacaagccctataaatgattctgattcacattaagtttgagaaccagtagcaaaactgtgacttgtggaatcctggttcaatgctaaccctattgtactttcttgaatctgatccactaaggaagtattcattttttgcgcactcacattcttcttcttgtgtaataccattacctgttttggagtacaactgaatgattttttcatgtataaggactaattgtatatctctgatgtgagtcatttgtttcagatttttaaattgatctctttcttctctgctttctgcattcttctccctccccggtctcttgtgacaagccatactgttaaatatcagaatagtaggtgattacgtggagtttggggaggtggtaggaagtgccagaaactgtaaatgatacatcttgatccatcatgacaccggctttttctctcagtctggaccaaagactatgcagctgcagacatgtttttgttttgactcaataatattggcctgtacagagtttgtgtattttatttctccctatttgaattattgtcagcatttcaaaatcagctttctcactgtgactctgattcagtttttcattttctggaaggcaaaattggagtatctggtaactctaaagtgagaaaagacaaggcaacaacgggttgtaactggcagctgctcccttcagaaggagcatgtgctctccagtttgtcatagtccctgctaatccctgttgcatctctgaatctaatgctgaatagtacttgccctttattttagtatttgcactattacttatcttattgtgaagcaaaaagtgaatttatgagcctgtggctctttaaagtgctgaaccaaaagccagactatttttaaagaaaataagagcctggccgcgcgtggtggctcacgcctgtaatcccagcacttcaggaggctgaggcgggcgtagtgcctgaggtcaggagttcgagaccagtctagacagagtgataaaactctgtctctactaaaaatacaaaaaaaaaaaattagctgggcatggtggcgtgcacctgtaatcccagctactcaggaggctgacgcaggagaattgcttgaaccagggaggtggaggttgcagtgagccgagatcacgccattgcaccactccagcctgggtgacagagcgagactccatctcaaaaaaaaaaaaaaaaaagagccaattccttggtagaaatgaaaaactgatcttatttgcttaacacagaaagagtagcccattttatatgcctgtctggcccctgtgagcatttgaattggtgagccttgtctttctatctggcaggcaatcagctacactatgaggaattgcatcttcgtgctagactggtcccagcatgactggtacaaacctaacagaagccatcagatacctgttggttttctctgtagcttctcatttgtgtattttcctctgggcgatgctgccaggggccttgccaataacctccattatgtggaattctcttttcaggtggtaattatggaagtccaaggcctcaaatctttggctccaaatcgcatcgtatattgcacaatggaggtggaaggaggagagaaactacagactgatcaggccgaggcttctaaaccaacgtaagttatgtttctccagggtccatcttatagagggttgctgccattagttccattttggccaactccaaggtaaagatctggtttccccagaagatacgagaagacataaaccttgtttatttttcaaacaagatgacttgcctacatttttatttggcagccacagcaaagattctagttccttcaaagcagagaactgaagaaaattaaagaaacagtgtcctttctagtggttttaagtattcaccctcgagagattagtcacaacttccattcatcaatataatgtgcaggaaagtttgatataagtttacttttattaaattttctaaatatttggttttcagtataagacataaaaatgttttcatttccatatatttttggggaacaggtggtaatttggttatattactaagttcttcagtggtgatttgggagatcttggtgtcatcacccgagcaatatatactgaacccagtttgtagtctgttatccgttacccccttcccactctttcccctgagtccccaaagtccattgtatcattcttattcctttgaatccttatagctttggtcccacttattagtgagaacatatgatatttgggtttttgtctaattttttcctgtatgtcatagttctgaatgtattagcaaggtagtatgttacataatacattaattcattgggtcaatacaatttagtcaaatgtgtgtgtacaaggtattattgtatggtggaaaggaaagtagtcactgctgtagccctccacagctcacagtttcatggggacatcagaaagtaatggcacaaatatataattataaatagttataaatgctgacaaagaatgctttgagaggagatagtgggaggcacctgaaccagtttgtgaggacagatgcagaataggccttccttaggacatatgaggcatttgaactaatattattaaagttgagcaatgggagtggggatgggtggagagcattctaggcagagtaaacagcttgtgcaaaggtcctgtggttagcaaaggccctgggcaaggagaaattcaaaagaggccagcagggctggagtttggagaataaggggtggataagctgccagagaggcaggcagggccataccatgaggaagttgttaggccttggtgaggaaagtatgcattggagatgtattttgaaaagatgactctcgctgcagtggatggggagtgggtgggcagggttgtgcaggaggtcagttagggtactgtttcagcggtccacaggagcaataatgggttcattcattagggtcagtagactctcaggcctcaaagattcttgagagatcattgctcccttccctccctacccactactttcctctcccttccttttctatctcagttaagcccatctagactaatgagcatctttttgtgttggtgttaattcataagagagtcatcaaaagagaaaccctgaacagcagctcactgcctctcctcccccagagcattatgagctgtttggcagaacatgaataatttgccaggatgttcaaacaaaatagttcaaagaaagcacggaatgtttcctggactagagaaaatctcagggcattgtataccttcaagtggctctttgcatgaataggcaaaagcctcagatgctcagaagctgggagaaattaatgagtgtgtacaagaggaaatggaaaccaatgcaccttgtcacacgtcacccttcctccctttttttacaaccaagtttcaaactgacaataaatgtggtttcttttttactgccattgatgaaatcccagttattcctcaaatggtctgatcgttttccatgctcttatgttatactgcactatttgtgcttttttaaaatgtgtgatacatgggggaagaacaacctatttcgtgtttctggcaaccttttaagatgctgggcccaatatggcgttataagattgagaaggaagaagaaagttctgattattctaacagactgttgtttcatatgagctattataattcaaaacatagtttgtaacattcgatcagatgcaacggtttcagttaccagggtaaatcatgagttgattttcctgtgtttgtaaatggttaaaacagaatttcagattacaaataattacagaatgattgggtctacctgcatgaaatattcatgttttatacacatacttactcataactatacatgtggcttatgatgtctatgtacagaaacagctcacattgaaacattttgcttttccagtaagaagtatacatttttgattcctcttcagtcaataggttggttgatttgtaataccttaaggattcaggtttcatgaccagggtcaagtgaaatcagtcagtggtagctacctgaagtgctgtattgagaagggttcgaggccaaatccatactcagaggaaaatagtgccaaggtcaacttgtaacatctgccgtggaagaggaaggagtacaagtgccctgtatttgccatttctatagtatcccaaagggatatacgtggagcttgaaatatacaacactcgtgtgtcttcctctcttcctttatcctttacatgtagactctcctatatcctttacttattttccttctaaatccacaattctgtactcaatactctttttaaccatttttctttgtcacagttcacttctagtagtttttctctacctccaagtggttttgttttgttttgttttgaggtttgggttttgttttgttttgttttgttttgttttgttttgttttgttttgtcttttgagatagggtcttactctgtcacccaggctggagtacagtggtgcaatcacagctcactgcagccttggccaacctgggctcaggtgatcctcccacctcagtctcctgagtagctgggactacaggcatacactaccacgcccagctaatttttgtatgtttttgtagagatggggtttcaccatgttgctgaggctggtctcgaactcttgggctcaagtgacctgcccccgcctcatcctcccaaagtacaaggattcaggcatgggccactgcacctggcttgcctccagttttatctggtagcatgaacgagcctgtttgtgcagttccattttcttcctgcctccctagttttaacttactcagaagcctcttcatcatctcttttctttgaagctttatttcttctccttttctccacccctcccacttacactttctcctattactaatctccaactgtcatctctgctacttgatttttattattccagaaattttcctttcggggattatctttaatttgtcctaataactccacttcatcctctgacaagcttagcccttttcctgccctattcatcttctgaatcttgtctttgactatttttacagccagctggtgcccatgctttatttatatattctaaaaccaaaactccattcaagcatgttttgtttattactcaaattccatggttgctgctaccaagtactacaccccataactggaaccctaacattgtgccatagcacatgtctacaaggaatttggctgttgtcttttttttttttttcaagtatagccaaaaatttaggagtacataacataacccaatttgtctaagagtatgttatttggaatcctcatgtattgaattgacattacacatccttcacctccttttatcagtgccatctcttcacttatggccaggaccctgctcagcatcgtcatattggatcagttgtataatataataacactgcgttcattagttaaatatattaatactttgtggttggaaaaaatggtgtgtgtggtgaaggccggcagcctcttatactctcagctaaattgtggcccatacttatccttcagttgatcaatctgtttgctacctgtgggttgtttccaagcagactatatcctctcatttctgttgtcctcctctcctgcgtttttaacatagaaagccaggagaatatacgatcaagttttcatgagacgtatttattttacaatattgtctccatttgcaataggttgtttttgcttctgatgggaaaccaatggggatacttaggcagaagtgcttgaaatcctgccattagatcagcagcctcaggaaggcagggagatggagaaggaaatgctttggggattccaaagcatttggaatatattttcccactctctttgaaatagagcagagggctgttcttgctctaaggtgatatatttcaaagggtggcactcttacctttactaagaacagagattatgttaagtaataccagaaaatggcattgagtgagatgaaattatgtgaaaaagaaggcactcctttaccatttatttttcaattcttctgatcaggtcaaggagaacattttaattcgatgctagtaggtcattaacacctccacaggtctcagtctcagagccttctgcaggcaacagcatccagttaagatttcatagccttgtttagatcccattacgcttaccttccattcatggctggtggtgctgttttgtcttttgtagcaatgacataagatttcctttttaaagaaatacattaacatttaaaaagtgaatcaatttaaataaaatatattaagtaaataatagcacaggtggtacctggatacaatgaaaagtaatcatgaaagtatcttggtatacggaaatggcagagattgggaagatggtaggcaaataaagtaaatttgaaaaaaaaatgatgtaaagaaacctgacatattccctgagtagaaaatatattccaaaattatatttattggtagttttgtataatgtaagttgtcctctgtaataaccatgccccaaggattaaatactggaacacttaaataattttgctgaaaagaaaggaaatttgaattagcaacccagtattgtgctaatgtatctgaaattatattctactgaattgaaaccaaagatgccacttggcatttgattatttaacaagttcattactccctgacaggccatgggcttcgtgacatatgaatttcattattgccagggattagaaagcacaaccaaacttggaaaattggtattttccaagggaatgagaaaataaaatgccctaactgggatcttgccacggccctagggttcttcaatgacatctcatctgatgagacaaaagacaaaaccaaaatacaacaacttcctgtaacatttttcttctgtgaaatatattactcatcctaatggtagagtgtagaatgggccaggcttattatacccaaattattcatagaaatggagttctattaaattgttcccacattaagtcagttacaaagtcagaaaaggaagttgttccctccagttgcttgcctcatgtattatcttcttaatggtgcttcctttttcaatttaagcaaaatgttttctgtgtactgggccttggaatggtttacatcaaggcagaatatctttcctgaatggcttctttgatattcaaatgtgatacgatgatatgaaagggtagatacttgcattccttcagcaagtgtacacaggatgctttccttatgtccaaccagtgctggggctacagctgtgaataacatatctcaaaccttggcctgtggatcaaacattcaagtaagggacataggcaataaacaaatgaacaaatgaatatataagggtaacaacagattataatttgtgttctgaaagaaatgagcaggctgctgtgatagaaagtagtgggggcatagggaagaggaaacagcaagtgcaaggctttgaggtagggaggggcttgatgtgtcctggaccagaagggggaacaatgtgcctagaaattagtcattgagggagagtgtttacagggagagtgcagagagcagggcagggccgacaacttacaggtcttaggggccacgcaaagggtttaaactttattccaagaccctggagaagctattggcggagtttaagccagggaaaatatgattgtatttccatcttgaaacctgaaatatctttaaggactggagtaaacttggaaccatatattggtaaactagtatttattgagcacatactatttgccaggctttagtattagagtggggaataacacagatacgacctttgaagttgtgcacccatggaggagagttgattggaaaaatctgagcgcctgagcatggtctatattccaggagcctcagtagcttttgagaacttcaaaggccactgaatgggaaagggaatgaggcttcctgagaatcagctcctttcctgtcttgacactccatgctcaagttcacagtccaggagatatttacgtagagacattatgtagcgagaacgtggagcttggatactatttcttctgttttttccttccagaaaaaggtttaatttctttctaagttaattaaatcataaatggtaaaagtcaacactgacccagaaattaaattttgctaggctcccagaagatacgtaggttgggagaaagtaaaattataatcacactttgggatgctcagacactgtcctgcctctcagaccagaatgcttggtccagaattcccaatgtttatttaagaccagtttgtgtgtgtttgtgagctggagggtgaaggtgggcagactgctaggacaacagacagtaggatagacagtgggaaggaagcaaggtgctagggaacaagttttggagagagagctcctaattcttctccaagctccatcataaatttgccaacctgtgttatgtaagccaccaagctttccaacttctccaagtcctgaaaagtggaatccaaggtcccttctacctcaacaattctataattatttcatccaactaactggtccagagaagaaccataatggcagaacttaagacagaggtttcaggaattgcaactgactctgagttggtgaaatttctgaaattagttggaatttcagaatgggatgatcaagtagtggctggagtttgtcagttagacgttgatactccatctaaacgtgaaaaatctataaaagttctgatttcatgagtagtctaatcttgtgtagctatgaaacaaggctgtactctttttaaaaaaacccttaaggactaagtgactgtaggtcatttcctttctgattcagcttctctattaccttgccagagaagattacttgccacttacatctggagtaaatctaagaactggactgtttttctatcactgttcagtagaaatcaaatttaatacatttctctccaaatgtgaaaagccactgtattttttatttagtgatcagggagaacataggaaagaatgtcatagagttatttccctgtaatgatagaatgagggggaaattctaaatcctcactaataagaaaataacagatacttgatttagattcatcagtgttcacaagcagtatggtgtcatggacaagagtacaaaattgagagccagagcactgcgttcctatttccgctgtgtgagtgggcaggctgcttaactctttgtgcctccatttccatattcttatgaaaattaattgctatatatatatacatatatatatatatataatgcttaaaacaatgcttgggcagatagtagtcctattgactattgtaatcatggctttattcttgtttagatggacgaaggggacatgggggaaaacaaggtggcctgagtctaaaacagtgatcattaacgttgattcagtattttctatggaccaggtgccatgctaggtatttcacagtcatcattttatttaatgccctaccataacctatgagataggtactattgttattctcattttactaatggaaatattgaaatccagagaggtgaagttatttagtcaagttgcagatacaatagctaagccaaaagccaaacccaaagcctgtacttttcatccattctgccaccctacctttctaaaagaaattagatctctaaaacagagtaacttaattagcattgaatattcaacaaaactatctaaaagcgtgcatttcctttccataaattcggttgttttgtggattaaaacccagcctatatttaaagggagatgaacgtgctggcgcacacaccagcacaggtgttccacattagtgtacacactcagcaggcataattcgacccacatacatcagcactgtgaggtgtaacacgtgagtctaaaaagaggctctctgcccttgaggcatttacacaatcccaggagagacactaatgataatgatcatcatcctcaagggaatcattatcaataacaactgcccctaccatttattgaaatctaagtaccaggcactgaactagctggaaccatatggctaagagtcagatggagctgggtttaaatcacagtttcaccgttcaccagctgggtaaccttgaccaagtagcttctccccattaagcctcagtttccctaaatttgaaagagagacaagacacaactgccccatcgggttgttgttgaaaatcaatctgatctatgttaagggctgagttcagtgaccagcatattgtaacctctcaggaaatagtattaatagcctaaaactcactataatgtcactgaactccacatggtactgttaagaaatagaaggaaaaaagagaagctcagagaaattaggaagcctgcccccaaatcctacaactccacacacccaggcttcaaacacctggaaatcaattggccaagggtgccaaagtagaagggagtaccattgccaaaatgctttccagagccagaggacatattctgagggtggactgccttcgatttgatgataaaagaactagttctcaaaggcaagaggaatccaaaaggcaacatcctccatgagtcgtcttccagaggcacagccctctacagcctgggtatccacaagcctgttattctggcttctttctggatcagggccattgttccagaggctagagtgcagctaagataatactttctatgtgtttatcagttacttatttgtcttccagcaacgcccctgtgctgtgatatggaactcacttcactataaaggtgcagatggatgtgagccctcggggaggacacagcatcttggcatgatgccaattatcagggggtttggaaatttctagagctctggtgtttaaactctggagtccttcagagtcacctgggttccttggtaaggattcagaagctttcatgccagcccgtagctgctagtttagatggtttgggatgaggcagctatttcaggcagtctttaacagctgcagtctgggtggaaacatttcagtgattatatgaaaaataaaggttcagcatgggcataagagcaaaagctttggggtgatacaacccctactttgaatctcacctgtgccactgtcattgttatggtaggtgagctactaaatccttctgaacctcagtttcttcacttacaaaataatactgatgatacctacaccataggctgcttaataacatttcaaatttaacatatgcaaagaacttggcacaaatgtaagagatgttattcttattttaatcattattgctgtcagtggacccagggtaaaaaaggaaaacagcacagaccatcaaagtcagttggtgtgaactaaagaagctaaagacgctttatctctcagatgccttttttagtttcctttggaatgtgttcatttatatgtagatcccttacttgtacttggaaaaaaactatatagcaagctagttttcttataatgcttacatgtaaagatgattaataaatgttggttgattcagagctaaaccttagcagcaagtggtaaagggttatggaaaagctgagaaggggcccaatgtgatgggcttgaaaacctcttcagagtactgatgaccataaagataattatagtgcagatctctccatctagatgaggctccatacctaaaagaacagaagatggctgcaaaatatctggggaggggaaaaaaaaaaaaaaaacagagaaagcccgaaaagtaaaatgaacccattgtatgagtgcttgacaccaaatcactgtcatttactaagtaatgaataaaatacatacacacacataaaaatatatgcaccaaggaattgctaggtccaacacaagtaaatctctgtaaatttgacttttagcaagtagcacactatacaatctaataatgacagggtgttgttttttggatgttcttcttctgtaaatttactagagagggaaggaatgaaaagagggctcttgtctcccatgactttatacatgcagtagtacagtagagttgcaggatcaatcattgaggactattagaggcagaaggctctgggtgtgttgtcccagttctgccctgccatgtgatgtcaccttgtttttctccctgctgtgtcaaatcactcaacctatttctaccccaagagcagaattaggtgattttctgttgagccaaatgtagcgggacttggaacctagaaaatgtttctctttttcacctgcctgctttaaacagacctcaaatgaaatgaatctcaaaaacaacctggtctctagaaatagcagcctctggaagaacttagtgtgtaatttttgtcatttgtaatcagaaccaagcgtccaatgcagatctcacaaatacttaaaaatcagggggagaatcaaatcacagagagaagtgcataagatgctattggccagactcctaggttcatttggtcagcccttccttcatctcacttatctgggtggctgctgtgtgctataaacactgtgcctttgaggcactggggctacaacagggaacaaaagcagaaatgtagctgttatgtcacccacaatctaatggcacaaacaatagacaaggcacatttaagtcattgggtagagataccttcaagtttggctttggccttattattcagttaaaatattttatatacctttggcttcaacttgcctttaggagaccaaatagtcaagtgttatttcaaagtcatttctgaaatttctggacttgcgcatgctcagtgatcttggaaacacatagataatcatcatacccaatcaatgtgacaatgtctgtaatacaagcaatgcatatcattctgacttattgttaaaatctgaatattcatttttaaaataggtgagcattccaaatgcacgatggagtaaaaaatcttcatatgtgctctatatgttgaattctattagtggaactacaaaaatatgtacaaatatgtattaacatgttaacatgtaaaaattgttcattaaaactattttatatgaataaacaaatgactaagaagataaatagtacaacagtacaactcgatatctttaagaagaacattatatcacttctgagccaagaaatcttcaaaaaaattaaataatgatgcaaagcagaaaagtaaagatgaggctatatcataacggtaatttctctagacctgtttgaggcactagcattcatcatattaaatgaaataagataaggcttaccttaattctttcctatccggaaggagaaaaagcttaacaacccgctgtcaatgtcgctgtcaacgattggccatactgaaagagctggccccaaaatatttcacttcccactaacctcaagtcaaagtaaatatccatttgccgtctgtcctaaatgtgttgtatagaggcagcagggggaagtaaaaaaaagtttaaattttagctaattaagtttttaatagcaacattgtaaaaataactgaagtgttaatttcgattgttcttgtaccctcagaagtttattcagtgacatctatatttggctttggccaaatgttcatttttaatcctcagcccatttagcattcagccaaaatgtgggttcagggcccctgcaccactgctgtgaagcaaagatgtagggtggtgatttggtggagatttaccaagttggggagaagctgttttaattagaggggtcacaaaatatccccaagaggtggcatttgcacttaaacctaagcaagagggaaccagttatgtaaagagcatggtaagcagagagaattgccaagtcctgagactctacggcaagaaggcacctgtgaggggcaagaagaagacctgagggtggagcacagggagagggaagagagaagacagcaagtcagcaaggctggcggggccagatctcacgggacctggaggtcaaggcaggaggcttgggttttatgtcccaaagtaacctggttggatttatgtatttaacagatcagtgtggctgctatatggagaaggaccgcatgaggcatgagcagcaatgggagtggggacaccagttgggaggctgtggctgtcatcatgtaagacagggtggtggtcgatgatggcagaggaaagcaagtgagagggacaggttcaagacacattgggacatagagcccaaactctctccttttcattcccattgtccgctctttttccaagggtggtactatgccctctggaggttgcattctagcagcagacaacacttggctcttctctccggagtttgcaattgtttattaccaccagatgctgctctgcacacactgcttgtcaatttgtaagttgtagtgctagcgtctcggtgaatgaccttgagtgagttaaagtcacctggcatctctcacaaccatgtgggtagtggatgtacagatgtgaactggggcagtgagttctcaagctggccgttttattcccataaggattattctacagctgtaccaaatttgttctttttccactttagcagagacgtgtcttttacagaatgttacatgctgacattagggtgacattgacacctaaccaaaaaaaataaacgcattcccttccccttctagatttcatttcctgcttggtttataagtcagattgcactgtgcttgtggtcgtgcttgctgctaggtagggaggtattattaacgggaaactattttgagaaataacctacagtgagtccagtcccactgagcaagtgagctgttctctgtagataatgtcagtgttgggtacttgaagtctttcatgaggataatgtttaattacatgtaaataaatcaggcttgactccaactctacggtggaatcttggacccaggacccttcccaacagataaaaccgctaaaaagtctggaggaaaaatgcatactttgtgcatacacttcaaataatatttatttggtaactattttgtataaggcagtgtggttggtcttattattggctacatttttaaaataatattttatgtttttctgaccaaaaagttataatccttgttgtagaaaattgagggaaagtataaggaaaaattaaatattactcatgatccctatatccagcaataatcactgtatatgttttggcgttgttttccagtttttctgtatctgtgggtgtgtccacacccatccagagatatatgcatatgatagataacctcgtatgaaaatctgtatactcatatatgattgttccttttgcatcaattcctaggaaatggtgttattagttcacagctagttatgtcctgtatgttggtgaatagggtgaccaaatcattctagtttacccaggacttttcattattggcattgccccatcctggggcaaacagacagttggtcaccttgttttagtgaatacatcacatctgctcaacctccatcatcctatataccgagagaaagtgaatggctgaaggtcacttgctatatttgtttttgggagacctctatctcttcggcttctaccattaggaagctgtctctctcttgcagcctcagagaattcattgcagcttttaaatatgagcctggaattaagatatggttcagctgtttgtatacaaacagcaagcaaatcattgtgctcaaatgaaggtcactgcctggtctcactgagcaatctcaatttgctccatttgtctggatatataaaaagctgcacaattagagttattgtataaacagcagagtgatacttcatgtaactaagcaagcagattccactgtggtgtttgtacatggaactgagggcaattaatgtcttagttatatttgtgcaggatcttgcgtggaagcatcaggagaaaacaaagccatggattaaaatattcagagaaatgcacatgaaacaaacacaatcattgtgggaattttccaggtctttcacaggaactagtaacagtataagtccttttgtaaatagagtgttttgttactttcttcctaatttttaaaaatccatccgtgatcagggcaccaaagccatattgtacatgttaagtttaagtgacaatgggtctgccaagcaagtattaaaaccaaggttaatacaattagttttaattacagtaaactcagattaactaccaacttcattacctaccacctaaatttttccaggctctaggaaaaagtattacatatagaaaaaataagtgtgtgtgtatatttgtgtgtgtgtgtgtgtgtgtgtgtattatacagataaagtttttaaagtatgcatttataatttgaggaaagaagtctcttttcatttcagcttttattgtctctttttaaaaataaactaaaaaaaaaatatttgacccatatttaaaatggaaaatttaggcacttgggaaataagatgagaaacctacataaccttgaggacactcaaaatagaaaggcagttaataggacttaattctaaaccttggttgtcagggtgactgaaaccacaagtctcttaaaatttacatcaagcaccttgttaaaaagtgggagtaaatcacacaaaactccaagtcagcattataacatgttatttgcactgatttttttatgcccaaagtacaaatcacaggtacatactctctctgtatgaagttaaaccaatcaagggacaagtgattatattttcttcataggaatacttactttaaaaagaaactgcatggtggctcacggctgtaatcccagcactttgggaggtccaggtgtgtgggtcgcttgaagccagttcaaagaccagcctggccaacatggtgaaaccccatctctaccaaaaatttaaaaattaaaaaaaaagctgggtgtggtggtgcatgcctgcaatcccagctactcaggaggctaaggcacaagaatgcaagaatggcttgaagctgagaggtgggagttgcagtgaacagagatctcaccactgcactccagcttgggtgatagtgtgagactctatttccaagaaaataaaataaaagaggctggggcaaaatacagattcggattcaaatatattatcaattcaaccaaattaaagactgtagtttgatgtgggtttgctgtttatgtgttttaactctccagattcactttgcattctgatttagcctgttacctgtttccttattcattcaatacatgcttacaaaaaaatatgtattagacactgctttagacacaagggatacaccaattagcaagacagacacagtctccaccctcagcaaccctatattctagtgggtggagaccaaaaaaaagtatgtaaacaaatgaaataatttaagacaccaatgaattctatgaaaaaaattaaacagagtagtgtgatgggaaatcactggtgtgatgggaaaaactcccttgagattagcttcaaattacctccttatagaggagctatttgagttgacacttcaatgtcaaagatccactcacctgaagatcaagtggaagaacagtcaaggaagaaaaaaagcaagtttaaagtccccaagatgggaaaaagcttgtaatattcaagggacaggaaaaaaacaaacaaacaaacaaaaaaaaaactgtaccagagtctgtgagcaagaggtaaagtaaaaagagacataggcaaggaccacatcatggaggccttgtaggacacgaaaggtctttgatttccgttttaactgtaacaggaagccctcagagagtcttatacaaagaatggccatggtggtggttactttgtgggaactggattgcagggaaatgcagggtacttaatagctttgtaatattctagttcaaagttgagtgatggcgtcccagatttttaactatcatttagaaattacatctatgggtgtactgtttagcaataaaaaggattgaagtcctcatacatgctccaacattgataagcctccaaaaaattatgcagagtaaaagccagaggcaaaagaccacatattatctgattccatttataaggaaaatgcaaatctatggaggcagaaagtagattagtggttgcctaggattgtgggtgggagtgtggttgactacaaacagacacaaaggatctttttggggttgttggttatattctaaaattggagtacagcaatagtggcacaatgctataaatttacaaaaacagtcattgaattatacacttaaaacatgaattttatgatatgtaaatgatctctcactaaagcttttatttaaaaaaatcatcaggagagaaaattttatccatgttacatatgttcttttcttaagagagtagacataaggagagaagtggggggcctattgcagtcctccaagcaagagacaatggtggcttaggctggattgacagtgaagaaaaatagatgttttacagaatgatacaaaaaggctcatggttggccaggcgtggtggttcatgcctgtaatcccagcactttgggaggctgaggcgggtgaatcacgaggtcaagagatcaagacaatactgaccaacatggtgaaaccccatttctactaaaaatacgaaaattggccaggtgtagtggcgggcacctgtggtcccagctattcgggaggctgaggcaggggaatcacttgaacccaggaggcagaagttgcagtgagccaagattgcactactgcactacagcctggtgacagagcgagactctgtctcaagaaaaaagaaaaaaaaaaaggctcatggttgaatggagagagagagagtgtgtgtgtgtgtgtaaaggagtagaagcagtaggggcaaaacaggaatcaaggatagcatctaggtttggaggttgagcaaccagacagttgcaaaagagcaggttattaatttgtcaccccacctgggaagtcactatcagtacaaagcatattactagattttgctgacattcaaaaaaattcattaaatatagaaaattcagttatctctatattaagatctctgtaattctcttgtacttttataagctttttttctgagcccagaagaaaatgattgcatgatggctaacatgtacaaagaatttcatctcatctgcattctcccatatctgtgtcaaggcccccagccagtgactgcagctaaggaagtgttcactgttgcagtaatacaaactggtataatgccttactcctctgcacgtgtcagggagtgtttctctccaatctggatatgcttacgggagcaagtcacacagcagaacgccttcctactttgtttcttcctaaactgtgaatctgaacagaggaggaacactctacttcacccacaatagaaaagagctaggtgtttagatatgactactatgaaaatttcacctgctaaaatttccttaggggaagggatggattgactgatttatgaacacattgcttaccatgaggatcctcgattagaatttcacatgacagtttgaggttgaatatacttgagacctcaaatataatggctttttgaggaaaggggaatcctgtttcttcccattggttttggaagcatcagtaatgacacaatccagatgagggagggaggggaacaaaggcagactcgagcgagcatgatgatcaaaactcaattaccagaacttcacaggttagggtcttctgaatatatagattcttaacagcttaggaggtgagcataagtaatgtggatatatacatttttttaattctgtattaccatataatttaaaagaaaagcatcaaatagtggtctgttttaaagattctcagattatcctgaaagaattagtctgtgtagttatttctatacttacaacaccaatatagttgatgtctcttaaatccctgcatttgaaatttccgttttagtaaacaggccataaagtaggtcttatttgctttctaacaaagaaggcagaacagcttgcccatggggatttaaatcataatttacattatgtttatttttatagacaggccataagtacaatttgcaaagctgggtaaaactaaagcactagaaaattaaaaagagagatttattttttcctttaaaattgagctcagttataatttaaaactaactgctttaattatactgaataattggattaggtggaggtttgcataatttctcagaatcagaatatgacaattaatgtttgctcttctgttaactcaggatacacacacacacacacacacacacacacacaactggaaagtaaaatgtaacatggaaatgattcagaggagttaagaacttaagattaagaataaatcctcatatacacatattaatgatgaggtttcataggaaaatctattccaaatatggctttgaaaagaattaggacatatatctacttgtaagacaccctccctttttcaaatctgacacatatctttaacattcactgcaattaaatatacaaggtaaggtactagctacatttttctaaaacttcagtcatttctgtctacccctcacaacatatcagcatatcattgatactattatttgttttatatttttctttaaatctattttcactttttaacttagattttaaaaggcatcttgttctgtctgattgtaaatataaagtagccataaaaataacttcagtaaaaacaatgttagtaaattctagattgattctgttccctgcagaaggagctccaaacgtcaacaaaattgccttctttgtagaacaaaaaaggcttggcaaatttaagacattcttccttcacactgagaacttcttcctagggtaatcaggagaaacagaagagaacaactgcctcacagtgccatttgatgtcccgtctttgtgccatgtcaaatcatctccaggggtacaagatttgtgcttgaagagtcacagtacccaatctctgtttactgaataatttcactatagtctgtgtatttccctggtttacactcatccttttgggtgtttttcctagagcattccatggtttcttttctgtttagtaaatccatgccagcttgcaaagtgacgtgaatgagaaagatggaattagtaatgttgttgaatgtgaacactcaagacaaaagaaagaaaacattttcccccttagctggctttgtcttctcaatgaccggaatgaaatgtcaagtgaacgtgttaattcttaatggggataccaatgaaagcttcaggggaagagaacatttaacagaggctctcacttttctctgaattttatttggatagacattagcattttattacatccttgaaaaagatgagatgacaattattgacaaggttcccaggacacaaataaataaaatgaataaattgtttatttgataaatttcaattatctacaaggtgtaaaacactatagatgcgaatgattaaaaaataaagagcaaagaccctgttttcaggatgcagcatacttacagggaaataaatcatgtacatttagtagtgaatataaaaaagtaaagattccattctggggaaaactgcagattgcttctgttgagaaaaccaaagaatggtcctggagaagatggctcttgaaaatggcccttgaatttggctagaaagcatttgcaagtacagaaagggtggcaagggcattctagcaaaacgaagtagtatccgccaacacctatagtctcagaagtgctgtactgtgtagggaacgtaggttctaaaaaggaggtataaaaggaggaagagaaaagaaagaaatctataaatataggctgagtcaaggtataaaagagctttgcagacgaaactaagaggaagagagcttaaagaaacaagtacatttagcagggataagataaacactggggacagagagctcctgaaccagtgtgacccggctccagtggtgtcctgtttctgtgcctctccattcatgtgagcatgtgtgtgcgtgtgtgtgcgtgtgtgtgtgtgtgtgtgaaaaacttttatgacaaaattgaaatgacattgttagtcatacattttgacattgaattttacaatgtttatgcatctaagcttgcagccattatacttggataatctatgtctttgtttctgctataaaaccatgttttctcttggtgtgggaattgactagttttttttttaatgtgtgtagtctttaaaaaaatttattaacttttatttaaaattcaggtgtacatgtgcagttttgttacataggtaaacttgtcatggggcctcagactaacaaaggagcaaagaccctaagtgccttacctacacctccaacaagctgtagtcaacccaagaagaagggaccactctgtctcccatggatcccacacaccctctctgctcatcaccagacaaaataagactctccattgtaagtttcaaatttcggaatgaggcaatgattggctcgtcctgggtcaggtgctcatacctggatcaagcagctgtggccaggagggcaagatcatgtaccacagacatggctcctggaggtccaagccagggcatggaggtggggccatagagaaaggataaccctgatctacacaccccacctcagaacaattctgtgaagtagatattatcattcccactttacaaatagagaaaaccaagacttagtaccatcaggtagcttgccctatggaaggagaagaaacttgaaagtacaagcaaagaagataagcaaatctgtgtttgggaatttccagattctcagtaaaacaggaagcaagttcatctgaaaaaagatggccaacttaatctcttaaccagagatttttttttttccagtgattctttaagagactggagacattttggaataggttttttttaaaaaaatatattaccagccctagtttaaatggttctttgtaaagctgtatacttaacagagaacaattcatttgcatttttggcatctttttttctgaaacatagggatggtctgatgcaactcaccaacagctggaactgggaagggtttgcaaatacactgggatgggaatgaggagaagagattcagaaggacagagatttagggcccaaacattgtattctaccaaagcagtcagatacaaacaaccccatcattccttcaaagacctgtgcaactcttagaactacctaaaatttccctactactggatgaaggtgaaagatttggccaaggtttctcagcctcagcactgttgacgtttcaggccagttaattcttggttccagggggcagtcctggacgttgtattgaggcttagcagcatctctggactttaaaacgttctagaaggctctcaaatggcataaaaggactagagaagaaagaaatctataactataaactgagtagatgccaggagcacccccacccctcgtggtgacaaccagaaaaaaaaaattgtcaacagatactctcaaatgtccccagggagtggaagggcaaaatcacccccaattgagaatcatctcttttagccaagaattctttttatttatgatatcaaagcattttaatttatttttattgaccgaaacagtggtttaagagaatgattgttcagccgtgggaagttacaatttatgttcattgttcttgttggcaacattttcatgaaagacagtgctgaaaagtctggttacctaagggttagctcagaaaaatcatccttccaggatctaacactcctcacactattgacaaatagggaccaaggtacagctagcatgcagaaggactaggaatttattgtaaatcaatttagggcttgattcttgggtcatattatcttcttatatgccaaaaataaatagaaatccattccggtgtagtatatttcctgatggtgtccagggataggacttgattttaatgattcaatcagaggaaatggagggattgtgtatcagtactaattaaatcaggaggagttatcaaccaccaataaagaataatccagtggagctttccattccaaaaagtcaactccctgtctctctgtctccttgatctaagtttcttattctctaaagaataagacctggaatgactctgtgttgaccttgtgtctctctctcttcttggtcagctctctcttctggatcagctctggggagagccacaggggctagatgtaaacccaggagcccatcttcacctcacatgtgggacttactcccagagaaagaaaatggaattttcttgagatacacttaccttccatatcaccgtaatactgtatccatatcattgttataaaacagaatcaaagtttgtttaaaaataaataacaaaggtgcatttcaaaattacatttgaatattagccataattacaattcctctttattagttgattaactctacttggttgaatttaaaaagtagttaagaatgcaaaggacttagtgtgttcatgaacatttccaaatgagctgaaatatttctgcaacaaatggaaatgtacttggaagcgcaggattaaaaatgcgctgtggctgaattttagcgcaggcctttgaagttggctattgtcaaactttagggaacatttacagcctgggattgccatctagtggctaaattctatcatgactttttttttcctcctgggtttcagcaaccttttatatctcagtgtcttatcagggaacaaaccatcaagtggaccagtgtacccatgcagctcagctcagggataaacaacatagaattataaaagaaggaaccaggatccctaaaaatactagtagttaatgtgtctttggccccttccgtttctaagactttttaaaaatatttcttatttcatcaaggttagctccctacctttaaaatcatagctaaaattggaaagcctacaattgccatgtctggaaaataaatcagatgtgtgtatgcatatgggcctgattgttcagctttaggaagaagtttcagtggcccggaaaaaactaaaaggcctgggaaacaagtaacaatgctatgttggtcttgttccctgcggaatccccagcaccaagccccggacatcgtagaaattcaataaacatttgtggttgagagcgagaagtatccaaaagtcagagacattgaactccatcccatctcctttttacacctcagaccctctgagataccaggagggcccactcagcatacagctcggggctgattctctggagatacagaccagctgcgggccaaaccaacccaggaaaccagtgaaaggcagctgagaaataaaatatgcatgagaagtttgaatgcaagaggagatgagcaagggctggatttatccagaaaggtgcacagaggacgtgaaacttgtaggaggatgggtgggatgagtgggatttacataagaaggaagtgaagagccattactgctggagaaggcaggctccagatgaaataaaaactctaaatttaaaaaaaaaaaaagaagtaagtaggactgcctttatcttcagcaaactaacacaggaacagaaaaacaaatacctcatgttctcacttgtaagtgggagctaaatgatgggaactcacggaggtatagaggggaataacgcacactggggcctatcggagggtagagggtgcaaggaaggagaggatcagaaaaaataactaaagggtactaggcttaatatctgggtgatgaaataaactgcacaagaaacccccacgaagcatgtttacctgtgtaagtaacctgaacatatacccctgaacttaataaaaacaaaaacacccaaaaatcacctgaaaattgtaattatgtatatttctgttaaaaactataccccataaatatgtatacatataccacattaagttttaaaattacaaaataatatatatttcttaaaagaagtgaataggactttggggcttgtggtggaatgaagtcaccattaggagtgagtaaaggagagctttgctcactgggattctgccaacccactaaacattcccattccttgaaggtggatgttctgatctgccacagggacacacgcaactcaacttcctccaagcagcttcacggaccagcattctctttctgctcctctcccccatcctccgtacttccctctaggtaatagtcctctggacatgggaatggcaccaagtttccaagaatacagcaatcaaagttcacttcacagagcaatctgcggtgcccccatatccagagatttgtcttttaattcacagaagttttacaggaaaacctatgacactttggatacagattaaataacagaaacaaagatgctggatccagaagagagtgttgagtttgtcctgtccaaccttctcactttacagatgaaatgactgccagagcattacacaagactggagaggggctagaacctgggcttccaaactctcagtccagtgctccttttaatcatcatcctgcatcctgacagaggcaaagggaggctgagtttgtctcccactgtggaattcctgcttgaagtgaggaatcccttccaggccctcagtcacaggtaccaggctgtcacaggtggtggaggccagctctaatgggagagcaagggtgttggtttcaaagggtgctgcatttgctgaatgccagttccactcctaagaagcaaggacagctatactagcacaggtttttcaaaaaggactctgaagtcaaactgggcttgaatgttagtttcactcctcactgatctggtgacctggagcaggatctctgacttctttggacatcagtgtcttgttctaaagcatggaagcagtagtagtacctgctctataaggttgttgtggcaattaaacaagacactgtgtttgaagtgtttcatacagtgcctagtatattaagtgttcagtaaatgttaaattataattgttattgttttcattgttgcttggttgagtgaccttgctcaagttacttagagactctaaatttcaatgtcttcatctgtaagatgggagtaaaaactccaccttgctgtgattgtggtgctcagtcaatgagatcctgcagcaaaagcacttagcacagcaccaaacacataataggctctcagtcaatgtctttaatgagtgaactggaagagatccctaaatgacagcagtctctcagccctgcctgccatccctattccaacaacagaaaagctggctctgtctaattaagtgattctctttccaatacggttaaatgaaacctaatgatatgaacagatccctgtttcccaagagttaaaaaaaaaaatcaatagcacccaataaataatgaatgtccttttgtgcatcaataacaaatgcaatgctccaaccacacagagcagtctttctactaccaagcatgccaaacaaaggcaacaaaataatccataatcgtcacctcaaaccaagagatgtgtcctgaagcagcctctgtccacaaataataatatattgatggtctccaacaaagcacctcaaagagcagtcactaggggaaaggaaagaaaacacagtacattgaataatatcagaatgtctcctctcattaggaaaactgtaacacttcaaaaacctaaacaaatagtacaacaaaaacttttctctgtcccttgtaatttccaagtattccaaagaggcggatgggacatactgaggccaaaaattacctggaaacaatggtctttcctgattgctattgtctctctaatgggaggcagaggggttgcagggactagagaaagcctcctctcctctaagccacagtgtgaaaagtctcacattagaaacatgttatttctaattcatgccatgttttttcaagctggaacctgaggtcatagagttcaacagagagcatcttcttgtcatatcaatgtattgataaaatctgaaacatttttgtattgaaacaagcaatcatgttatggggtagaatgcagcacgtgtagggcttttaaaaccagaatatttcaaataggtgtgcttgttgtgtgggatttcacatagtaccaccaagttcctgagggttcaagtttaccttttatttaccctcaccatttagaagcactgaactaagacactagatatcttgggatctcatttatgctgcaggtaccactgtagggaaacaaattagaccagtagtcaccagacttttctataagggcaaaatagcaaatacttcaactttgcaagccatacaatcttagttgcaactgttgaactctaccagtgtagtatgaaattagccacagaggttctgtaagtaaatgggcatggatgtgctccaattagactttatttacaaaaccaggcaataggccagaattggcccaagggccttagtttgccttttcctgtattagaccatccctagtcatcaatacctaattaagataagattattatacaacaatccagactgttagctctgtgagagcagggatcttttttatctagtacttgaaatgtctagcataatgcctaggcctgctaggtgccaacaaatgaatacatacataaaggaaattttagttttcaaactactctatgttctattaaaagcctgaaggaatggaactcaagagaggtgaggtttgattaatagttcttaagaaagtttcaaataatgcagtagtgccagcccagtgggaagaacaaaatatcagcctctgagaatgaaacagttggcatctgaaaggaaggaaagcatggaacatggaagatgggaagaagcaaatgaaaaatcaggagtcaggtgaagaaatacggataggcggggctctgctttactagttttcctctggtgcaattaacagaactccaattctttattttaacttttattataaagggaacatgtgcagatttgttacatgggtaaattgcatgatgctgaggcttgcagtcccaatgataccatcactcaggccataaacatcgtacccaacaggtgcagaaccccatttctgattggcttaaactgagacaggatttcattagtccatataaatgaagagtttagggctataggcatgactggatccagatgctcaaacgatgacattaagaatttctctctctccttccctcagctgttttcctctgggtggtctttagtcttaggtagcctttctcctcatggaggcaagctggttgctaccagtaactcatggcttgcattctgcagtggagtaactccaatgggaatagctttcccttccctggggtttcagcctaaattttgtggctgactcttattgagtcatttgagtcagatatccacccatgaaccagtccatggcccaggaaatgcagtgtcaagaacgaccacctgtcaattcaggggtggggtcaccttcacccaaaccatgtgtaccaagttcaaggagaggtagtcccaaagaagaatttgaatgctgtgaccaaaagcaggggcaaggacgttgagcaggcaaaaacaacagatgttcacgaactttgcctacttcaccaattttcccaactctgcctaccctcacatagttcattcatcctacccaacctacaggtttctaccctttcttcagcaacctaagtaagccaccctccataaccaccagcacttctctgtgaaaggaaagaactgacaccatgtgtgttaggtgtccttacagggatactgaacagccttcccctctctcatccccaaattaaataagctcccacattatatgatccttagcccctcaactttcaccttcataaatctcatcacacatgtcttgttcattttggggtttctccaccagcctatgagcccccttgaaagtgggaaccatgtccacactaactctaagcacaggggatacttgatatttactgattgaagaaataaacacagacttagaaatttatcttgaaagcaaaaggaaaatacttcaggatgctcagtaacaattgctttcaacttcccatctccaatatacttactctgttcatccatatattttttttccattcttaagacccattccagctgccccttacccccagtaatgggttcccaaatccctgctaccacatcaatctcgttctcctctgaaccacagtgttcattagcactatttttcatttattggctcattgtgttctcacttgggacatttcttgaactataccaaactgtttagttcctctgtgtagctctctaactgttcaggtaattactcagttcttcaaatgaactaagacaaaccaggagctagacatctttgcagcactccaatatttaacattgtgatatacaaagagtagattatcaattaatgtttattgagagactgatcatacatcttttcccaaaatgccagggtaaaataaaattacaaaatctaagatgtctgtttttgtctgcaggatattttttacagggctaaagggacatttgattaaaacaaattatttctgagaaagaacatgtctaagttaatgcaaacttttaacatttggggcataataacaatatatagataatatgataagtatctgtagcattagacgaaaactttcctcagccttggtgagtctctttgacacctcatatgtaaaatggaagtaatcatatcccgatcacaggactgttgcacatataccatatgctatatgtacagtgctgagcattatattgaggatatagtaaacatttaatacatgttactgttgttaatatacaaaaatgtggggttgcaaactagatgtgctgtaacgtgattacagataaaacattgacccagccggggtccctggacatgaccagcaaattacaatttaactccacatggtaagatctgaatgtaagtccctgaacaccactgctgtaggaagagctaaattatgtatcagtcactcattgtgtcatgtatctgattttttttggcattttctctcacttcccaggaacgtaactttgttttttgtcaccctccacagagaagagaaagtttcaacacactaaacataaccaatatacgtgcctgacacaagacagaaggagaaaaaaaaagtctgtctaatccaaacagctctgaattttcatgttggacacatgtcaaatttttaatgatgcaaataattcataaaaatttacaagcaatcagaatggaaaatgaaattatcattctgtgcttaaagtgatgaaattaatgactacaattctgtgaattttcttcgatgattgatggagggaataaactggattttattgtgctcataatgaactgtcagagcctaagctactgatagaaaaggggaaaaacatttgtaggcaaaggaaaaaaaacacatagacatctttagagagggatggagactggagtttagctgtaaagtgatgcagtatcgaatctgttcttctccatcatgagaagggaggtgaagctatatgacaccactcagaaggttgcagggttgtcttattattcctataaatctgaaagctataagaggagagttcaaaacatgaatagtcacagaattctgattgtcaacaaatttacttatcataatgttttactctaggacaaatgcatttttcttccactttctcattctcttctctcattcctctgtgggtgtgggtgggtgtgtattgggggtgtggttgaccttgtatccatcgggtacttgatattcccacaatattgtgagacagtcactgttagccaaagcgttctctgctcatgcagctgtttttcagaaactgagtgtaaaccggggtcccagacgtgcttcatgaatcaagtcttcttgactgtggctgaccttgtgagacataataatcaacattcattcaactcaggttcaattattaatttactgaatgagattatccatgtaaaagcacttaacacagtcgctgattcagagtaagcactcagctgatgctttgttactgtcatcatcatttgctgggaagtgggagagtcattagcataactcccaactaagagtcactcttgtagtaaccctttcaaagctgccattccaatagtcactgttccaatgtgcccattgatggctacaaattagagaaggtggtttgcctggggtcagcatctcaataaaactgagtaattactctttccttccttcatgactgggagaccaagacctgtcttgcacagtatttatggaatggagcctgaaaatctctttcaataccacatccatcatccctgcaaaccattattctcagaccattctcttgtcccacctaaactattacatgctgccagcctctcctcactctgaggtcctgtatccttgacaaattttcatcctaaatcacatattgctaacatttattgagagctctcaatggtatctgacactttgctgagctcttaaagaacatgcactgtcccatttaattctcactgccctaagagacacatatgttatgttcccatttacagacaagaaaagagaggctgagaagggtgagggtacttatccaagatcacatagctagttagtgatctgcatatatctggttttgccacacctgtatagacaccaatgcctggcacaggaaacccaggtgtgtctgattccagagttccagcttcaaaatattacataataattacatcattatgtacacattatatgcatatacatcatgcacatatctacacagtaatcattatatcactcccctgccaaagacaccttattcccttcaacagggatcacaaacgtaaatgtttacaagagccagacaacaaatacagaatacagatgcctgaaactgaggcaagggacaagataaaggagctacgcttttagtgtgtaagcttcctgcttgcccaggtgtgatgccttttcaaacatagtggccaggtccttgcctctctgccttcagaaaatcatcattaaaatgctcaacaaggatcattgactgaagtaagccaccctgtgatcctgcagtggattcatcagagtaaagtggataagagtgggacttgaacataagatggggacagggggagggtcacatatacttagcaaacatgtgacttttgtcaaattatttattcctaagcttcagttccctcatctgtaaaacagggctaacagctctcaccaccccatagcatcactgtgaggattaaataaaataatatgtggaaacctcttgaaacattgcctggcccatagtaagtgctcaataaataggagctgttaggctgaattgatgatgatggtagtgattaataattaaaatattatcttactcagccttgagtttaacaatctgagattttcccaggccctcccctgtagcaggcagggagttggaggtgggagcactctctcagggtcatgcagattggcagtcactcggggagcacagaggggagtagggaaagaagcatagagagagatctctcctcttcctttctctgcatctcccagataaatcccaccagtgactccacccacagcaaattgaatggctgccctcctttcttctaaccaagcctcttaattggtctgattattgtctccttcatttcagctatcggttttacccgatttcatcaagacaccaatatatgtctaggagatgatacccctggtctcaacatccctttgagattatcttggttatctaaaactgattattagccaataagaaattctttggtacatttgtcaaactctttcaggtttgtcaaggtatcctccaccaaacactaaccattcatgatgctctttggaaaaagggttctatagtcacaaaaatttgggaaatattatgtgctgtggcccctcttgaaaatctggaatgcacattaacataataaaggctctgagaaatcctacataaaggaactgatctttgttcaagccaacgttttctgaacttatgaagaagagtcttatgaggacgacccttcttcctcataaacacctgtattgcctgctaactaaactgccaatgcttaggtattaccacctaggaactctggagctgagccacagagagagattatcaatcaaatggatttagacactcaaaaaatacttttaggatgctgggctccagagacaaagtgaagaacaggggtttaagtagatcgcttccttctgttgagtttgaagctgtgcttccacaccctgttatccctttagtacactaagagggaacagagaaggaggagcagcttgatggggacccctcctccatctggtctcagctcaagcaccatgtcttcaggcaggatgtcccctgattaccccatctaatgtggtcctgcctcagtcattctctgtgtcctgactctgttctactgtattcacaactcctgtcattcttgtttgtttatttgattattgtctgtcttgcccaaacactatgaactcctttctgagtgcaaggattttctgtcttattcatttgagtcttgccagcgcccagaacagtgccttgggtgctcactatggattggagaggtgggtgaatggatgaatggatgaacatcaacaaatgggaacaaaggaggctaaatcagtaaacttgcccccattcactggaaaactcagaggatacagcaaggacagctgtccaatcaattccctcttgtctcccattctctatcactgctccagctctcatcttgtgctcctcacaagcccagagtagaagtcatttggttggtacctggtgactcatctccattatagacataactattgacttcagcaatgagtcccttactcaattaatttatttggattaaaataagtggaatcagagggttcagaagcctgtgagaccctggaactagcctggaaagtcccacaagggatgaatggggaaggggcaagtggcaacactctggtagagtccattgaggttgggcagctggagaggaaattcttagtgtgctcctgtacagactagagaaaatccctatgtgtagcaccatttaatatcactgtggcagttattagttattcagtgctttgtatgcgtccaatgctttatgtgttttatttcatttaacctcatgacaccttaatatgtgattttattgaacttcataagaactctgataacttttcaggtgaggaaactgaagcccaaataatttaagtagcttctcatagttatatagcatttaagtggcaaagaagagattcccatttggagtattctatacataatgaatgaaagtcattctgacattgtaactcttcagtagaactatttcaaaattgatgattcactcaaaaatatttgttaagtgtctgcagtgtgtctgacattgacctagacacagatagaacagagaacaaagcaagcaagagtccttgtcctccacagagcttggcttctagttgggggagacaggcaataagcaaacaaaaacagaaataaaacatatgtcgggtggcaataagtgataaggagaaaaaagagcagggaagaagagtaaggagtgctagggaagactttgccttcctagatcatcctgcgtaaagtaatatccccagcactcctggaacaagctgagtgattcatgcagggagctgagggaagagcagattgtgcgtagggaacagtaagtatgaagatcctgaatggaaagcatgcttggcatttttgaagaacagctataacagattgatgtaggtgaagctaaatgaaccagaatgagaggggtaggagataaggtcagagacagtgaaggttcaactcatcaaaggccttgtaggccatggtgaaaacactgtcattcattctgagtgaaaagaatgcattgaggggtttgaacagaaaagtagtgagagctgacttacattttaaaggattactctggcttctggggactgaggaaaacagggcaaatgtagaaaagcaagttagaaggccattgcaataaatcagggaggaaatgatggaaagttggtccagggtggaatgagtgtaagtggtgggaagtggtcagattctacctacattttgaagatcagaccaacaggtttgctgaggcattaggtgtgggatgtaggcaacaaaacggagtcctggatgactctacactttgggcctaagcaactggaaggatggagctgccaactgctgacctgaggaagccttcagaaaagccagtgtaggtttgggatggggaagatcagaagccgagtgttatgtggggtgcctatgagacagtggggtggtcagtgctgaccaggatttctcagcttcagtgctactgacattttgggctggataattatttgctgtggggactgccctgtaggatgtttagcagtatccccagcctccactcactagatgccagtagtagtcctactctctcccccacacccctgtgtgacagccgaaaaatgagtctctagacactgcaaatgtattctggagagcaaaatcagccccccacacccccctcccaattaagaaccattggtgtagacagaaaagaagaggcctaaggtcggctaagtgtgctaaggtttagagaggagatgaggaaaatcagcaaaggggactgaggaggcctggctagtgagacaggggagagccagaagagggggtctcacactccccttgctattcaaatgattctaagtagttatcttgataaagacctctacaagcaagtccatcatggagcatagaatttaatggtaagctgattatgactgatactgaacaacccagctgtaccaaagaaaggtgtttttaagtttagttatggccttcctcaacaaaatctctggccaggcatggtggctcatgcctgtaatcctaacactttgggaggccgaggtgggtggatcacttgaggtcaggagttcaacaccagcctggccaacccggtgaaaccctgtctctagtaaaaatacaaaaatgatccaggcctgttggtgggtgcctgtaatcccagctactgggaaggctgaggcaggagaatttcttgaacctgggaagcgaaggttgcagtgagctgagattgtgccactgtactccagctggggtgacagagtaagactccaaaaaggaagaaagaaagaaaagaaagaaaagaaaaggaagaaaaagaaaagaaagaaagaagggaaaggaaaggaaaagaaaggaaggaaaaaaagaaaaggctccaaattcaaccacttggggttttttgtttttgtttgttttttgttgtttttttttctggtgtgtttttgtttgtttttccagaaagggtctcactctgtcacccaggctgaaatgcagtggctcagtcttgactctctacagcctcgaccccctgggctcaagcgattctcccacctcagctccccaagtagttgggactataggcacggaccaccactcccggctaatttttagtattttttgtagagattggatttcaccatgcccaggctgttctcttaactcctgagctcaagggatccacctgcctcagcctcccaaagttctaggattacaggtgtgagccactgtacccagcccctctacttgggtttttaaagggccttttaaacttctgtcacttctaggacattgttaataaaagtagctacatttattcattcaagccataccatgtgttcatgtgttaatgctttgcctgaattatctaattcgatctttactaacaaccatgaggtaggtgctttgcttattcctattgtacagatgaggaaactgatgctcagagaggttatatctcctggccacaatcacccagctcctagtaagtgaaaccaagactcaaatgaggccatctaactacaaagtccacatttataaccacagcatctctagatttccccactggctatgcctggctttactctctgccacttaattttccaaagtcctgagcctcactcaatgtggtggaaaccttaaaaggtaaaacagagcacctgacaaacagagcagtgggaatgcagaggtacctagaagctggcaggctccacatggacttaactgtataccgtgaatctatctctaacatgagaaaggagagaggaggatgcaggaaagaaggaagcaggcaggctggaagtgtcacaaaaaagaaaaaaaaaaagagggtccactgaaaaaagatcaactaacatttgtaagaaccttagaagcattaaggttcataacttgctgctttgtctaccccaggggttaaagaaagcaagttttgttattgtcaaatgcattgaaagaaaagttccaggggtgagcgattggttcttttattgggtatttcagacagtcttggttgaacctaccctcgcttacgtctatgtctccttgggactgagataaaggagagtatgaataccttttaggagaaaatgcatggcagaaatatttgctctcttactttacctgggcaaaggacatgaagataatttttgttggaaggaggcgtacaagttggcattcaaggaaattaaagttaattctggcccttatcagttggtaagccttcaaatttattatttcagaggaaaaattgagtactggtcatcaaattttagttatgtctgggattaagacatttggcctgtggggcccaaatgcttttcaagagcttaggaagctacattttaaaaggaactgtataaactccaaaatatataaagataactataaaatcaaaaatcatatttaattatacgtcttttaaatttaacctatatcagctagttaattacaactcaattcaactttcagctgggtgcagtggctcatgcctgtaatcccagcactttgggaggccgaggtgggtgaatcacttgagcccaggagtttgcaccctgggcaacatggcaaaaccccatgtctactataaatacaaaaattcgcctggcatggtggcacatgcctgtggtcccagctactcaggagtttgaggtgagaggatcacgtgagcccgggaggtggaggttgacgtgagccgagattgtgccaatatgctccaatatgggtgacacagcaagatcctgtctcaaaaaaaaaaaaagcaacaacaacaaacaactttcatacagttttttggtatttttttttcaaagatagtttttagtatgtttgttattttgtgggtgtggggtcccacagtaagagtgactaggccttgtggtgaacttaacatagccccagtggtcagtgtaaggagccccagatgcaactgggaactcaggtagtattttcactctgctgtgatagtgtcaatataccagggtccagttatttctctacaactgagattcatcacttttcaagaacaactctctggctccaggttgagcctatgtcatgcacttggcctccagagccatttccccaattctttaagacaacacctcagtccttactgaagggcatttagccagctggcctcattcatcatttccttttgagattcctggcattcatggccactcctagtggtttctcataagtgttgaaaagagaaaataaagaccaaacccacaagccagtccctggggaaagagacaagcatggctcacagtgtcctcaggggtccccttcagtaggatgatgggaacccagcccatgaaagcagccaacccccgccccaatgcaaaccaacaacagcttccgtaatcccctctatcaaaggcaaccgggaggtctcacgggatggggctggctgcttggagggcagccaaagccctgaatggctatccctgagcacccctaagcgctgcttctgtgtacccaccacaatttgggtccccattcagagacacaaatgttggggacactcaagtgctactgaggttggctttgttgtcattgcttccatgtgggaggctcgatcgggagtgcctttgatgtggttagggcttttcctgggagcacttgagcgttcgtgatttgagagacattggctgcctgccttagccctgggaggtgttaacacacttgcttattcgggaacctagacagtgcctgtggcaggcttggccagcatagccaggcctcagtgcagctctcacaccgtgggtagatcctgcttaatttgacactggcaaaacagagctgtcattttcaagtcactaaagtcattaggcaggtgtttattgagtgactgccatggactttatataatatgcaagggctataaaatatctctgggcactgcataatgtgatattctaactaaggactgcagacagaccaacagaacatagagtagaaacaggatgatgtgattaacagataaagaggttgtatcagttcactgttgctgtgtaacaaaccaccccgaaactcagtggcttaaagccatagtcatttattctcatttgtcatctgaaaatcagttgaaggttggctgatccatgccaggctcagctgaatggctctgctttcagttctggatctggctggccttcgattctcactgtgggtttggcttaggtctactccacatagttcattctgggatccaggctgaaaggatagcagctacctggaggaggctttgctcacattggtgacaaagacacaggagaaaaagctcaaccactcaagcaccattttaagcctgtgcttgcatcacatttgccaatgccccgttggccgaagaaagtcacatgggtaattttaaagtcaagctgcaaggatgtatagtctgcctaggagactgtcttggtctattttctggtgtttattacagaatacctgaaactggataatttataaagaaaaggaatttatttcttacagtcatggaggctgagaagtccaaggtcaaggggctgaatctggtgagggacttttgctggtggggactctctgcagagtcctaaggtggcacaagtcatcccatggcaaaagggctgagcatgctaggtcaggtctcttttcctctttttataaagccacaagtctcagttctttgataacccattaatctgttaacccattaatccataaatagattaatctattgatgtgggcagagtcctcatgacccaatcacctcttaaaagccccactcctcaatactgtcatattggagattacattttacaatgtgtttttgaagggacaatattcaaaccatagcagaggccaaaaggagtaatcgcatgaacaaatccaacatcaagtgggcaggaggaagactcctctcttagagagggcaggagagtgtgaatcccattgaacaataatctcatctatcccctggggtcaggaagggccagtgaaggaagataagaggattgggagtgagaggaagtgttccaggcactcagagaaggaagtcagaaaaatgagaacaagtccttttgccatagctgccaaaaaaaaatcagacccaaattcaagccccgattttatgtttctcagactgagaaaacacaaaagccatcgctcagatggtttggaaaacatttgcaaggtcagctcatttcatgatgtttgattccagtactggcacttggattacttgtgcatctttgagatgtcactgaataattatcaccacacttttaggatttattgagaatcaggctaggacgtatttcctcatctcacaaaagaaagctaggagaaaagcactatagacatctccattttacaagtaagaaaatagagtctgcaggagagtcagctgttcagcatcactcaggtagaaagtggcacagctggatgtagaagctaggctgccagattccagagcctgcactcttaatcctgtgctgcccagataacgctgactgctttgtattaagaacttacattctcccacttaattgggagcaaggcagattagaaaccctataaggtagatgctattcatgtgaccactttacagacatgaagactgaaacctgagaggctaataaatgtgtctgagatcataaagctgttagatgatagatatagaagagtcttactccaaaattcctccccactgcaccagcttcttcatttataaatgaggggcatagccaaagttgtcttcaggacttcttcagctcagaggctgttgttctgtctctcccagttttttttttttttgtttttcccctcatttggctcctgttttcagagaagctggttggaatgcaaaggggtgtgcaatgcattttacaattcccctggcccaagcctgtcagtggcttttgcctagctggctgtagtgtaggttttgtaaacttttgagtcttctggagcctgtaaggtgtcttaaggcagattcaagttccaaagacacaattagccagagtctcccagttatttatgggaaccacagttgcaaccataacaaacagctcaggttacaaaagtaattatagggaaacacccagtgttggaaattaaataggagttggttagcagaattgctgagaggagggaataaatgaatgctttccctataacttcataggagctcctttttatgtctgccatgcggtgagcagttcattttctctaaagatactcaggaactaagaataaacagatgtctagaagaaggcagctgggtgatggagatggggcagaagagccttagactgggaagacagagccaacatttcgaaggacaaaaatctcacctccttttacaacaaagggggagatccttgggatgccccatgagctccatttcagagaaggcaacactgacattcaaatcaggtgatctctctaatttagcctttgacagttcctcactatgccatcctgttgcttagctccaaccttggaaaatgtagactttactgttgcccaactctgtattttcttatgagtcaaccttcaatgaataatgcaatctaagctttcacagctgaataggatttcaaaataatacaggctcagccggacttccagtccccagtcctgcatgtgaagagcttggaagtcattgttcctgtcctcaccacaagaaaaacgctgaacaaactgaaaatcagcatctcttcttagatccatcagaaatgaggttacagggcaaaccactgcccccaaaattggagagacaggcaggcagatccagagaatcacaccttactggagcagaagcccaagagcagaaatggccactgaagtcagtgcagggtttcttttactcagtgcatcaacaaaaatttgctttcaataaaaattggaaatcatacttgaaaaaacgtatagcaggccgggtgaggtggctcacacctgtaatcccagcactttgggaggctgaggcgggctgatcacgaggtcaggagatcgagaccatcctggctaacacagtgaaaccccgtctccactaaaaataaaaaaaaaaaattagccgggcgtggtggtgagtgcctgtagtcccagatactcaggaagctgaggcaggagaatggcatgaacccgggaggtggagcttgcagtgagccgagatcacgccactgcactccagcctgggtgacagagcgagactctgtctcaaaaaaaaaacacagcatacagatagcaagcatcagaaccagattcagatacggcagagatgttggaattatcagaccaagaatgtataaaaactatgatcaatatgcttagagttctaatggaaaaagtgcaagaagaggtgggtaatataagcaaagagatggaagctctaagaaagaatcaaaaggaaatgctaaaaatcaaataccaggctcttggttttaggacagaaaaaaaatcagcccattatacaggtatgcaaacagactctgccaatgacttggccaaggttacacagttagtgagaaaataagcactgagatgcaggtcttctatatgtgcataaagtgtggtatacattattccctccagccttgattcgataggcatttattgaaagtttcctctgtactgagcactgagctaaacaactggaatataacaataagtaagatggacttggtctctgtccttatgaagtttatagcatggaattttcctcacttcctcttgaaccataccaaataatgtccatggataatcaagcattgttaaatttcattttcaacttgaatttcatctccacacatttgtgtgtgtggaggaactcagagtttcatgaaatcattttttcagcaaatgcctattgagtgtgctcatgtgctttgcactgtgctagaagccaggggcatagaaccctgtcctgtgagtttacattctggccagagacaaagcagccaacaaaacagataaaggagtgcatcgtacaggtgacaattgcttcgtggtgaagttttcatgttccaccctatttaaatattgcccccgcctgcttcctggtacttccaaatgccattttctgctttctttttctccatagcaaaaatcagatttgtgatgtacgtaggggatttgaaagatccggtgacaagatggacatgtggcaaagagaggcaaataagaatgatgtctgggtggctggcagttcctttaactaagccggggaagccttagaggaacagatgtgagggagaagagatcaagctgaggtttggacacatttgatctcagactcctggagaggagacgttccagtggaaatgtcaaggaggcaaaccaaagccttcatctctgcctcccagacagcccaatttctacaaagcaaacgcctcacttatgtagatgagaggtagcttagcttttctagtacactaaagaacccaaagcccagcctatcaattagtttgcatgagacacactgcgatggcacaattgattcccttggagtggaatatcatgcagtccacctcaaaggcaggccacaagattttaatgcagctgtctccaggcaattattaactttccttcttagcaacaggaccacggcactttcattccttgaaatgacacttctctcttgttaaagcccacagttaattttatgaaccgcaccaatttaacacccagttcacatgagccgtataccttgaataaatgcaaatccagtctccgagacatgaattatggccttatgctgagcatcaccatggcaactaatgacatccccccacccccgaccccagcaccaacctgcacaaaatccaattctccaagggtccttatttgcctaacgtagatgtgttcttggcttactcacatatgcattcgtaaatatcactctgttgtcaaaggtttgcagtggatgtttactgtcattttgggaggtatattccctatgtggcaaatgttgttttttgttcatggggggaaaaattctaatgaaaattactgtgtgtatttgattagcaacatttgttgataacatatggtctgaggaggcttccgcaaataagaggctttaaatagtaaacagagatgcgactgtgatcaagcagatgctccccaaacacagagaacaaggttgttttacccatagatttttctgagctccactctcccaaaagcatattcttctccctcattttctcccccagatcaaagtgttcactttcaaagtggtggtactgtggaacaggtttggagaaataatgtgctgtgactttaaaagtcatccccatccccctaaatatgaatcatctgctactcatgtttattatttgatattaataatgatgtagtgtgactaaatgagtcagccagctcaagtggatcaggaagcagcatttgggcaccacgtgtctgaaatgctatgatacacaagccccaattttctaataaactaagagtgctagaaagagctccatgaagaatttagagcagcaaattggatccccatggggtcagctgtctttgtgagtgcatgtttatagttcgtctttgtgggtatgcccagatgagcattctgctaatctgctaatgaaaataaaagtatttccattaggccaagtcagcaatttaactgtttgtaacagagatcggcaaactttttctataaaggaccagaaagtaaaaattttcggtttgttggccctatattctctgtcataactactcaattctgccattgctgcacaaaagaagccatagacaaaacaaaaatgagtaagctaactatgttctaataaaacgttattgatgggcatcaaaatttgaatttcatataatattcatgtgttgcaaatattcctttgattattttcagccatttgaaaatacaaagcccttattagcttatgagccatacataagcagacccatacccatggccatagtttaacaacccctggtctataatcctaaaatgaagacttacattttttagtgctttctatgtgccacgtattgaggtaaacaccacatatccaatagcttatgtcctacatatccttccgtcaaggactccatcctctgggtcagttctatttttttaagagactgggtatcactatgttgcccaggctggcctcatactcctgagctcaagcaatccacccacctcaacctcctgagtagctgggactacaggtgcagaccactattcccatctggctatatttataataaaactaaatattcttatccccaatttatagatgtgaaagctgagacactctcacacgttataagtgttatttctgcacggggcatctcccccaaaataatgtaatatccatgggggcaaaacttacatctcactcacctttggatccatagcagtgcctatcatagtgatttgcacacagtagacattcaggaagtgtttcctaaatggagcactatttggagatagaatccctaagcagtgaaagttagagcctcatctgatgccaatatggcgcttttagattagtcagttacactgttcatctatttatttgccaccctcttacaggaagtatttggtttggaatagacacacatgtcccaatacacattccttcatctttggaggtgcctctatgggtgatggcatttctacagtctctgcttatgtgcttgtggctgaaaagaccaaaagtaataatagcagcttattatatagcttggtggcactttccatcactataccgttggcagccacattgctgccagcccttggagagccattcctcagccttcatggattgacgccttgctcccaagagagctgttgcatgctgagtatcctctgcatgctgccagctgctgtgtgcacttcagagagtttgtctgctcaaaaaaaaaaaaaagaaagaaatcaactcctcaaagagataaaagccctcagttgaaaggggcagtcacacctttggttatttcatgtgtctcacctctctacaatcccctgaatttagtgacatggttattctgaatttgttgctttcctagttactaagcaaatatttactgtgttccaggccctgtgttgggtgccatgtatatcattatatatcgtacattatatatattatatatataatatattgtatattatatataatatggtatatataatatatatatattatatattattatatattatatattatatatataaaatatattatatatataatatataatatattatttattatatattatatatattatatatacaatatatataatatattatatatattatatatacaatatatataatatattatatatattatatatacaatatatataatatattatatatattatatatacaatatatatattatattatatatattatatatactatgtatattatatattatataatatatatattataatattatataatattgtatatataatatatattatattatatatattatatattatatttattatattatatattatatataatataataaatatataatatatttatataatttgtataatttatataattatataatttatattatatataatatatataatatatatgtaatatatatataatatatataaaatatatatataataaaagaaaccacagtaaagcactctcatttaatgcatgggctttgaggtcagaaactctgagtttgaagcccaattctgtgatttgtcagaaatattaattgagataattcattagaagcactaagcccagggcctggcaaatcataagtactcaataattggtggctatttttaacgtttatgtaagctagtcatacagtgtgagtacagtggaggaaaggatgggatcacagaatagggacacctaacccattttacattatctacttcatcttcagagagaagttagtcagttaacctttccaacttctgcttgcaataaatattatccacctctggtcttttcaaatcaaaatgcaattgtatttcagttctgggacactttaaagaggtattcatcttaatagccacaatcagttgcacagcaagggcaaagaaatgagcagagaacaaaatagattcatttttgggtgtgtggccccaccaaaaggccaaggtttttgatgcttcctccactggctaatttgtctgtctgggatatagtgctctgtgaagtatattgaacacgtgaaataaattcaaagtaaaaagccagagtggcccaacgtcccaccagtcttgaaacagaacttcccttttcagttacagaggtaactcatgttgatttaatcaagacataaagcagtgaatgatggaatgagcaagggaggcaacatggtggcctgattaggagtttgaattctgaggtcactaactgccatttactccttgtgtgtgaccctgaacatattacccagcctctctgtgactcatttataactctggaggtgataattgtaggcatttcacaggatgtccaagaggctttcaaatgatcaaatgcatgtatggctgtgtcccacttttgagataggaatttgtgcctagcacatagtaatctgaataactattagctatttctattacaaatatagccagatctctccgtggctacaaaaggacaaagaatgaatatttttcatgacattttttcctacagaggaaaggaagataaggaagggtgcaaatatttaaaccttcttgattctactaagagtaggaagcattgacaaaaaaaggccagaattcccacagaatccaatgactgtggctaagaccaaaagtttcatgtcaacagccagtgtcagccaacatccacttctcagtccaggctaaccagactggggtgacattggatcagagccagcttgaggggcatgtgacctgtatagctgcacatcttctacattcagaaggggcccccatttgatttaatgctcttttgttgccatctcgaaattcttaataattttatcttcgagcttgtgtttgtgacatcccatggaacgatggactgtggatttgaggagaggaaatactcaagaaaatgaaaatgctttatattttagtaccttgaatggcactttttgtgtgtgttttgttttggagttttggagtttgctgtttttttaacaaggagatctgcattttttatttgcactgggccctgaaaattgcacagccagtcctgattagatgagagaacttctcttttggcctgcttcactggaccaggttaccattttgaaatctgatagttaaatagttaaactgggattcattagtgacctgacagcttgaggtgagccaagggtcatggtgggaagcacagctgcaggcctggtggaagggaaaagaaactctgtgtccaataggatgggggttgtcagggcagcctccagcggcctgaattccgtccagctgatgggttctcggaagcactgactgccccacagtcagactcttgttacacgccttatgagctgagcatctttgggtagcagcaggggttcaggcatcctgggttggtacccactgaacatgccaagaaatccatccacactgaggacagtagcatggaaacatacagtggggtatctgcaggacactgggctcaagttctctttgtggcttagtgttaaagcttctcatttcagaactcttttggtttccagcagaaatctttctcttccccatgaccaagtataatgaatgcccaaagaggtatcttttattttatttttatttattttcttttagagacaaggtctcgctctgtcacccaagctggagtacagtggcgtgatcatagctcacagtaacctcaaagtcctgggctcaaagtgatctttaggccttggcctcccaagtagctaggacttcaggcatgcaccaccatatgcagctaattattttactttgttttttgtagaaaaaataaaaagcctgggtctttctatgttgcccaggctactctcaaattcctggcctccaaaagcactaggattacaggagtgaggcaccacacccagccatgcaaagagattaatagtacaattaatcataagtaaattaatggtcacattttttccagtgttgctaatcactaataatgcttattactgataatttttacaataataacagcaacagctttaaaatgagattttgggttctggtccagcttggtcataattccctggaataaaataggcaagatctttgagtgtctcttcagttttctcatctgtgaaatggcaatgataatagctattttaccattcatctgtgtagtagaaagggcagtgtcaatcttgcttcctttacacagggtcagttacttagtaagtgcttgataaatatgtgttgggtagaagccacaaaggatacaaaagtacagcaagataaggggactgatttctagtgttctctagtactacagggtgaatatagttaacaataattaatagcatattttcaaatagctagagaggattttgaatgtttccaacacatacaaaaaatgataaatatttgaggtgatggatatgctaattactctgacttgattattacacattgtatacatgtagcaaaatagcactctgggccaggtgtggtggctcatgcctgtaatcctagcactttgggaggccaaggtgggtggatcacttgaggtcaggagttcgcaaccagcctggctaacatggtgaaaccccgtctctactaaaaatacaaaaaaattagctgggcacggtggcgggcacctgtaatcccagctacttgggaggctgaggcaggagaatcacttgtacccgggaggcagaggttgcagtgagccaagatcatgccactgcactccagcctgggcaacagaacgacactctgtcaaaaaaaaaaaaaatagcactctgtaccccattgtattagggttctccagagggacaaaactaataggatatgtgtgtgtgtgtgtgtgtgtgtgtgtgtgtgtgtgtgtgtgtatacatatatataaaaacgggagttaattaagtattaacttacaccatcacaaggtcccacaataggctgtctgcaagctgaggagcaagaagagccagtctgagtcccaaaactaaagaacttggagtccaatgtttgagggcaagaagcatccagcatgggagaaagatataggctgctggaaggctaagccagtctctcctcttcacgtttttctgcctgctttatattcgctggaagctgcttagattgtgtccaccagattaagggtggatctgcctttgccagcccactgactcaaatgttaatctcttttggcaacacccacacaaacacacccaggattagtactttgtatccttcaatccaatcaagttgacactcagtattaaccatcatagctataaatatgtacaattattacatgtcatctaatcattaaataaataaatataaatagataagcaataatcactattactagaatacatctccttaccttgggaagggaaagtagccaaaatttgttgggttctcaacctgttccaaacttgcagctgtttgttctttacaactagtctgtgaaattagcttattttatagctgaggaaattgacagggacattaattccttgccccaaatttcatagtttgcaagtgactaagccagaatttgaactaaaggtatctggttcaaaacccttgccattgctaagacaaagatttccctatctcggggtcttgctgcagttgctgacaaccacttaggagcttctatctgtacctcaaacgttttgctaatgtgtttgaaacctgtcactttttgtcctatctcatggcctcctccatgtcctctctgtctctactatgactgttgtgctttctcagtggtttcatgcactgagatccccgtggatctggtttcccctcatctcaatttttctggtcttcttttgtcaactctcactagattccctgtgtctttgagttaataggatttatttgattgaaggcaacactgagactaggatgcaggtttccataatttacaaaagaagaatgcaagcagccaacaaacagggtaaaatgttcaagcccactagtagtcaagaaaatatccatgaaaacaacaatgataaaataggccagaagaaaaagtgaatagtgatactcagaacaggcaagaaggaagccctgtgatttgaactctcgttcccaaatggtggcaggatagtcactgcctttgtggaaagcattttgggaataggcatctcaagccttgaaagtgtgcattgaggaacacagctcctgcaacagtgtaagatctctaaatttttgttgatggaagaagtgatctcccagctaggtctctatcccaaggaaacaatcagagatgaaatcaaaaattaatatctaactcctagctactcaggagactgaggtggaaggattgcttgagcccgggagtttgagaccagcttggacaacagagtcagacccccacctcaaaaaacaaaacaaaacaaaattaatgttcaattctatttcaataatagaacaatggctaaataaattatggtacatatagaaagtgtaatattatagaatcattaaaaatcataatgagggccgggcgcggtggctcacgcctgtaatcccagcactttgggaggccgaggcgggcggatcacgaggtcaggagatcgagaccatcccggctaaaacggtgaaaccgcgtctctactaaaaatacaaaaaattagccgggcatagtggcgggcgcctgtagtcccagctacttgggaggctgaggcaggagaatggcgtgaacccgggaggcggagcttgcagtgagccgagatcccgccactgcactccagcctgggcgacagagcgagactctgtctcaaaaaataaataaataaataaaaaaaataaaaaaaataaataaaaaaaataaaaaaaatcataatgagcattttaaagtatggaagttggtcattgtataaagtaaaatgaaaaagttctctaaatgaaattgtatctatgctgttttctagtgctgtaaaagacattatatttggcatctttcatttattcaacaaatatttgttaagttccttctatatgtctagcactgtgctaagttctgggtatgcaacataaaaacacagtccctgtgctcatggagcttacagaatattaggggattctgctataaaacaatgacacaaatcaataacttaaatccagtgattgctaagatgcaaaattaaatagtatgctaaagagaggttaataccagaacccagtttagattgggagatcaaaggacagtggttttaagctgagccccaaaagacatagcccagtgaatgggtggggagaaacattgccaacagaggaaacatacatgtaacaggtctgagatggcagagtcaggaggcttgtgagattggagcagatgagtggcagtccataggtaggggtccagattgccccctgagtgcaatggaacaggtgccctggacctggggctcagtgcaatccagttaacacttctggaagatcactctgcttgcaggcacagaatggatagagatgaattctctgtaagaataataatgagtgaatgaagaggctgcatttgaagggcacatcaagggctcatgtgagccgcacctggtgctctacccagattttgggtaagccaggctcccgtgtgtggaaaactgagactccgatatccacaaactatgagcagggaatggcatttcccacatcctcatccttctcccttccaatctctctttgaccttaacagggtggagctccataatctccttattcaactcatctttgaatgccagtgaaaatggggctccccacctccccaccactattgttgaagtctcatttgaaagtcaggtgttggcttgaaccaaatgaagccccatcccaagatgtacaactgcagtttccatgaatgaggaagtcaaaggatgcaatgaaatattagtgatttccctggaatcgtttgtagatacagcaaatgcatgggaacaagttctcaccaacatgagtttatgctaatttcaagtcattccttatagtgctctgtgaagaccatggcaactttctgagcatctgtctttcatttgcctaacaagttaattaacacgtttgttactctggcagctttgaaggggaggagaagaggatgtgacagctaatgctgccttgggttaaccctgcattcacctgacctgggaacaatggaatagtttagactcatcaaggcagatatgtctacaatgacctctttgattctgtctgcagctggggcacccagggtgacttctccacaacccatgcactgccagctgtgaaggtgaagctgttcacagagagcacaggcgtcctggcgttggaggacaaggagcttgggcgggtaagcacttcttatcacaaggggaactccacagagaggatttccccagctaggtctccagtgcacaggtcaccaagaggcagcattgccaagtgctgagaggctcagttttgaacattaagtcctggactccactctacattggctgggtgaccttaagcaagttcctcaacctctctgagcctcagattctcttctacaaagctggactaacaagagtgtgccctacaggagatagagcaggagttctcaatactatcagacccaaacatcctttagagttaagatttgtaatgtcttttactgtcttaaagtggagttcttagatgatttaactgcctgcccacctgacaatgttaaagtcaacacaatgacataagagagaaacaaaaggaagtaaattaataataaaaaacttcaaaatgtacatactcaaagatctaatagaggagtgctttgcttgctcccatatgaagagtcactgtgaaggtgacagctacaaaatccactgtggggtgtggatgtatgctgtagtggtgactcctaagcctgaggatcagtaaaccgatttactgacatattaagcaatacttgtaaagtttccttgatttccttagaaatgtgccaaaaagactttgatttgaaatgtaagacaagagttaagatctccacgtagttcattataaacagattttttcacctccaccaatatcccatgggaatattcaaaagtcagatgggatgcaggaagatgcctcactaaggagcatcatgtcattccttgcaggatgtttagcatccctggacccacccactcagtgccaacagggactggcaccaattattttgtcaatcaaaacatcatgaaaatttctgagacatccctgagaggtggtaccaacccccttaaaaaccacagagataatagtgaaatttctgtttgcatctgaaccattgactctgcaccaagaagccagtaatattttcacaagttgattttgccaataaccccacctgcttgtggtaaaatctgaactcgtttaatttggcttctgctcacctcttcacccccatctgctgccacattcctccccgcctactataccccagcatcattggccaaatttcaatccctcatataaaccaaattctctccctcctcaggggactttctatctgttgtcatttccccacctcccaacccttcaaaaagcataaatgcattctctgcataaatgccacctccttggagagtcctttcctgacagctcagtccccttcatttgctatcttagctccttgttcacatatactactaaagtgatcaccaatgagagaaagaaacagaattgacagacattcaggcttctgtctgccccactggactgtaaaatctccacggagacagaaacctaaactattttgttcactaccttatacccagagcccagcacatagactttcaataaattttatttcagccaggcgcggtggctcacgcctgtaaccccagcacattaggaggccgaggcgggtggatcgcctgaggtcaggagttcgagaccagcctggccaacatggtgaaaccccatctctactaaaaataccaaaaaaattagccgggcgtggtggcaggcacctgtaatcctagctactcaggaggctgaggcaggagaatcacttgaacccgggaggcagaagttgcaatgagccaagatcgctccattgcactctagcctgggcaacaggagtgaaactccatctcaaaaataataataataaaataaataaataaatataaattttatttcattctggtttaatgtgtaatcactcctgaaagctacgtgatctcagcccagagaatctctctgagcctctgatataacatctatagcataatgagagaccaccccagacaagcacacaggcacacacacctaacgatgccagcaagaattcatctcctgtgcttcctttttttcttcctttctttcacccatttttccaatctggctttcatctatagaatcaacctggagtcatattactgcagcatagactacagatggagataaaacgaaaagtaaataaagctaacagcaaaaacaaaaaaacagtgtccctacccagaaaagtgggaggaaaggggatgatgaaagaaaataaaaggtttagctgttttctttgagaaacgatactcatttctgtccctagggaaagagagacacacatagagtggaagaattatcctgcctttcatttttcttcaaatttctccttttccagtaaggcagatgttaagaatcacgagtctcagagatcctgaatattagtgttagaaggaacaagtgtaactgaccagcgcaggatgctcaacctgggtccacaatgagcctccgaagacccaggatccaggatgccctggaatttttttttttttttctttagctggagtctctctctgttgcccaagctggagtacagtggcgtgatcttggcttgctgcaacctccacctcccaggttcatgtgattctcatgcctcagcctcccaagtagctggtattacaggtgcctaccaccacatctggctaatttttgtatttttagtagagacagggttttaccatgttggtcaggctggtctgaactgctaacctgaagtgatccgcccgcctcggcctcccaaagtgctaggattagaggcatgagctactgcacccagcctggaaatagtttacagatgtgtttgtgcctgggcctatatgcatttttctggactggctaccaaagcattcactgacttctcaaagccatttctactcagaaaagttaaggccactgacatattgaaatcctttgttttatagatgagaaaacttgctcccatggaaagcgggagacctctccagagcgatcaagccagtcagggacccatgcatgggccaggccactgtcccaaagactttgtgcacagcccctcagtgctctctcaagacaaccctactgaggcagccacagtcatcacctctcttgtacagaagagcatgctgacgcccagagggttcagttacttcaggaatcatgttgcctcatctccagggctatttgcactacactgtgttgtccctacacaaaaataaaaccctgggctgtgctgtggtggtgaagaccatgggcttgccacagccccacacacactcatttcataatggttcattctcttcttcaggcccctcatacattcccccagatgctagtttacccctcctttgtgccaaagaaactttctgccaattgcagcggagctggcctgcctggctcttgtgctggctggacaccctctgctggcagcatcttcatgggcagcagctgggtgacctaagagtgcagtgaagccacacttggacctcacgagagagtgtttctatgctcgaattcttcccacacttagcagacctgtgtttagaatcctggcgttacatttacttattcaaccactttttggtttgtttctttagggttatgttttgtttttaataacctttttaattaaaaaaaaattcatgcacattgtgaaaacaagttaaaattgatatatagtgaaaattaatttttctcttctatctcacgctagtatcccttcccagagaaagattttgttttcaatttatggtatccttccccaaatagtctctgcatgtaccaacatagcgtatataagcacatatgtatatattccccctcttttaaaaaaagcacagttggaagctactatatacacacttctctacatggtgcctgaaatcattatatttggtgattagttttcatatgaccctagactgacctgtctcctttttacatagctacattgtattccattatgtagatatattttatttaacaaatcctctatggatgaatttttagattatttcatctttggctatataaacaatgcttcagtgaatagccttgaatttatttatttgtatatgtgtgggtatctatagaataaattttcaaaaaatattttgctgactgaaatttgaaatttgacagctactgccaaattgtcccctaaagtgcatgcaccaattgatccttccacaaaaggcataagagaatgcctgttttcctgcatccttcccaaccctgcaatattataggattgtaggccctctgtgtccaatcatttgtcctgtgcacagagcaaataggaataatgactggtaaaaaacccttaacctcacaaagcataagggacacagacataaaaacagaaattatagtgcaatgtgggaagtgttctgctaggaaaaaaaaaaaaaaaaaagaaagacctggaaatgaagcacctagcaaaaaggcagaatccagtcatacagtctcagggacagggattctttcctggggtatgcaagaggtactgaagagatataggctaagtcgaggaggggatctgtcaggtaaaggctgagggtaaagcagccccctagcaggccctgcctgtgtgcccaggcaactaggagaagccacggctggctggagtgcagctacttcagggggtgggtcgtggcggccacatcagcatccccacatcaaagtgcagcacacatggtcctcggctgaattgacaaagtgcttgattagcagcctggaatgtccagatgaggtgtctggtctgcttgggattcatgtgcacccagaaggaccctcataattcagcagtgctgacacatacaaatgagtcatcagcctgtcagaggcatggcagggtgggggcaaagacagaagagagctgtggtcacttcatctctccatccaccctggaaaagagggctccccagcaagcagttgcacaggggacgaagtctttgtggcatagccggtaatgagctgcggctattgcgtcacgaatggacaccatattgccagtgggaagcacgcccagaatccatatggcgaaaggcctgttaatgagctgcgggtgcccagagcactgctccctctgtgattttgccaaacaggcaggagcagacagaagcccagggcctttcttacttaccgcggttctggccctggatggggtgtctcttaccagcacctccctttctggcttcccagcacatctcacccctacctctctcaggccagaccagctcaggatggagggtcagcttcactgaaatcagcagctcccacaaagtgtcaggcctcgggatgtggtacatgatacagggtgacgtgtaagaacaggcagttcctggagaaaagggagaggtctccacaacccagcagtgccctatctcactcatttcctcccagcatctgtcctatgatatgttgcagttctctggtgccagttaagtgaatttatacattttatgctggagctttaactaaatcaacctttacaaaataagcgacctcagaagataactgcacaaaagctctgatttggaggtagtactagcaatgcaagcctggcaaacaagaaaatggtggagccaacacctgacctactggcaaacactctgtcactcatatcatgagataaaaacaatgccaatgtaatcagatgggacaagatgtcagtcaagacatgatgaaattattgagaagacaactcaaactacagatttataaccaatgtcatcaacaatgtaccttgccctaaatatatgtggtaccttaaagatagctaataacaccacagccaccacaattagcaagttattccaaaatgtagatttttaaatctttagcccatctttgatttttgtatattttatgatatatgtgataaggtaatatattaatacaaagtaaacttatgtaatataaaatgttagtatacagatactgggctaattgctcaacaacattgtactaaagtagggcatgatcaaaaaacattgacagcctctgttctgaaaaatcaggcttttctgtatttcaatcatgtcataagacagtgggaagacttgaaatctgtggttagcaagaatgtatatttcatcagagacagggaacttaatgaagaaaaagggtcaggcccagaaagagaagggctgagaaatcggcataaatgaagcacatctaagtgggctgatttttttttctgccatggcctcctcctcctcctctcagcagtcttgtttcacaatcacacagggagccatatgtgtctgcccttcaagcatgggccaagcttgcatgactagtgaagctgatacagcatctagaaggccagagtgtccacccataagaccatgagcccctcacggccacctccagaggtgaaagaagcccaggaaaggggcctgccatccttgcacctagagaaaataaatactttgaaaacagccaaaacaatgtgccacaaaccagggcgtgctgccatcacagaagcaaatcttagcaagcccagcttttgttgtgcctatatttagttcatgttcccttagtttcaaggattttccaaatattcaattcctccctaaatgcatattccccagatcccatgtgtctcctgagaactccgtgatcacaaagcgaaaagtggatttagtgagttactcacttcctgtttcactctcagaattccagacaataagaatggatgcagaagacccaaatcaaactgccatctctgaagcacactgatgaaaggcatttcctaagaaatggtccttcttcaagtcatgtgtgctttcctccatgccagggcaaagttggatgttgtgtgataagatttccaggccaggtgaaatcaggttgaaatgtgtgactccaatcaagtccctttccttccctgagtctcacatttctcatccatctaataaggttccttccattttcccctgggggccttgaggaatttctcctcttgaaaagtgaaagaaatcctaaagaatggagaaaaagagtggactaaaaggactgtctaatatataagcatatttcttccttttatgcatccatcttcttatacaaagatgtagagaataatgtgtggacaatattctccattctgggtttgtttagtacgtctgaacattagaaaagtcaaagcagaatcacagagatcatgattttcatgacagaatcatcacagaattacagaaatctttacttttacaaaattagccaggaaggatcaaaagaatgtgtttctatccccaggtatggctgctccacagtgggaattgttcaagtcactccactactcagaatcaaagtttctaatctataaaaacataatggtgcttctcttttctagttgcttgtcctttttcccctacaggttattctccatcccaccccgaacagccccaaacagtcagagtggcacaaaatgacagtctccaaaaactgccccgaccaagatctcaaaatcaaacttgctgtccgaatggataagcctcaaaacatgaagcattctgggtaagtgtttcttccccaactagcagttttggacacacgtctgttcatttctcaaaatgaaaacaaaaataaacacaagatcttcagagaactatgtagaaggaaatataaagaattcatattaaaatattcgactttgatatttactgtaaacttcctcaattcttaggatgactgtatttgcatttttgctgtcaaaatagaaaaatgtccttctctttctctaatacggtttctaggacaattcaaaactttcctagcagcatgctaggtgattctagtttggagaggtcttacaggctccgcgtaccttgtcggaggcatccagatcattcaaactctgcatatgactcacttgcacctcaatcagcaacccacatctttgaggtgtgagcagcagggagaggccaccttcaatcaactcacatttaatatattttagtatttagtgcagcatttaaatgaatgagaaaaaaatagaaaatttgtgatcatcttcattttcttaaggtttgagaaaaatgaccaattaatttcaagtaaagcaaaaagaataggtaagatgccaaataagaccagtgatttttctagcaaatgtttgttggtgactgagtatatgctgagccatgacctattaaactaaatcacatggatgtcattatctcagaaaacatgataatcgtgtaactctgaaaagggaaagtttagtagaagggaatggagtgtttggcgggtattctgcaggtacgctgccaactggctatcattctgcttagcccctctgggccctagagaggtctcgttaattcttttttgggtatatgtatattgatgataaagctcaaagtactaaaagtgccattaaaaatgagggttacggctgggcacagtggctcatgcctgtaatcccagcactttgggaggccgagacgggaggatcacctgaggtcaggagtttgagaccagcctgaccaacatggtgaaactccatctctactaaaaatacaaaaaaattagctgggcatggtggtgggcacctgtaatcctagctattcaggaggctgaggctggagaatcacttgaactcaggaggcagaggttgctgtgagccaagattgcaccactgcactccagcctgggcaacagaatgagactccatctcaaaaaaaaaaaaaaaagaggattgggtagatgtactagaggtttggggaattcacaaacccaatttcagggcctagccgtgattaagacaggtctaaacagaagcccacatgaagtccaggagggcgtgaccaggacaggaattgaacttcccagtagatgagcagaccacagcagcatgcagtcagatagtaaagaacaggagcctagccatggtgcctcagagttctaggaagcaaaaaaaagcccaaggttccagagaaaaacaaagacctaccagtcagggcaccagagaggttcaggtatgaagggttccagaggaagcaaaggtcacctgtgagctggagaccagtgactcaacccaaggtttggtttggatttagagaatttgctttgcattgtcttgaggccaaattatgccaagcctgagctgggattatggcaaagctcttctgcctggggtgtgaaaaagccacaggagcatgtgcagggccctaaggacacactcagtcctttgtcaagtgtccaggatgaagtacaaccaggttttcttcgattaaattagaatgccgtgaaacattgctgaggtctaccgttcttccttcttatcatgctcctggtatatattctgacaatattcgtggaatttctccctaatatgtcttccccctctgtgatgaacatcctactttcaagacaaaggagttgataattcagttaggtttctgtagtacacaagagaagatcttcatctttagcaaaatcctgcctcataaatactccataaatatttgctaaaggaaccagcacatgagtgagcagaacagacgtagaaagagagagagagagagagagagagagagagagacaaagagggtagggcagatcaaagagagaaaataaagaacagaatatgaatgaatgtatctgtcctctaaagtgctttttttaaacttcctttaaaaaaatgatcagtgcctcaacctacaaatgagttctctctgaagcactgtactaggagttttattgtgtcacttactctccacagcaaccacttgacacaggtattattttccctattggatgaatgcccatttcccacattctcttcattcactctgctagaaactgaactacctgatttggattggggaatttttgtgttgacttgtttgtaaaattattaacatatttcaggctaccttgaccctacagatgacagaagaaatatgtagctcacttctgacaggtttcatagctatttcatattgctggacttccattttaaaattacccctgccaggagatacaccaagagagcttaaaatagctctgaaaagtgaacggtgagtgccttaataacaccatcggacccaacgtggcctaaatcagggatgagcaaccttagttgcctaagggactattcagagaaaataaaaatgtttatggagtacattttttttccatttaaacttaaaatagttttactgagcccagttgtgtaaaggagggtagaaatatgagagcaatgtcacagcttggaaaatgggagaaaaaaaggaaaagaaaaatttttttgagatggggtggggctctgtcactcaggctggagtgcagcggtgtgatctctgctcactgcagcctctgcctcccaggctcaagccatcctcccacctcagcttcccaagtagctgggaccacaggtgtgcaccaccacacccagctaatttttgtgcttttggtagagatgaggttttgccaggttggccaggctggtctcaaactcctggactcaagcaatctgcctgccttggcttcccaaagctctgggattacaggcatgagccaccgcgccctgccgaaaaagcaatttttaagaagcatagctgaggttataaattgttcccatgttaaggttttttctaacataaaaggaacataagaatcactgggaattatgaatattggtgtgcactgtggttctttgaatgagccactgggccattcagaataactttattgaatagaaatgtgtcaatgggaaaaatcaacactgcttcttgaccttaaaatgttagtatctgggcatatttgagaatcagcaactcctagatgcctttctaattttcatcttttatatctgcatggtgttttcaagttcaggaagtgcattcacatccattctctcattttatcactgaaaccacctcacaaggattaggtattatcattctcccatcttaataaatgcccccccgacacccagatacccagaccaaaaaccttgaagtaatccttgacatttttctttctcatccaccatcaatttttgtttttctttttgagacagggtcttgctctgtgacccagactggagtgcaaaggtgctatcatagcttactgcagccttgacctcttgggctcaggcagtcctcccacctcagcctcccaagtagctgggactacagccatgtaccaccacgcccagctaagtttttttaaaaaaatttgtagaggtgggatctcactatgttgtcttggctggtctcgaactccttttttttttttttttttaattttctaaccaggttcaaaatttaatgtccttattttaattatccaaacagacaatttcagttaaaatttatttttttcttgtgaaaagacataatagaagaaaaataagttacaatttgagatgaaaataattatggttttaggggaaggtagcatcagaaaatgggaatgccagtagaatgagcaagaaagtaggaatgagaggaaaacaaatgcctatcagatttggcggttagcttcatatatattatttaattcttacaacagctctacaagatattagagttaccatttttactaactataacaactagaaatgcaagaaacttcttctttacaccagttaaataggcagatagtgatgaatgaggattccagtgcttatctctctagctccatgatcactctttactgtacctctttgtgctattggactgtaattcaaatgacccacataaaattacttctaaagcacattcaaatgcagattcttgaaacccatgccaaatccagcataagattttctaaggttgtagtccaaatatctgcattttaaataagaacatcagggaaattttatgtctatttaggtcagagatccattgaatactactaaactaactgatttagagaaataaaacttaggcttaatttctatttctaatcttttatagattcattactttaagcaaggcacacattctcttacccttagtctttagcatttgtaatatgtcttcccactgccttatggccttcattgttcctgatgagatattagcagttaatcttattggatttctctcatatacagtcagtggtttttttcttgcctctttctttttttttttatttttttttattatactttaagttttatggtacatgtgcacaatgtgcaggttagttacatatgtatacatgtgccatgctggtgtgctgcaccattaactcgtcatttagcattaggtatatctcctaatgctatccctccccactccccagaccccacaacagtccccagagtgtgatgttccctttcctgtgtccatgtgttcttattgttcaattccgatctatgagtgagaacatgtggtgtttggttttttgtccttgcgatagtttactgagaatgatgatttccagtttcatccatgtccctacaaaggacatgagctcatcctttcttatggctgcatagtattccatggtgtatatgtgccacattttcttaatccagtctatcattgttggacatttgggttggttccaagtctttgctattgtgaatagtgccacagtaaacatacgtgtgcatgtgtctttatggcagcatgatttatagtcctttggtctcgaactcttagcctcaggcagtcctcccacctcagcctctcaaagggctgggattacaggcatgagccaccaaacctggccgtcatcaaattcttttcactccatcttcaagataaatctagaattcaacccttcacccctgcttccatctcaccattggcttccaagcctccattgctgctccccttcacttgctgctcctgcctcgtaagcagtaccctgcttctgcccctgcctcccagtagcctatttcctactgtgaagcaattttttttaaaaaacacaagtcagatcctgccactcgaatgcaggaaaacctccaatgattccccatctcattcagagtaaaagccagtgttgttaccatgactacaagaccctacgtacctggtcttgatcactgttccagccacactggcctccttgcttttcctcctaggcacaaagtacacccccatctcaagacccttgtcctggctgtttcctttccctttcacccagatctccaacatttctataccttatcagaaagccttacctggccccgctgtgtcctccctctctctcttactctgttttgttttcaccagagctcttatcatgtatatcatatacttctttatttattagtttgttgtctgtcttccccactagactgtgagttccttgtcagaagggaaatttgtttccttttttcataggaccttcatacagagactgacatgtagcaaaagtccagtgaattatttattgtttagatgaataagtgaataaatgaacccccatttacacttagagaaattggagcttaaagtggttaaaagacttgcccaagtcagagtaagcattagagctcggtccacagttattgctttcgatccaaccttaactgaggacctgaagcttgactaaaatagagagctcctcatgactccacatttaattcattcaatgaaccacagtccaccaaccgggagtaatttgcagcaattctgattttccttttatatttaacaaacttcaaaaggaatacagtttgtaacacttggctatcttcttaaaatctcttttccccttccatttctgtagctgtaccactgttctagacctctttttcttcaaaatcatcacacttctctcctcctcataggtctccaagacaccatgctttttggtacagactctgaaaccagggtactggactagactaatcaaatatctttagtgtttcattttatctcccttgttgaattcttatcaataaacgtcaattagatcaagtcagtttatagtgttgttcaaagaatctatatccttactgattttcatttatttagaggaagctctcaagctcttactagaattttaaatttgtttctccttgtagttctgtctggttttgcttcatatattctgaagctttgttattagatgcagaagcatttaagattgttaagtctttttttttttttttttttttgagacggagtcttgctctgtcacccaggctggagtgcagtggcatgatctcggctcactgcaagctccgcctcccgggttcactccattctcctgcctcagcctcccaagcagctgggactacaggtgcccgccaccatgcccagctaattttttgtatttttagtacagacagggtttcaccgtgctagccagaattgtctcgatctcctgacctcatgatctgcctgcctcagcctcccaaagtgctgggattacaggcgtgagccaccacacccggctgttatgtcttcttgattgacttactccttttacattatgaaataatcttcttgatccccagcagtattcttcacctgcaatttactttgtgtgacagtgatatagcccctccagccttttttgtaaaaaaaaaaaaaaaaagtgttagcatggtaaatctttttttttctatctttttatttttaacctattcgtgtctttaaaaagtgcatttcttataggcagcatagagtgaggtctaactttttaactcaaatttgaagatccttgccttttagttgagatatttagcctatttgcatttaatgttattattgataggtttaaacttattttgttgtttgtcatccttgctttttattttctgtttgtcctatctgatctttgttacctttttcctatttttctgctttctttggaattagctgaatatctttgtgattctactttgtcttctttattgtattgttatccctaaatgccaattagatcaaattgcctagaatgcaattcctgccacaaccacttactagctgtaggcaagtttcttaacccctctggacttcattttgctcaacgtaaagcagaaataacaacagtgtttgtcttgtagggttgttgtgaggactaagtgagctaatacatgtgcagtatttagaacaaggtctcatacatggttaatagctacagctatagaagagttattgttgttagtggtgttggttgtaatcatcattgttatttgctttcatttattctttgtacttttttccagcccatgcttcttcttgctgggctgctataagatagctgaggtacctggagtctgcctgctctccatcttctccttgacacccaagaagaggacaaaagcatccctgtaggaatcatggttcttgtctcactgcaacttctgttcttataagaaatttttatgaagaatttctgacaaggaggaataagttcaagagacctattgtgcaatatggtgactatgattaataacaatacattgtatacttgaaaattccaagagtagatatttaataaaaagagccatgttactaattcacgttaaattcacaaataccatatgagagaagactgcctcatttttttattcaaatgaaaagttacaagcattgccatgggtgctaccctaccaagtagtcccagagcagagggacactgaggccagaggggtcttccagggttcagcaattttgggggattcctggaactaaagttgaacacagatgaatcttcctcttctttttttaatcctttgtagctcgctcactctggtctctcatataactaaaacgtccccagtgaataacagagatgtcagtgacccagtagcaagaattttacaaaaatatcataagagaggatacattcaaatcatgatacaaaatatggcctggagctccaaacccagacatgtgtacctcactttccttcccaacagatgtgcacccaaaattatttactctttctactaggactgctttttttttttttttttttttttttttttaagacagagtcttgctctgtcacccaggctgaagtgcagtggtgtgatctcagctcactgcaacctccgtttccaggttcaactgattctcgtacctcagcctcccgagtagctgggactacagatgcataccaccatgcccagctaattttttttttttttcagtagaaatgggtcttcaccatgttggccaggctggtctcaatcttctaacctcaactgatctgtgcacctcagcctcccaaagtgctaggagtacaggtgtgagccaccgtgaggactgctatttttaatactacaaatagtagcacacataacaacaataacaataatacttatccagcccttaccacgtgccagtgagcgtgctaagctcttgacacatatcacccccatgagttctcacaagaactctataaagtaactgttaggttatccccatcttacagctaaggaaactgaggcacagggcagctaagccaaaggaaagttaatgacagggccagaattcccacttaggtgtttctcctttagtctgagatataaccactcgtctaaactgccactgactacattagaatactgctttgtctattggtaaatccagatttccacatacccggacagcttgaaaacagagagttcagggccactaatgcccacacaaatagatctgcctgtagtgtgaggagctaggagggaagccacctgtatgtctgcaataacagaacttccatctgctccaggtactgtgtatcctatttaatgagcatgtttccacccaagaaaacgcagagccggagctgactagacagaaacagtacatctcagccctcagtttttcttggttttgacaccttctggtatgtgccaaattagcaataaattccgaggaaaacctcagagggaaagcccctccctcaagcagactttccaaaggaaaattgttactttttctctgatcccaccagctttcccattcggaagcctttaaccagaaatcccctctgttcaattagaatcgtgactcatgttcttacttcaaaaaaagaaaccaaagtttgtcatctagaaggaaggaggaagagtgtgaagaagagggtgctttagagttaggctgttttgagtttaatttctggctgtgtccttcatcagctgtggaacctaggaaagttacttaaactttctcagcctcagctccctcaactgtaaaataggaataatagtatataatgatatatctaatagcaaatatttactttaagctagctattgttctaagcactttatatttctactttaatcctcacaacccttgaggtaggtaccattattattatccccattgtaaagatgagaaaactgaagtagagataactctagtaatttatttgcccaagtttgcacatgaatctgggtaacatatctccagatttaagcacttaactcttccagatgagtgtaataaattcacataaagtgactggcacagcacagaaaacttgtaacacttcactaagtagtagctattgtttttattatgaagaaatagttaatgattcaatatgaattacactctatgggttctatgaacttctttttctacttttattctcatgtcttatgattatatacacaatagatattgtagctgtattcgttgttgcaaatctctttctatggatgcaaagtaaagggaaatggttagtagctgccagatataattccagaaaagtgtgaggctgttacaatcttgctagtcattactaaaacaactacaaaatttcttgcccacttcctgaatttgatctttgaagtcatctacttccctttgtacctaagtccaagatttcctttcacatatttaagttattgtttgctgctaaaatgatacattttctctgtccgtacagagattttgtaataaagctgacatttattgtacacctacttcctgacatgcctcatgcttatacttcacaagcactgtctcgtttaatcctcacaacagccctgtgagttaggaaccattactgacctgtcttacagagcaccaagaggttaagcatcttgaccaacatttcacagtaactggtagaactggaactggaagattatactcttaactgttacaagccaataatctgtctccttagccctggctgaacctccctcttatgtctatttactgcatgaaaacattaatatattattttaagcactgaccaggacagctagatgatctatgtaaccccagagctgtttgtgctggcctcatcagcagcacaaggttgataaacttatcagtcatccggtcgatgctccctggctcagctttggtccagccatcacctctcttgcctgagcccctgtgaccagctcttcactaatctctttgctttctctcttgccccgcttcctcctacagtgtattctctatccagcagccagtgagatcttcttaaatagaaatatgatggtgtcacccctcctgcattcttaaaaccctgccatagtttcccattcatatttagaatcagcatactggcgatctgatttacccatttaagaggtcagtctagctaccatgggatgaatggagcatagagatgagaaggaaagtagggaggccagttagcggactcctgtcatggtccaggtggtgttgatggtgacttgactggggagttgcagtggggatggaatgagatgggatacatttgggaaggaaagcttgaagaacttggcaatggattacatgtttttatgcagtgttttaaaatctcatcagaaatctttagaaagatcgctctgatctcgcaagagcatggcacttaaaaccaactgaactataacaaatgtctattgaccagttaccatctatcaggaactgaaaggaattcagaaagaagaacatgtttctatgctaagtatttagaaagcaggaccagggttccttccctccagaaactcacagttcagtaggaacaataaatataaccacaaataaattaaagctgtgtgataactgtaacagcagaattatctacaaggcctaggagatgatgacatcaaagtaaaggtttaaactgagggagaatatgagttttcccatgaggagcagggagaaggcatcccaggcagcataggttgtaccaagttacagaggtgtgaatttttatggtgtggtcaggaattacagatacacaatgtagataatacaatgggcagaagccaagtcaagggggtaagcagagatggaaaattaaaagttttttaggctaggtcaagatgctggactttgtccctataggctaaagttttcccaagtgcattcatggcactgatagtgcacaagatggttttaatgatatatagacgagcatggatcaaatacaattggccttccccatccacaagttctacatctgagaaatcaacaaaccatggatggaaaatatgtggggggagaaaagcaaggaaaaataaaaataccgtaataaaaaataatgtgaataaaaaataatacagtagagcaactatttacatagtatttacattgtacaaagtattataggtactctagggaagatttaatgtatatgggaggggccaggcgaggtacctcacgcctgtaagcccagcactttgggaggccgaggcagccagatcacctgaggtcaagagttcgagaccagcctagtcaacatggtgaaaccccatctctactaaaaatacaaaaattagccggacatggtggtgcacatctgtaatcctagctactcaggaggctgagggaggagactcgcttgaacccaggaggtggaggttgcagtgagctgaaatcatgccattgcactccagcctgggtgacggagtgcaactccatctcaaagaaagaaaaaaaaagtatatgtgaggatgtgcttaggttacatgcaaatactacaccactttatgtaagggtggtggattttggtgtctgtggattttgatgtcttcaggggtcctggaaccaattccctgtagatactgagggacaagtgtaatcatttatgtattttaatatgtgctacataatgtataattggtatatcaagcctataatatagtttacttttcaaaatagatttattcatgttaagtaagttaatttaaagaaaaatgtcaagtaaatcatagaataggtgaacagatgtgggaccaatgatgaaatgtaagaggccaaagtttgaggcacttttcatataaatggtgggggtaggggggaggcactgaaggaattttagcttggaaaaggcatgataagatttgcaggtggtaagctctgtctcgtttccaggaataggatgaaaatcattctcgtgtccctgaaaccaattaagaggttcctctataattgtccatggaagcaaaaaatgtgggtggggactgaaatagtggaagtgggaagagggaagacagagccgtgaggaactccccaggaggtaaaaactcaactgcacttggcgactgaggaataaggatgaggaaacagaaggacccaggatgactcctgggtttctggcttgaagatctgaatagattttggctgccagccactcttaagggcccctgaaatttgtcaggcaggaaaaattttaattaggtgcattcttcattatgttccaaagcagaaattctgtctgatttgaggtaaagtgaggatttggaagttttccagtgggtgttgatgacagtagacaggtaaagccagttttagaactcggtatttgaatgtatttcggtatgaccagatctctcctttcttagttggatagagcctgaaaaatgccaggcctggattcctagatcggtgccagttcaatatgtaacaatccacaatgcagataggataatacatgaattgattagtaatattgaccttacgccaggcacggtggctcacgcctgtaatcccagcactttgggaggccaaggcgggtggatcaactgaggttgggagttcgagaccagcctgaccaacatggtgaaaccccatctctatcaaaaatacaaaattagccaagcatggtggcgcatgcttgtaattccagctacttgggaggctgaggcaggagaatcacttgaacccaggaggaggaggttgcggtgagctgagatcacaccattgcactcccgcctgggcaacaagagtgaaactctgtcccaaaaaaaaaaaaaagtaatatttatcttaacatgtccggacggctttgagctctgcctctgtagttctcaaccctccgttttattttatttttctgtataaaaaaattaatttctttcaacagaagagcttttggagaaggaggaaggaagtggggagaccttcctatgttgacttggaatttgctccctgtaatgtacctgcattcctccctgtaatacacctgcaatacagcaaaagaaaacaagggaaggttttcctgagtgaaacttgacaagatgcaaaagagttgtgagatttagcaccctcttttttctttcctgtgcaatgtctttcaggagttcccctacctaaaagacttttagcacatacacaaattaagttgcagcatcacattttccaaggtgctttctggaatcagtcaaggagtctaagtctcatgataggcctcaattcctcctgtaagtggaagtgaaaagtgcttgctgttgtttatgctcaaccacagagctccaaaatctgcgccccgttcctgagccatgtgcgtttccttgtttataagtaccaagcttcacggcaaagtgtgttcaacaattcactcactcaagcattaatgcagctctggtctttctcctctcccttaggtatttatgggccatcggtaagaatgtctggaagagatggaagaaaaggttttttgtattggtgcaggtaactaactcttcaactcttaagagacatcagtattaaagatttgctagaatgaatgaatgctttttaactgaggtataacttaaatacacagagctcatgcatttagcttaatgaatttttacatatatccatgtaaccaccattcagaggaggatacagaacatttccaatacccaaagggctcccttgtgctctattctctatttttatatcacttttaaattttaaaaaattaatgaatactcataattttttaattcgaacaatacagtagtatgtgagataagtcggggagagtagactcccacccctgcccagtctcctgccagggatggaggattccagaagggagcaagctcatgccaagtgagggctatagggacattaactttggctgaaaacaatgtagtattttgaaaagaactgagataggcattatgagtaaagtcagaatttagttggactttttgcctctattttattatttagtgtgtttgaatttgaattatctgtgtgggagtgctctactcttcttggtgcctggtgcttccaaaagtcttagccaacgtcccataactatgtttaatatctaggataaatttttctattaaacttctttttttttttttttaactgaaacaaaccaaattcttcaagttgttctgcaagttgctttttccacacaagttatttagatacctttcaatgtttacatatatagctctggctctcatatctgtaaacttttcccttttggatagacttctggactttcccaatttgggctattcttaacaaggctgcagggaatatctgtgtatatggatacaaatgtagatgcggatattgatgttaatacattagtcatatataaataacacctttactcttgagcatttcttaaatttttttccagaaatagtaatacctgtccttgaaagaccccatctttttggtaggggagggtgtttattttttgcatcaggatttttcagtttacaaagttttccagtgcctgtttttaattttcagactccaccagagcatttaaactataattcaatttgcagaaatctaatttatgctatactctgaaagatttcacaaagtgagtcaacttggaactgagtgacaaaggttcttactgggttacttgactaggattaatatttagagtgctaccaatatttagagtgctttatactcagagacctgactacaaagcaactcccttttaggtctaaatgaccttgagggtttcaccaactctgaacttctaagactagactgtctatagatctacttaagtctctgctgtgccgctaaggcaaaatacagctctctggctctaataagcaagaggtcatctttgctttcagtattgttgtagggtagaacaaaaccttaaagtgatttagccgcaaagaacattttggaatgatgcccgtccctcagaataacccacggctgcccagcacggtggctcacgcctgtaatcccagcactttgggaagccgagacgggtggatcacctgagatcaggagttcaagactagcctggccaacatggtgaaaccctgtctctactaatagtacaaaaaattagccgggtatggtggtgcatgcttgtaatctcagctactagggaggctgaggcagaagaatcacttgaaccagggaggtggaggttgcagtgagctgagattgtgccattgcactccagcctgggcaacaagagcaaaactccgtctccaaaaaaaataaataattaaaataacccatggctaagcaattgaggctattttagcttgtggtacatttcctcagactattaactgaccagtatttattgagcacctactttgtgtggagtgcattgagaggacatggagaactatcaggtctggtatttagctcccagaaaggaatctgttagagttctacatatgcaaacagcagaagtagactcaagctaattaaggtttaaaaaatgaatatatggaaggctttggagttaactcatagaattgtgaaaaaggctgaattacccatccatgttaagaacagggccagcatagttccagaaatccaagttgtattaggtttctccagagagacagaaccaataggatatatgtatataagaaagggcatttattagggagaactggctcacatgattacaaggcaaagccacacaataggctgtctgcaagctggggaagaaagaagctgatagtggcttattctgagtccgaaagcctcaaaacaaaggaagccaacagtacagccttcagtctgaggccaaagacctgagagcccccagcaagtcactggtacaagtcccagtgtataaaggccaaagaacctggagtctgatgcccaagggcattaggaacagaaggaaccatgtagcagggaagaaagacgaaagcctgaagactcggcaagcagtcttatcccacctccttccacctgcttcgttctagctgcactggcagctgattggatggtgtccattcacactgcgtgtgggtcttcctctcctaggccaccaactcaactgtcagtcttctctggcaacaccctcacagacacacccagaaacagtactccaccagccatctaggcatccttcaatccaatcaagtggacacctaatattaaccatcacaagtcctggaaccatggccagtgctgctagtgtggtcatgagacagactggctctgaccactttccatccttgcatctctccttgagggtcaaatttcataaagggagaattggtttagtctaacctggttcactcccaacttttagcaggaagaagggatggcacttggattgacagtcccactggattgtctttcatgcaaaatcaggatgccattaccagaaggagaaatggatactgggaaggtaaaaataactggtatccactttaaagagcatacaatgtaaatgggaagacaagacacatcaagaggcagtgctgtccaggagcagtggctgacgcctgtaatcccagcactttgagaagctgaggagggcggatcacatgggttcaggagtttgagagcagcctgggcaacatggtgaaaacccatctctactaaaaatacaaaaactagccaggcatgctggctcgcacctgtaatcacagctacagggaacgcggaggcaggagaattgcttgaacccaggaggcggaggctgcagtgagctgagattgcgccactgcattccagcctgggagacagagtgagactctaaaaaaaaaaaaaaaaaaaaaaaaaaaaaaaagcagtgcttagtcatggatggttctcacccctcagtgcttctcattgcacttggcacagcagtctctcttggaatcacttgggagcatgcctggcctccccgatagactgtgcactgtttcagggccagttttgtttctgattcttttttgtgtctttccctctttcctccaccacacccatacacagtccctagcccagtgtctggcaaagaaaagaaaaaggaagagagaggagaaaagctcaggcaataccttgggtggtgctgaaaaaggagagatcatgtgctccgagaagtggctggtgacaaccattctcagatttctgagaacttttgatatgatgaagtacttaggagaagtagatgacctcttattttgggagaggaaactctgcaggaaaaacaagaggaaatatgtggaaaacatcagtaaagccatgtctgtgcagtaagtacagggagaaccaaaagggagagaatgattttttcaggcaacgggaacacaggtgtttagagccttcacactgagccttctaataagagaagatgaaagtcacacagcagctaaaaagcaagctctgtgctcacttctgagaatcataaaagggcacttctcatctaaagctcagtatctttcctagaaaggcaggagaaaataagttcagaattctgtgaaatttttcatgtacatatgattctcattaactttaaagagctgtcaaggtatgttggggacatccatccccccaaaaaaatctgtttcagcctgaatcagatttctcccttaacaacctctgtgacacacagaggtgacgtgagagtcccatcatcacaaagataatgggggagccaggatgacaactcaggtcttctctttcaattcttgtcctattcaccacaacaatatctaaaagcaatttgctggcatacccagaaaatactgcattatttttaaattctttccatttttttcttctcctctatttaagtgatcacatttagaagcactttatcaatatcataaagaaaaaaacacactccctttgaaacaaccccaatgccatcagagctgcaggaggaaagttcaaggccaccagtgctggtccaattcagaggaagctaaaatgtctcaggttgtttgaaggaaaggatgtcaatccaagcggtggcaattggcccccaacagctgcatgcaatgttgaattcagtcatatgtacaaacgattttcagtttctctttagccaccaaagccttactttgaaactcaaaatgcaaacatgaaacccggagaaccaccctggttcaatttgcagaagcgtgagagttctggggaagggagaagattcccctaaccccgcccctgctcccaggcagccttggagggaactccctggaaaacagtgtggaaaccaccaaacagaaagtatatctacccaagtgacttacggaatctttgtgtctttcagttcagatgttagatcttatggaatgtgtttatgtagagagctagcagcacacaatttccaacacaattatgatttaatacattagatttaaaacaacgaaaattgtctgaaaaaacaaagacgaagagaggacatccaacattagtctcctcaaaattcatctcctgctctacacatacacacagagtctacttttttgcttataacgtgtaacaattaaaattctccctgactgagatttcctattagtactactgtcttggggaaccaaattttagactataaacggacttcctactagccagggataaaggatatactcagaggagtgctggaccaaagtagcaattcccatttcttaaggatcagagctaaaattactatagatgtggctagagtctaccctaccaactgtgaagggaatgaagcagttgcgaggagcttctgtgacagagattcaagcattcctgtgcaatgagagagtgtctgtaaatgggggcctggaccatctgcattaggtgttgtttaaaatgcagaccccaaggtgccatccagaagactctgatacagtaagtctggggtggggcccagtattccgtacttataaaaggcaccccaggagatactgatgcaggtggtccaaaggccacccttggagaaacactgccttggaggtcattatcccgcttaaagtgaagggtctcattcccttcagatgacaccatcttagagtttatgttctctatggaaccgagcatcagagtagctaaatagatgactatattcaaatggcacaataaagcctcctcttgccatcttccttgaaattccaatatatgtcctataaacttggctggctgcaaaccctaacccagagatcaaggggaaatgggccttcagcaccctgagtcaagaaattactggggcctcattctaaaccctcgggtccatggtgagaaccaaacacattgattactactgttagtaactctaatgtgaccaaatcaacactaatgataaaggtgccaattccatagagcactgctggatagccagaacgccccaccccgtgtgtgtgtgtaaggagaacagtgaaaacaggccaacttatcacccatatcaggttagaaagtcttaacgctttcatctttttatttaaaaaatatttttattctgtgatcaaaagatttctggtgcccagacatggtggctcatgcctgtaatcccagccccttgggaggctgagtcaggtggattacaaggtcaggagttcgagaccagcctggccaatatggtgaaaccccatctctactaaaaatacaaaaattacctgggcatggtggcatgtgcctgtagtcctagctgctcaggtggctgagacaggagaatcgcttaaacctaggaggcggaagttgcagtgagccaagatcatgccactgcactccagcctgggtgacagagcaagattctgtctcaaaaaaaaaaaaaaaagatttctggttaaaatctacttttttgattggtgttcaaataatttctgagacatttctccccattttagcactgtacaaactgtaatattctgtggttcctctaataatgtggacaatcacttatatttatatggtttcttagagtttacaaagtgttcgtcaagctggtcttcacaacctttctgtactacagtgaggacaaggcttttcgcaacttcacattagaggaaactaaggctcagagtggataagtggcctgcccaaggtcaatggcttgtaagcagccaaatatgaaacctaacacaggccaggcacggtggttcacgcctgtaatcccagcagtttgggagtctgaggcgggtggatcatgaggtcagggaatctagaccatcctggctaacatggtgaaaccccatctcttctaaaaatacaaaaaattaggcaagcgtggtggcgggcacctgtagtcccagctacttgggaggctgaggcaggagagtggcatgaacctgggaggtggagtttgcagtgagccgagatcatgccactgcactccagcctgggtgacagagcgagaatttgtctcaaaaaaaaagaaacctaacacaggtcttttgattgcaagtgccttcaataactcctagcacttagacaggactggcacctgaagagattgatgcatacagaatgttatatatatatgatggaatactactcatccataaaaaggaatgaattaatggcattcacagcaatttggatgggattggagactattattctaagtgaagtaactcaggaatggaaaaccaaacatcatatgttctcattcataagtgggggctaaactatgaggatgcaaagacataacaataatacgatggactttggggactcagggggaaagggtgggaagagagtgagggataaaagaccacaaattgggttcattgtatactgattgggagatgggttcaccaaaatctcataaatcaccactaaagaacttactcatgtaactgaatatcacctgttccccaaaaacttatggaaataaaacattttttaaataaagcattgtgttaaaagaatgttctagaactgaattactcagatagaaccaacatggctcctctgtttctgattcccaactgagaatgttaccaaaaattatgttccagctttcagaaaaatcactaaatcagaataagataaaatattgttagataatatataatgccttggaatacaatagtagtcacctgggaatacaatattaaaatgagttaaccacaaaaatgaattgtaagacatatgagtagttgaaggatttgtaactccaaatgtttgtttttgccactccacaattgctctataagacatttatatttatattctggttatcagatatctggttatcagatatagtctggttatcagatatcaacccaaacagacttaagttttaaaagggcaagaattgtattggttaactaattaaactagtaattagctggagggtcttctgtcatgactagatccaggactcaagcaatattatcaagcctctgtctctcaatatatttaatcttttggctctgctttccgctgaattgacttcaccctcaggcatgatctctggcagctcaagccttacaaaagtttaccagccccagagaaaacttttctttaacaattgttccagtacaggccctcagttagctttctttggcccaatgtggtgccaaatccttgcaccagtcactgcaaccaaggagatactatgttgattggccaggcatgggccaagtgttttactcaccctacttccagctagatgtgcagttactcccacacaaaccacttgccctgaaagttgaaaagagagtggttcccaaaggaagaccaggattcagttgtgggagggcaatgaatggcctgcatgcacacataagaaatgcccccacagaaggccaggtgcagtggcttatatctataatcccagcactttgggagactgagctgggacgatcacctgaggctaggagtctgagactagcctgggcaacacagtgagactccatgtctacaagaaataaattcttttttaattatcaaaaaaagaaatgtcccacagatgttatcatcatccccatttaaagatcacaaaaccatgtcccagaaaagttaactgaactgccttggttcacatagaaaataatggatctgaaaaccaaatccagttctgcatgactctaaaatctattctccttctcctccaccaaatggccttcacttcagtgccaatcaggagtctgggatttagacactgtgatccttcattcgcaactacatcacattaaaaatagtccttagtctccaggaactgtgattcacaccataaaaattttctccatgctcagattttggctcaatccgtcaatgcttcctcaggaattccttgcccaaccacccatctagaccaaatctccaagctcttacagtaccatatacctctctttttaatatttgccactattaaaataacacatttgtgaaatcatgggattaatgtctaccttcatgctagacatgagggcaggaatcacatctggttttttgcatgtttatagtcctcgaaccaaacacactacctacgtatttgttgaaagaatgaatgtatctattataaacaactcttttctaaattatgtatatgaattttggacaagggctggtgaccagagttcagtaaaaataacagctgattaattttcaaagaatgatggtaaaagcaaggaaagaagatttagacaaaatacattctactgttgtatgtccaagtattttagtctcccataggtgataagaaggggagaggagagttggggacagaaaagtctaaccttttcatctcatgactggaatctacttgctaactataattgaaactcaagggcaatcttagaggttatggacagttcctatatattaaaaccgtggttctcagattttaacatgtattaagagatatctggccaggtgtggtggctcatgcctgtaatcccagcactttgggagaccaaaatgcgaagatcacttgagcccaggagttcaaaccagcctaggtaacatagtgagacatcccccccaccatctctaccaaaaaattaaaaaaaaaaaaaaatagccaggcatggtggtacatgcctctagtcccagctactggggaggctgaagcaggaagatcacttaagcccaggaggtcaaggatgtagtgagccatgtttgtgtcactgcacttcagcctgagcgacagcaagaccctattttgagaaagagagagagaatctgagacagttatgaaaaatgtataatcctaaggcccactctgacctgagattctgattctggtctgacttaaagaatctacatatttacagcctaatccaccccctcaccccccacacactatctaataataaaggcagctgtcgccatccactctttttttttttttttttttttgagatggagtttcgctctttctcccaggctggagtgcagtggtgcgatctcagctcactgcaacctctgccttcccatttccagcaattctcctgcctcagcctccggagtagctgagattacaggagtctgccgccacgtccagctaatttttgtatttttagtagagagggggtttcaccatgttagccaggctggtctcaaactcctgacctcataatctacccatctcagcctcccaaagtgctgggattacaggcgtaagccactgcgcccagcccaccatccactctttaaggaacattacttcaaagcattctgtagtttaagcacgtgactggaaatgagctaaggatttttaaaggtgtgtctgaggtgcagccagctttaaaataaaacctcgctgactgttccctcagaagtcccaacggcctgtcctgtgattccatgagaaggtacctaccctatgaaaatcccaaggatgtgaaagacagagttctttaagcccttctctgcaaagtgcactttcagatgtctgctgatcatttgagatcactagatttttatgctttctgttgtaggccaggctgtctgacaagggtggctgactttctcacttctaacatgcattccaggctctgccatgcctttattacaacagtgctcactgcctcattaatttttcatcaacaaaatacagttttaaaagaattctactctgacagaggaacatgcatttcatgggaaatggcttttacttagtgtggtcttgtggaagtttaaaaaataaatgtaaggctttccaaatctttgcaattctcccaccattcaatcagtctataaaaagtgagattccccccaaaatttccaataattagaatcattcaaagagaaatcattctttctcccctcctttatttcctaaagtacattgcaaaatcctaaatcaagatgctcccaataaaccaactcaatttggtttaccaactcaaagcaattcagtttgtggagagtgacttcagcaatataaccagaagagggcatcagcatacagctctccaagaaggaagccactgaaatagaaaaggaaaaaaaaaaaaaaattaaaaagcccaaaccatgtagtaatagtaaatgcataaatcttgaaataacacccttctgttgtgattttttttttaaatcttaagtgagtgtcggcaactctctgtttggccaatcacattaacaaactatgtcatctttcatgttgtcagatgagaaatgccaggttaaaaaaaaatccggctgggcatggtggctcacgcctgtaatcccagcactttgggaggctgaggcgggcagatcacctgaagtcgggagttcaagaccagcttgaccaacatagagaaaccctgtctctactaaaaatacaaaattagccagacatggtggcgcatgcctgtaatcccagctactcaggaggctgaggcaggaaaatcacttgaacccaggaagcggaggttgccgtgagccaagatcatgccattgcaccccagtctgggcaacaagaagaaaactccatctaaaaaaaaaaaaaattccccatgggaccgttccagcagtatctatgatcattgtcatgcagagggtcacaggaaatctgttatccctaggatcaataataacaagttggaaaggcctggtactgtacttggaatcccctgtaaatttggggggtaaaacctctttattggattgtatgtactcaactttctagaaccaatcagattcaactagtgaatgcccattatatggcagattttgcttatgagactgaaaatacaatcaagacatatgactccctagacctgtcttcaatgaatttataatccagtaggtaaatccacctattaagctatactatattagaaagtgtgtcaaatgcaaggaagctgcctgtataaatgcatgtgtatatgaagtgttcgctctatgggtatcacacatggtatgtaaaactcaattaattctctagcaacaataagatgcaggtaaatacagatgaagactctgaggcttacagaacggacagcttatcagagctgggatgggaccccaggcccatggaaccctcagcctacactcttaaccttccattttagaagagtgtgctattgattactttgtttattacaaaaaattaatatgtgttcctttatgaaaatactctcagtgacccagccttaggtttcccctggcattgtgatataaggaagaagttctgcaaaccctatacattataaagaaacccaagtggggcggtaaagtttccatcaggagccaacagagggcagcaacagacaaaccaactaccaaaaacatcctcctgcggacacccttcatctctccactgggaccctcaagcctcggacagtgcgggagatgcatgtagcactcgagagcgtcaatttcttatcaccattaaaacaacaaaaacaaatctcactatagaagagactaaaaatgtcccccactgggatcaaagttcacttagaaagtgtctcttttaataaaggaaactaagggatgagggatgtggcactccttctctaagacatttgacatccgtggatagtaaatatgcctgagagcatttagcccaaagctaggaggatgcttgctttcccacgggctacttgcagacaagccagatgtagaaatgctaagtatatgtgctggatctggatgcactagagtgacagggtcctgaaggcgggcctgcagctgtgagcacccgccctgcactggcatggtttgtgttggtagagtgagggctgccattagggcacaagtgacaacagccacgccattgtgggggctgaggattgctctactgtgactggcacctagcgatcaagcgctcattgcttgtgacagcatgtcactcctgcacttgtctgagataagaagaagacttcaaagcaaccaaagtactccttcagcaggaagaaggggacaaaacatgtagtttgatgctgatcaaaatgctgcaaaaaataaaatactgaaataaaaaggcatgaataaatgaatgtctagcctctaacttctgaccaaaaggcccatgttgtatctgcgagcatggcagtctcagccaaggccacagtcacattaggtagaacatacaaaattgctgtcgtttaaccacttttgacctacaaaaatggcagtcacatgtagcttaacccaattatattaaaagcaataatgataatagctaaccttcatcaagtacttactaagtgccaggaacagactgtaagtgcattccccacatgaactcattcagtcttcacagtaagccaatgaggtaggttctaagattgtatccagtctacagatgaggttatgaaggaccagagaggttaagtaacatgctcaacgtcacacagccaggaggtagcaaaactcagtttgaacccagccactcagtccagatcctcagaggagagaacatgggggagggttttttggagaagacaggctccaggggtcaacctcacaatctgcttttccttaacaggtcagtcagtacacgtttgccatgtgcagttatcgggagaagaaagcggagcctcaggaacttctacaattggatggctacactgtggattacaccgacccccagccaggtacccaccgaccctcaaggccacgagcccacaaaccctcaaccttcccaaatcaatggtcaactaataattgctgggcacttactccatgctaggcactaagtcaattcactaagggtttcagctgtgtgcatgacagtcacaatccctgatattatgccgtttccatcccggttggttaaatgccatcctaacctagtgctttggttttactcaagggattctctaatttaaacccaaaaagtaagagcatttttcttttacctgcctgtatccacatcaaatatggactccaccatacaatgctaaaaaaaaaattctgaaaaagaagtagtcccacatgtacaccaaggagtgtgtgtgtgtgtgtgtgtgtgtgtgtgtgtctgtgtgtgtgtgttgtttttcaccagtgatgtgtgggcttggcaggtttcagtgaccaagggagcctgcccaatatatccattttccctagctacaattcaagagatcataaggttagctggtagcacttgaaaaccctccctaaatgtctttttccctaagaagacaccaatccacaagcagagacaatgaagcccttaagccttatgtagctaagaaaactacacgagcggtagtatttcttaaaagttctacaccgcataagttctacatcctgccccctcgcacctctccccccacccattttatctttttcccagaaaaaaaaaatgaatagaaatcagcctcaaagaaccttcaaaatgggaggggggtgcgaaatcatttcagcatattaatgaacaacaagcaccaacagccctctcccggagaagtttatttttatgccaaatctgcacaaggaaagcatttccaaccatactgcattatttggcccaaaacctttttttctactcccatattgctcttccacatgcaacaaaatacacataaaagaaaaacagagtttgagagaagatggggtgctaacctgaaaaggtgtggcagggaaggccttgggcccagcccacttagtaaaattagcacctgcagaatctcaaccgagtgactgggcccagcgccaccccttcggtctttcatatgttatttgctacttgccagagcagaatgcagagctgaccacataaggcatgaattaaatgctctgcctggaaatccttcatgagcagaaccaacgagtttgaaacaaacaatttcatgcaacttctcatggaaaggatggggctcctgccttaggaaaccagtccttaggacattctgtgatggtttgtgttcttcttaagccattgtgtatccttcaaaaaaatagattcagtcctccttaggacttttatttttaagtagaaggctagggtgaggagtggtggctcacatctgcaatcccaaggcgagaggatcgcttgagaccaaagttcacgacaagcctgggcaacaaagccagacatcatctatacaaaaaaattaaaaaataaccagggcatggaggcacacacctgtaggtgtgtgctacagggaggctactagggaggctaaggtgggaggattgcttgagcctaggagttggaggcagcaataagctatgattgcactgctgcactccatcctgggtgacagaaatagaccccaactcaaaaaatagaattgtaaagaataataaatttttaaacataaaatgggacgctaaagggccaatatgagaagggaaatcaataccaccttatgacaataattgcttttaagccagttcattttcctttccccccatgtgattgtatttagccctcagggtaatcccacaaagtggataagaccaggatcattaccccattttgtaaatgaagaaactgagattctgagatatcaaaggctattgtttaagactgcctggtggctgagctgggactccgggtctaacccatgtcacgctttggcacttgcagtaaagcatagctgcatgaacagctatagcaaagctatggttgttactttatcagatgaaagcaaaattatcttcactcagtggggagggcaggagtggagagagctattctatctacatgtgtaaggagtaactgtgcacatatatttttaaagcttatttctttttacatcgatcccatgggatataatttataaatttctatacgaaagatgtaaatggaaagatgtaaaatgtaaatcaattatgttcttgagaataataagcagcttcttctatctttccatgtgctaagtcctatttattccccaagtaatgtctgattgaaaacggagacttaaattctctcagttgtcatgggaaagtctaactcagaattttttaaagagtgattattggccaggcgcggtgcctcacgcctgtaatcccagcactttgggaggctgaggtgggcagatcacttgaggtcaggggttcgagaccagcctggccaacatggtgaaaccccatctctactaaaaatacaaaaattagccgcacgtggtggcacgcacctgtaatccgagctactcgggaggctgaagcaggagaatcgcttgaacctgggaggcagaggttgcagtgagccaagactgcgccactgcactccagcctgggcaacagagagagactctgtctcaaacaaacaacaaaaaagtaattattaaaaataaatgttcctgggccccatttctaacctgtgaaccagaagtagggagaggtcagaatctttgtatttaaataagcactgcaggggattcctgaacacagtaacatttgccagctggagagccaagtaatgcacattttaaccaatgtcctcagatttgaggagtctcctcaactgctccctgaaaggtgagtgtgcaaatggggaggacttcagactctacctctctccctctttctcttggttttatccaaattgtcagtggatccacctggtggcgattttgtgtgctaagaacccttgtggcctgttgctctctgccatagaagggagggatgcaattaatattgttgccttagtaccagcctacaatctacgtggttcccccagacacaagcatttccactaaataaactctacctgtttgggtccttgacgtgttcatttggtgaactggcaaattatgtaagtttcacttacaagctactccttttaagctaaaaataaaaatgcatcactttacctttccctgtgtatggtttggaaagtttgaaataatctcaatttctatccgattagataattaagccttcaaataaaagaatattaatccagaataattcaatgccacagtttatcaaacaactgaattattcttatacgactcataaagacctttcttaccctcataaatggactttggccatgcaagttgttggaagtgcaattcctttcccctagagagctggccagcattcctttgcctggtctgcctccatctattcccagacgtgtctttttgtctttgaattgtgggactgtgcccctcgttctccaaggagagcccatttgaggtcacacatcacattcttcagattcagtccccaggaattgttgctttttctaagactgatggccttgtggttatgacatgtggatcttcactttgtggatgttcactttgctttctcctctcttggttctctttcatctgtcgctcttctatctccttcttgctttccttggtgtgtcctcagcctctggtgctttctgaaaaagccctgttgctctctgctgctgtgcttgtcattgctgccatttctttagatgtttctctttgcccttacccactccaaaattaggcttcattttattgttaataatgactcttaagagagctgttagtgagggcccagccctggattcatgctttggtgcagtaaagcacagtggttatagtcatcagctgtggagacaaacagccaaggtcaaaagccagctctgacacatacaacccagctttgtgtccatgggctagttaccaccttccccatgacttagtttcctcatctgtaaaatggaataatagtacttacatcataaggctgttgggaggattgaataaaaatataaaaacttcctggtgtctttccatctctacctctaaataactgcacagtggagagggctgtccacttccccaaagtaactccatgaactgactttctgacggtagctccagaaatacagtatctctaccccagcagcaggccctgggtgagggggaggccttggggctagtaaaagtgatacctgatcgtgtttgtcctggcattccctgactgtagcaaaacagcttattcctaaggataccacgagactaggctacaggtctattgacctgctcttccttttttaactctttattgctcacttttcaggcttaaaacaactctcagagctcttcttcctcctccttcccctttcagaattttcctttttattgtgctattcattaggttcatcagattttcccagcttgctaactacacatcatcctactcaaattaggtattttaaaactttccatatgaaattaagcaaaatagtcccttataataaaaaccaccaaaaatcttttagtaaagctttattggtgtgatattatcagaccctccatataaagaagtagctatttattgtcctaaatccctggccattccaagtgcaaaactatcaatacacacccacgcttgcagcatagacacctcaataaattgcatcggcacaatgaagaagtcttaatgttaccagaaatcttttccaatgacaaatgtcaaacagattactggctggtcctcactggaaatttggggatgctaataactcattcattctcctcttagtttttaataattgaggaggcgacgaggaacctgatgaagatatgaagtattatttccagctagagaatgctgagtaatctaaaatacaggtttctagaatatgttgatggacacaatgtagctttggcctgaacccaaagagaagtttccacctacttctcactaattttttattttttatactttaagttttagggtacatgtgcacaacgtgcaggtttgttacatatgtatacatgtgccatgttggtgtgctgcacccattaactcgtcatttaacattaggtatatctcctaatgctatccctcccccctccccccaccccacaacaggtcccggtgtgtgatgttccccttcctgtgtccatgtgttctcattgttcaattcccacctatgagtgagaacatgcacttctcgctaaattttaaccttgagaactgcccatggaaaaagatggatctagagcatattcatttattcaacaaatatttgtgcacccactatgtgccatgcactattctaggctccagggatacagcagtaagcaaaatagacaaaaactacctgcacttatgaagcaaagtaaattatatagtttgctaaaaagtaataggagcaaaaaagaaaaattaagcaagataagagataggtcacaagaagggaggtcagggaaggtctcaacaggaatgtgatgtttaggaaaagatacaaaggagataagagtgtgaatcatgcagatacctgaaaaaagagtgctccaggcacagagaaaagcaattgcaaaggtactgaggtgagcacatgcctggggtgttcaaggaagagcaagaggccagtgtggctgcaatgaagtgagtacatgtgtgcatagagggagagagagagtattaggagaggaggttagaggtggcagaggaccaattcatgggaggctttcaggccttgtcagaaccaacgcttttcctctgagtggaacgtggaactgctggcaggttttgagcagaagagtgacaggacctgactctagtgctaaatcagggactctggctgccttgtgagcatcaactatagagaatgaggatggaggcagacaggtcagataggaggctattaaaataatccagggatgatcctggctacatttatgatggccgcaactggagatggaagaagtgatcaaattctggtaatgtcctaacggtggaaccatcagaatttcatgattcattggaagtgggtagtgaaagaaagtaaagagtcagaattgaccccaagactggggacttgagtggcaagagagatgggctcagctttgctgaggaggtcagggagaaagaccaggagttcattgttgggtttcacaagcttgggatgtctatcagatatccctggggaaaagtcaagaaagatattcaagtctggagtccaggggagaggtccaggttggagagagaagtgtgaaggccatcagcatactcatggtacttaaaggctggttggcatcaccatgagagagggtgcttctaaggaagagaagaagggcaaggacagaagcccagcatttaaaaatcaggaagaggaggaggaggagccaccagacaagactaaggagcagcagccaggatggtaggaggaaagtcagggtttcctcctgaaagctaagtaaagaaagcatcttgaagagaagggagtgcaaatgctgctgataggtgggtgggcccaataaaatgagggcttttaatcagtcattggattcagcaatgtggaggtcactggttattcagcaatgtgtccactgaaacctggacaagtttcagtggggcagcagcctgattggaggggttgtaaggcagaaaaggaggggagagacccttgctactcaacatgtggtcctcacaccagcgccatctgaatcatctgggagcttgttagaaatgctgcacctcaagctctgttccggacgtactgaatcagaagctgcattttaacaacatgcccagggggttcgtatgggtactaaaattggaaaagccttggtagagatttccctttcgttgtaaagagaagaacaataggacagtagctgaagggagagatgtggtaaagagaggtttttgttgttgttttgtttgtgtttaaagatgagggagaaaatagtatgtttataggcagatgtttatcccccaagcaggcagtctgcttggcagttctatccccagcaggacacaaaaagataagatccaggctcagaaatacttcttcaacatcacggtcccactctgtggacaagtgaatctcagacttcccatcctaagttaatcactacccccctcttctgtcccaaggaaaagcagcagaaactgctttttcaaaggctgagtccagttgagaacatcacagctcagcttagtagaagttgttactcccttttcttccaggtttggagggtggccgagccttcttcaatgctgtcaaggagggagacaccgtgatatttgccagtgacgatgaacaagaccgcatcctgtgggtccaggccatgtatcgggccacggggcagtcacacaagcctgtgcccccgacccaagtccagaaactcaacgccaagggaggaaatgtacctcagctggatgcccctatctctcaattttgtaagtaaatatgccgttttacaaaaatagctctgtagagtaaagtaaaccttccaaagttgaattagaaaacctagttgcttttatacttaaaatttataaaatcatgtttgctgaaaacatatagtgaattcagggggaaagttggggcaaatgttagatgaaagtaattttaaagtgcaatacttgaccttctcccacaagcactaaatgaaggaaagtgtattttaggtggatttttatctctgttttggtgagagtacagaattcacagccaaacatgtatttgtttgagtccttcaaatatagtagattatgtatgtccttgcttcatttcttcctattaaaagtaatttaaaaatagggttgatttgaaatcaacttaaatctgcaatttagaaccatttaaaaataaatgatgacattatcacatgcagcgaaaaaaaaaaaaaaaaacacaaaacatggtacctaaaatcccattccgagctaaaataccgaagacccaaaaatgaaactgtctccttaaacagccccagttcatattcgagttttttctcctcttacctctgcatacatttaatttcttgccccttttccatgtcttcttgctacctaaaatggcttttatctatcaatacttctgatacacagggtgaggtgaaagccagtacatgtttggaaatatttattaaaacaaagaaaatggagaaataaagtaattcattttcgttccaaacattcattctaaatagagtcttttgctttaccctgaatatcaagtcaatcagagatgacacaggtacaagtcatttttagcaataatcatgatgatttattactttagtatggaattcactgattcattctaggtcattgagcaactgtctagaaataagacatgctaatgagaaggacagacaaggtaccagctcttataatacctgcatcccagtggggaagcctagatagtaaacaagtgaacagataaataagagagcttcagacactggtaaataccatgaagaatgtcatttagtggtgactgagtgagaaggagagacattagacaaacaaagaagctttccctgagtttaggttcaaaggataggtagtcagccccacagatatttgaggaaagagaattgcagctgaaggaaaacaaatgcaaatgcagagacttaacctctaacacagtgcttgcacgatctctcctctgttgctcttaaacagaatatggatgtgggtggaataattttgcagctgtaactactaaatagaggtaaacttgtatttcagtgaattctactgccatgtccatttctgtccaacaagactatattcttacaccttgcaacacccttgttgatcaggaaatacaacttcttttggatcacaaattctgtctatcagatgctcccaggaattcctgtccagtactgatggtgatgcatgcccttgtggaacagtgtaaataatcatataatggctgtgagtttccacacagaaaatcatgaaagaataagaaagagattgcccacacctaccaccaagttctccactcttgtattctctaacatcttcctgcacttaggtttacttgagagcagtaaagagagtaatagttattagtcaagataaatcatacccagtatttgtttaattgttgtgtgttttttttaaagtatgacaaaaatccctcctttcaccttgggcaacatgctcctttgtaattcatttggaaacaacacatcctatcgtaacctcttgaaaagaagttaccccctgtatcagaaaaaaattctaactataatcaccattcaaatcaacctcataaagcatgtatctcaggtgatatttggaaaatactggtcttatttccaaataatcttcatttcttctaaagtcatttcaccttacattcagtgtctctgttctatcatctgcccagattaagaaactgctacatggtttgctattgaccccactttttcctcactagtataagatgaaggacattcaggagtaaaattagagacaagaaatcgattaaaaaagaaaacctgtgatggaagctgctgaagaagagatgtctcttcatggaaatgcatgggggctcttgatttagatttctgtctgtggataggattcatttagttgtgaaattagaacactagttgttaggcatcagcagaaagactcaattgaatacacacagcttgatgtgtatcactactctagttgaaataaggaacttttgttaaatggagcatccaaagcaaactcctaagagttagaatttgcgggggggggggggcgtaaatgatatcatccctagggaatatgtaaagtaggctgagaaatgagtgagaaaaccagatcatgcatgccattgggatttatcagtacctagtggtagatttaccttcttctgtactgtctcctttattactgccgaggaacgggagttcttcagagagcatgaggccctgctacatctaccaggttctaaaagaacaagccactacaatcagctatggagactgtgtaatacaggaaacaccttgcacatacacaaaaatatgaatggcacccattgagttctgcagtgccaaatctgcacaactgtacacagtggccatgtaataaatggcagcccttacccagaacttcagtctaatagtgtggatcccagccgtcccatggttactttattatccctgcaacagagcttcaacactgctccaaattctatctattgctagtttaagcacttaataaaaactgcagccagagtaccagccagtgtggcttctgttcctataatttacaagccatcagagacaaccagttaggatttaatcaacccaacctttatgcctgagcatctacaaaaagatcaagaaaggaaccaggaattttacattccatggtatcattgggtagttatgcacagcaaccaaaagagaaaaaagtgtctagatatgagggaatacagtcttccctcagtatccatgggaaattggttccaggaccccctgcagataccaaaatccatgaattttcaaatcccctttataaaatggcatggtattttcatataaattataaacatcctcccatgtaatttgaaacatctctagattacttataatactggatataatgcaaatgctctgtaaatagttattacactgtattgttcagggaataatgaccaaaaaaaggtctgtacatgttcagtatggatgtaatttttttctgaatattttcaatccaccgctggttgaatccatggatgcagaacccttggatactgaagagctgactgcataattgttagtggagtaagccacagaatggtggttagttcataattacttcacagctgctgtaatttgtaaaattcaaaccgtcagtactaaatagatcaagccttacacatgggtaactcagtcaaacccacagtgttgattcatacttaccgtgaccaagtcatcttagtttgcccaggacgtctctccttttagcactgaaaatcctgtgtcccaggaaacgcttcaatcctgagcaaagtaggacggattggtcaccaggtactaccacgcaagaaagatgaaaaacagtcataacatagttgtaaagaacaaattttcattcttcacttacatttggttgccaatctatacactgatttattttaatcaagtcacatcacaaaaattaagtcaatcacagattctctagctaacaaaaaatgtaaaaaaaaaaaaaaatcaagtattgcattttaaaaaggtttccttgacttccaaaaaggtaagggtcattgttaagtacttaactctgcacacatctcattaaatcttgtttttgaatatttgttcaaagtacttgcctttcttgctagtgaataatttttaagaacaacaatctttcagtgacttaactctataatcgctttattagtatttacaagacaaaaggaagctacgtagaaatggaaaaatacatagagaagggaagcaatatagaaatatttttggggtagagaaaaagaaacactccagtcttgtcatgtcactgtctgtttaagggaaacttaagaatggaccatttttatagtttggaaaacttgggagtaattgtgagtttatttgggtctttctaaattcagtttaacagtttttattttttgcaatttcaaaagctcagttttaaaatgaaaagacacttcgagaagagtggagtggggtatttatgtggaactgtaaaaactgaaaaaaatagatcctgctattcattagtttgtgtgtgactctacagagatttttgggagggtttcaccaacctttaaaacttttttgttcttttgtagtttttttgtgtgtgtcattgttgatttaatttttttcttttttgttaaaatttaacaaaattaagtcagcacctagctatacaatgtttttaaacaaattcttgcaattccccgatttttaaggccaatgctgcttaccttggaaatgatgtcaatctgtagctgagtgttccacgatttattatgctgagtggcctctcattgagataccttatcccctgtccattatgtgttagtggaacagtaaaaattagtacctcaattctcatttggattagggtggggtgggggaagagggtattttaagctttgacatttgatcaatggttatttaatatatcacttgcaatgagtcattttaatgtctgtttctcaactaataactgttaatcacatcatagaaccccaaagctgggtatttttgagaactgttctatttttgctaccacctgaacgtcttcaacagttagggggatttgggttactgttggtttgggggaggttgattttgttttttgttttgttttgtttaagttttcttgttcaatctttgctcgaacccaagaacttaggctgctaggttagaactcctgtctgctttcctgagccttgttgctagtctttatgttattctggtttgttccttcttaccctgctaacttctagctggactgaagggtaagtgctcccctatagctagcacagctcagataatcagattagattatctgacacctgcaatgtgcttccctcccccttaaatcttcctcatgtctagaatttgtagtacaacttttcatgttattttcctgaccttaggtttgaaatgtaagcttccatactgaaactaggatgcatgtgatgtgtgcataattgcctcctctccttggctttcatattggcatcaaatgatcctctgagtaaagccaaccattaacgtctaattttttttcattccaagaatattaattaacatcacaacaaaatggcaaataatgcctttgtttcatgtaattcacagctacctgactgcttaatgcctgaaaacagatcattttgcactctgataatgtgctgttgttgttgttgttgttgttgtttttcctttcccattccaaagattcgaatggtcagagtaccagtggtgtggtaaccatggataccttaaaaaataagtggggtaggaaacccagagttgttaactgagcaagactagaagaaattgcaaaatacaattaagaaagcaaatgcattatttgaacactaaagagttcattctagctggcttaagggtgtgctctaatgtaagacccaatagaggattaattttgaaaggagagctacaatacatggaactagcacacacaaaaacaggaaattaaggacaagactgaatccatgtcactcatttacaaatgctttggattcacagtcttacaatgccaaggtattaaccttggtatcaaggttgacatttaacctctggtatcaaatgtcattctgctactcccccaagaacaatgacaacaataacttttttgacatcatttgtatttgtattaatttttctaaaaatacccatgtaagagaaaaaggagacattaaaactttagaaaaatatttctcttaactattcgagttattaataaaaaagaacacatacttccttaatttatataggaaaaaactatcaaccaaaaatgtgttgaggaaagacttgacgttagacggagttagaaaaattggtcaagagagcaggcaactatgtatttgagtattctgaatgctaatttagaagaactaggtcatatcatttctcctgaccatttaatgatagtcttttcttcaaattttttttgtttccttctttaatttgctttttcctccctttctttcttttttcttttattttgcataaatgtacccctggctagcagacagacgtttttcaccacttcaagcagatacttaatttgactttacttttcttgaatgtctgatgaggcattttaaaaggcttatcatagaatgtaaacttagtgggaatttaggattttgctatactttttttaaagaatgaaagaaaggatggatgaatagttaactgaatgaattctgttctaaacaagtttacatgtatttgcacaacaacgcattgctatcctagtagatttttaaacaattgtttgccttaattcctttctgtagttttatctcataaaattttgctatatcttcttatattgtcaacttgcagttgctacgttgcaggaatgcaatatcaaataattaattcaatattaacataatttgtttgacccaaaaccatactgtaaatcatgtcccttttcactgtaaaagtaaatcactttttaaaagaatatgttcccacaatcaggtctaaaattttccaaacaccatgatttgatctaaacagaccatattaaatgaaggtttacctcactgttaactacgtaagacatatttaacatattattcactagttaattgagtattttcatgccatatagtgagttatagtaagattattaatcaggtatagaaaatttatttttgctcatgttggagtgagtgcaaaaacatcgagtactctgtaagttaatataactacagcaggagaaaactaaaatcatttatttattttgcttgagatctttgacaaaatctctgttatgatttttactcaaagcaattgtctgacaaataattatagaaattaacattgaaataaacatcacacacttatccttttgggggtattgccatagtagttttaaattcaagatttctgcatgatgcaatgtgagccttgagagcttccaaagaagccatcctcttttggccattcatattaccccagtttagctaaagggaccacgaagcaattaagttgtttctcaattaagtggtccatttgtgcctctgggcagcaggcatgtgaggaccagtcttttgcttgctgtgcagagctcaggcagggcacaacatcccctggttacttgactattccaaggaaagctcttctagaaaaatccataaacaaccagctgccatcagtcattgtcatttctttatttcatgtcttctgatgaggctgactactgtcattgttcgttattgtccaaaccatacattcactcttgtactgtcaagcagatatgacaagcacacattttccgtataagagaaatacaaagtcaccttttaatttgcagtttgggttcacagatgactttagagttgcattagctattctcttgcctctagcatccatcaggagtagcaacagccataactgtgctctaaattccaatgttaaaacagctacctctagcttattacaaaagggattcatgagagagaagagcctctttcagacaatttgttagtaatataatcataattattttcaacagtgaatttttcactagcccagaaaaatttccaaaatgtaatatcacagaataaaaaggtagatttgaccttttatcttcaatccctaagctgttagtataataggaaaatttcaataaaataaaaatttgaaaactacattattcttccaggaaaattacatttatttgctagacattattgcaagtctatctaaaaatatatatgttagaaacaagatcatataagtgtgcttgatactgagataatagatcatgaaaaatagtatatggttttcatttgtgagggaggaaaaaaggaaaagactatcaaacatgaaatgaacccaaatatcatgatcaaagaacaacatagatgacagagtagtcaattagggaccataccacttgaattttaataaagtagattaaatgagatgagagtataaaacccacataatagtatcactttaggaaccagtgttttcccaacattccttaaatgtcaagccaaaattacttccaagcaaacttggggcaaggtttagactagtttccgcttgaaagtgcacctgctctccgtaagtctgtatgttcatcaacctgcatctatgtcatagaaaccattgacagtgcttgaaatttcttaatgtcagtaccaatagcagcgttatccatccaagcttagtttgaagtcagtctcctatgcccatgtcataaaggactgaaaaatccttatgcaattaaacccccgaagtgaaacaggtagcaatgtttgcaaggtgtgttgaattatgccctagctgcagagcctataaaatcatatagctcactgtcagtacatcagtacatctggagcccttgaagaccaagcaggacttaggaactacttcctaagactaggtctgacacaggtaaagatgattgaaattggttcttaaaatgtcaatcgttgatttctagaaaaatacggttaatgaaaaagagcattaggatgcatctcccaaagcaagagatcatccaaacatcactggggttttaagcagccactttaccctcctaattcctttttgcttaacccgatgttcaaattcattttcattctcttgacacatgccaaatattggcaaaggaagtgatcccagaatgtcctgaattcaggaattgactctttcatactgcttgctctgggctgttttccctctgctaatgtcaacattggagttttctttttctttaatcaaccaattccaactgtttgtacagggaaaaaatggagttgcaaggagcatttatttttttatgtttgacactgtggaagaacagaccgggacagtgcaagaatgactgtatggtgttgcttgggaagcgcccacaagttctttgaaacagaatttggaacagctggaccactgcagtgttttattttaaaatagacaacatatgtaatgcatatggtcctagacatgtatggagacacaggcagacaatctgaatggtatccaaagacacctgcacctagaattctgtttccttctataagatttttttcccctaagagcacatgttcctacttttggatttgcaagataccatctgaatccccatgtgtgtgactccttaataaagtcaatgagaagtttactgggatgaaggtgtcagagtaagccagttaataacccctcctgaggacctggctcctctaagagctggcaggggaaataacagattagaaacttgccctcacagaacatgttatctaccaagggattcaattttatgtatgtgtcttgaccacagagaaactggaaaataacccaatgaaaacacagaaacaggacataggaattggttatacaggggcagaaaagaaaaataaagcagagagatagggaaggactcccagcttcctagaaatgataaggtttaagaagcaaagaaggaatagaacattagctataaatgcagagacatccttggctcactaactacttgaaacaaactggcttttcaaacactaaagatcctgtttgtttactcctagctaatgtttattgagcccttaatatatgccagggccctaggtactttccaggtacttctcttcagatcctctcaacagtcctctgaaggtggacttgaatttaacttcattttacaaatgaggccaaggaggcccagaggcattaagcaacctgcctcatatcatatacctagtggtggcagagctagtctcaaatctagtgtttgtgacctgcctatgcccagccacttaaccacttgctatgctagctcccattaaataagccgtttccaatcaatgtagtatataaatatgccataaaatcaagaaagaaaaatatttgttaatagagtgagtttctgtatttattctgagaagataaacttatgattttaactaatatgtgcttagtgcctactacgtgccaggtactattctagggctgggaatgtagcacaaacaaaaaataccgaaacccctgcttggatgagcttaaacatcagatttttttcattagcaccttgaaacagcactcctggcttactcctccttctttttttttttataacataataagctcagtaaatataataagctcaatgaaactcaaagattttgtgggagccagccacccttgtaagcgctcttgagttgtgggaaccattagaataatgagcccaattttgagtaaatgataatttggggcaagtaaaatccagaggtggctcgctttacttgctggaaattcccactgcattaagctccattccacacatagtgtgcaagggatcttaaggatcattaaattacagcctataacggcaggaagggaactgaaaattcagctcctcttacacagaaggcaactgatgctcagagataaacaattcagccagcatcctacagttttttaaaaacagagctcaacctaaaatctagacctcctagatccagtcctaggctcatgctacaagtggatggggagaaagaagaaagaaaggaagaagggaaaaggaagttttattttgacaaggttactttttgaaaatgaaagcaggctgattttaggcttttctgtaagcttgctttaaaacgttagtaaaaaatgaaattgttctttagacttcgactagaattagcaccacaaagctgcattcattgagccattgtgatggactgaggggtggggagtgggtctgaatccaggtctccataaaggagccaagtcgccttttcagatccatttcctgagtggccagcaaagtgaaataggtcatcagcaaagttttcaagagtttcaacaaacaaacaaagagaaagagacttgaaacatgtgccatatttttttaacagctacaaaagagcccccttctctctgagctaaatgaccagttgtaccatcataattgaaggcaataaaatagccaagccaaactggcagagtaaggccccggccggtttgtcagtttgcagccttttctgagaaacccgagagcaagaagctgctgctagccaaaatgcctgatctatctgttaaaattgggaggcgagggatggatgaggctttttatgaggatgaaacagcatgagcaattcgtgtgtaccccatgcttagtttctcctgagttaaattgatctgggactgacaggttggaggtgagagggcagagtctatcaaaggcgatagagaaatgtcacctggattgcaggagtgtcattatgccaggggagactacagttggagcaggtttaagacacttgccttgggccagaggagtcacacacatgccctagaagcagctagctttcccaggagcaacaacttcctggccatcctaagtcaaagaagaaatgtagtttggagaccaaacaaccgaactgaaagaagcctcctagatgaagcagccaacctcaagttgaaagcactttcctgaggataaatctgaggcagttaatgcagcaaggaggattctctcagattctctaatataattcctgcacatgtgatatcctttccaaaagctgtgttttattattctaatggagcgatttggctgttaaaatacacattcttcaacttgccttctggaaaccgttgcttctgcgagtcttgggcataaacgccacatctcgttcaaacaaggaccacttgctgcttctatgaaaaatgacaacgtttttttaaaaaagtcaaacaataaggaggtataaatctgaccataccatggatttaggtttgaatgatttattaatacaatatcaataataataggagaaatcatcatctggaagtgacactgctaaccataacccaagcttacagccataccccaagcatgggagaggaaaaaaaaaaagctgcctgggactgaggccacacatgaaaatgttatccaaactactcccaagtcagaaatcgatttttcccgtgtcctgacagcatcgctagttcctggcaggtccccgtattccagtaagatgtttcatgaaaaaggatgaataaaatcttttgctagatttgatagaagattctttttctccaaagtctgcgtatcaggagagtcagtaaagatgaggtggagtgagccaatttctttaatggagagcaccttcatttctacctctttaggatttgcctggacacacacgagttgaattctctgagttattttgcctgttgagtatagtgtattttagttacacatgttgagattaattagttagcccttaggaggttttgcctacagccttcaccccgtaaggaaaagtgtgaatacattgagactattaattcacaataaatggcagatcatagcccttgctgagtaaatttgtttgtctctttcctaagctttgctaactgagtaagcacactataaggaaatgtcctttattttcacaaactaaattcccatttaacttaatctccaggtttcaatgaaaatcgttttttttatttttaattttgcagggtggggactcaaaccttttatgaaaccaaattggcaatggggatttggaagaagacgatataaatattgtcactttgctgaaaatcagcataaccctttttccagataatcccaataattgcagagaaattgctgtagacataaccactggaatggcagaatctattaaaaaccagcaaagctaaataggctatcttaagcaaagatccgatctgctttcagtgtttggtgaaatgcaggcgaagttacggtcttatgcttagtttttaaagaacaacataaatgcactggaaatgtgatcatttgataaacatgttgatgccaatatcttcttgcctaaatgcaataaactcaccagtaagtgatgcaagttgacaatgggaggtaaaaagaatatcttggggatgttggtgggaggcaacggggaaacagctaacgttcataatgtctagtgaattcctgtgtatttgaaatgtcaaagaaaatgtgatgtgtttctctaaattgtgtctctctctacatgtataaatgaacagacgcagatagagctcaaaaacatggcatggatgaatttatctcttccaacccctgtaactttgaccacgcttccctctttgagatggtacaacgccttactttggatcacagacttaatgattcctattcttgcctggcaagtatattctttggtctacagcaatttaaacataacattttttttcatttaaatatttctctacctttatgtcagaagctcttttctccattacagaatccctttaacaattataaatgtgttcccgatttcctgggttgagatagttttacttaccaaagaaacaagactgagcgggaggaagttatcagtagaaacagatccaattccccagcctccctatcttagcttcccccttttcagctgctacatgagaaatattcccaagagggtaatcgagtttggcacctgcttgtggagaacttgtaaaaattgcctcagtagcttagagtttaagatgcccttccctccccatcccagatctggtaatcctatctcattacatgaatgtattctctttgtgtattttcttaaaggttaaaatgatttgtaaataaactttatttttcataagctaaattgatttgggtttgtttgtttgtttggatggcttttttttttcttcacaatattcacagcattttttcaccctttcagggaattttttatggtgctttagttatttggaaattcagctatctatccagcaggagtatcaatatttcctgaaatcctattttaaagctagatttaaatgatttaaattcaagggagtgctattatatttttactggatttctgaagatacatttttggctttaaactatcaaattcaaacgcctaaaaaaagacccaatttacttcttcctcaagccataaattgttatttcatttcttaaaagtaaatgctattaatcccactttatagatgggaaagatgagggaaaatgatgaaatgtctttatatagaggaaaattctcatccctgattctaaacactaaagttgagaagaatatctctatgtaatatttatactatataataagtagggttaagatattattgatactaatatgtataatgacaatctttcttttttctaatttttattttaaatttctttttttgtaccaaaagccaagatataaaaaattgtagataaaatagtcttaaacacagaaacagaattatgtggaataatttattaatctgtatctcatgaaagattcattgattatctcaggtttagaattccttcatcaaaaggatctgaactttgccaaattggaaaggaacacatcactttgacttaaaaaaaaaaaaagaaaaagaaaaagaaaaaagcttaccttgcattgcaaggcaatttttctcaaatgtgttttgtacaattatgtgattgttcacataattataaatggcattcattaaacttgtaagaatgtgcctctgaacttaaatcattcccttttatatataattactattcccttaaggaatttttttgaggtatattatttccaagactttttcacattatcattttttaaaacaattttctttgttttgagattcactgtgaaggagagtttataaatgctctctaaaaaaattaaaccagaaatgaaatattaaaacttgctttccattaattacttataggcttaaaattatggtccagaatctaaaattaattatgaatagcataaaatagcttccttccccatttgtatacctgtgtatattagtcattattccaaaatttcagaaaataacagaaattaaaaaggaccttatctcctgcctctgtatattccattttctcattattacaatctttttttcagttagttttggagaccgaccagcagggatacataaatttttctgtgtcttcgactgagttcctaattgatatttcttcaactcttttcaaagcagctattttggcatctacaaaagacttggtgtcatctgagtcgtagaaaatatattttaatctttcacagcagtgttgtttctaagatttagcatttggggtagcagatggagtggcaaagaagttgcctataggggcagcccactgcctcgactactctccgccctctgcagtaacttataatttgaaacaggaaagatgccgtctttcgttggatgcatcactgagctgcatgttgtcaattgaagattcccagatccctaatacaagattagagtgttgcaaaggcctctctcgctgtacttctgtggcctctacctgccccctagtcactttctctttttgccttttctctcccaagatggagcaatattcaaaagatgactcagagaagaccctcaaagtaaaattaagtttatatttaaaatagccccaaatttccagcttagaaagtatcacctaaattggtttatttcttgctttgaacagacactgaaaccagaaaacacaattttatttcaggctctgcttaagggtgaccttgagtggcaactcacttggcctttctgagcacctgttttcttaagtgcgtaatggggctagcaatttccatcccatcatgccaccaaacctgctctaatttgcagatctgaattcccattgtcttgtatagcagagtttggactggtcccatagcaagcaaataaataataagaatacaaacaattaccagaagagaaaataaaactctaaaccaggacacaagaagttcctctcagtttaatggaattacatctgattcacaacttgaaaactaagccatgctgttctctttggagagttgcgttattaccttcatttgaaaaatttaaaaaacactctttccaaagtgaaaggatttatgaagtcctggcatgtatgtagatcaaccctaaaatttcttcatgctctagagtagagaaaacaagaagacttggaatatgacagagctggatttgagtcctgcctctgttttgtattatctgtgtgagtcacttaacgaccaggatttccattttcttgtctttaaaataaaccttctctgtctaccttacagagttgctatagggctcaactgaaagttctctgttaagtgtaaagctctatatcaatgtagagcattaatgttatgatttcctcttatcagtaaccacgactttgccacatccccaccccaatactcctttaacgtgtatggttccgtgttcaagcagtaggtgagacactgtttctggaaccaagctgtctgctaatccccctccatcactcactagaaaattttatgcccttcttgaactcaatctttccatctttataacagggataacagaatgtacctcataggttccactgtgaggactaaaccgcaatatgctgtgcacagtggctggcacataataggcaatcaaggagtgttagctctggctatttttcagtccccttctctagccactcccaactctagcagctctccagaaaacaacctgtatttaaaagaaagtctctcctttattctttatatagggctggttcagtcctggccaggtgtttgtactagacgagtattgcgcccgaaatggagtccgggggtgtcaccgacatctctgctacctcagagacttgcttgaacgggcagaaaatggcgccatgatcgaccccacccttcttcactacagctttgccttctgtgcatcccatgtccatgggaacaggtaagtgtgtgttcgtgtgtctagaggtgatccttaagaaatggcactggcaatggtttatggctagtcttgcttttaggatctgcctgtcttcattccttcggtggtatgtgcacacgtacacacacacacacacacacacacacacaaagggcactaactttcttctcctttcaagaaacttaaaataaatggcaagcagggcttctagggcaagctcggaagttaggccaatctaggttcaaatcatagttcttccatttactagcaataaccctggttggtaattaagccctttgtgccacggttttctcgtctgtaaaatgggatgattgtatacccctggggttgttgagagaatgcaagtacctataaagggctcaacatagtgcctgaaacatggcaaaaacaataaatatttgcctttgtttttgttatttatttcataattgcttaataattacttccttagtgtcagtcactctgatacacatttagtatgtgtggtgagtaaaagccagacatcaaacaagggcagagttacattcagattgatgctctgactctgaggaaagggaataaaattccatgacaaaatttaataaagaaacatgactcagatggaatggcaagatggcaaggaggacctccctgaggaagtgatgctggagctgagaactaaagcatgtgtaggagttgagtggttccaggcaaaaggaacagcatgtacaaatgtcctgcagaaggaggaagccaagtacatttccagagctgaagcaagctaggtgaagctggaaggcaaagatgatgataacacttttaatttaaccatagagcctggaagaacttttgagatcacagtctaatcaaccccctcattttgtaggttttatatacaagcccagaacgtcaagtctcctgactctgtactaagtactctctttctttagaccttgcccagctcctggaggaaaagatccatgttctgaataatgcaaagcagcaaataatttaagaacattgccatttggctctggagacatggaataaatttccacactgccacagccagtttactatctcaatgtatgtagccttgcattagtataaagacaagcctatattatcccaaagctccccaaccaacagccagtgaagccacacccaggaaacactaggtggcttcagaaacccagcctcagatgcaaaagtcgctgctctggagaaatccacatgtgggagaatccagaattgactacatttattttaaatcagaactgtgtcagtcgtcttcatctttgcaagctatacaactaaaatctctgtaggattttttctgtgcttttcctccttctagcactgatgtatttttacgaaatgcaacttcaacatttagagctagataacaatagcatcataggtttgaatatttaacaggcaacaaggttatcatcacctcccattgttatgaggtttgctagcccagcacgtgaccttttatttgcataaaagatactcatgaaaactctgatacctggggggtatctgtgcataattctgctttttataaatatgtacactttgatgactatctgttacagcctcttggactgaattttttaaagagagagagagagagagagaagttgcattatattctctgggttgtcacactgtattctacatatgttactgaataagaaagtgttataaaataatgaagtgtttttgtaaactccctggtaaacatcatcatgaattatgatacacattgtctggatttcatattgtaagactgccacttgattcacagttaggtttatacatcttgtcatggaaacagttttggatttcttattttcttttcagttctgattttccttatgcaagtttgcatctttttttcttattattttagtttgaatgcatttgcgcctgctttttcatgcacccttctttttctttcttttgtttgtgcatgtgcgtgtgctcttgattctcctatggctggccacactctgtgcatgcctcatgcgaccaccccctctccaaagtcaacaaatgcatgtgtaccttagtgggctgccaccaaatacagaccctgaagggagcaaaactccctccccacctgaaccagaagctaaaaaagataccaaaaaggaatccaaaaaaagaaaagattccaaaacccaggcaaatcaagagctgaaaaggtaagaagttatgtgtgtattggcttgtgtttgtaatatctttaccctttccccaagcctccatccatgccatcacttccacttttgcaagctttgagtattcctaaagtctctctttaagcattttcaaaggtgcaattttaaaaaaaaattctagcaatgggcaaaaataccgtgtattgggactaaatttgagtcaggtgttcagtgacttttaaaacgtgttcatattgaaaagactaattgagcaatatgtaaacagaattgtgagtcagattgcttttttagtggcatctagttaggggcctggtaccttaccaagtcattcataataagcaacccatgctttataattttgaaattatgtttaaggagcaaataaaatagattggcataagataggcctatgcatttatagtagtgccatcattttcagcaaatacctattagttctacattcatctcataaaaagaaattcatctcaaataatgatttataataatgtcataagataaattctattaccaaattaatgcttcttagtagaatcacttatatactgaggtcacctttaaggcacttttaacttctaaaattttgtttatcctgtcctgtttcctatgtcctttctttgcgggtttataaattggcgaattggtgaactttttcccttttaaattaggtttactaattatttccagttttattctgtgcccttcttcaccttttataccgtcacccaaaattaacactgacattttaaagttttttgtttggttttagaactgatgactctgatcctggcattgccaagctacccaaaattctcaagcgtgtatgctgtatgcttcatcattataaatttattcactgaatatttctaagtcctgaaatgtataccgttcacttgtagacaggccaaatgaaaatgcaaacttttgctttctagagaatgtggcaggctgtcaatcagtatatgcgggtccaatagggaaggtcaaagaaaaccctgattccatgtggccatccatctccttcaccgcaatatgtaaggatagaggtgaaatgcaatttctgtttgtgtttcactgtaaaagttagattgcaaggcaacagtaacttgcaattaggaagaaagtgcatgcagaatgttgtaggtgcctgaaggtgaggtctgacagaatgacaaggcttcggagaggaagccttcctggctgctgtccaaggtgctgcttttggaaggatcaacatccaagtggagcagagaacaaatggccagtgttgaaaggcacacttgcttgaacctgatctatttcttaggccacgaaaaactaactaaagggatcttgactggtcctattgaggcttatgtgtgtgtttcagaatctttgtttgcattgcatttttttaataaagaagaaatcataatattaagtagcaattgtgtaacattctacagtttacaaagtgcttttttgtttttgtttttttgagatgaagtctcgctcttgtgccccatgctggagtgcaatggcatgatctcagctcactgcaacctccgcctcatgagctcaagcgattctcctgcctcagcctcatgagtagctgggattacaggtgactgccaccacgccccgctaatttttttgtatttttagtagagagagggtttcaccatgttggccaggctggtctcgaactcctgacctcaggtaatctgcccgactcagcctcctaaagtgctgggattacaggcatgagccaccgcgcccagccacaaagtgcttccaaacatttgctataaaatattcagattagctatttttatgttcattttgcagatgataaagtcaaacatctgtaaatttaagtagcaaacctagatgttctaagtccaaagctctttccttttgcactacatcaggactgtacttatatgctgaagacctgaatgttagaacctattctgcataaatctaggagtatcagatcccgtttctgtgcctcagttttctcatttctgtaaaatgagcagactgaatcatagtatctgtaatatccctttaacatctaaaattatcttctatggattacaataacaagtgaaatagtccatcgtcaggtttcataaataaaaatgttttcgaaggtgcaatttaaataatcataaataaagtttaattaaaataaggataatcactaccatttaataattacttgctatattccaggcactaagtgaagtgctgttgatatatgttatctcattttatccttattacattcatgtgagataaatatcgttattaccctcacccaatagatgagtgcttgaggctcgcataaattcagtcacttgcctgaaactcataacaaataactgtctgagcctgattcaaacatggatattctgactttggtgcttgcatttgtaaccactctaccttcctacctgtccaagattagcacttgtatatggtgtgagatggcaaacctggccgtttgatatttgtttcaacatttccaggtgagatgctacagcagtcatctgaattaaagagaagcctgaagatggccaaaactaatatggcctacctggagattttagctttgtggggaaaaccagaatttatctggagttttataccacctaaggggagagtctcctatgaacactaattaattgcctttgggattggggaaaccacattccaaacctttcaccagcatgaccagcatttggatgtggagatgttatctattctttgttccagatttaaaagcaattcatgactcatgaaagcaatggccctttaactgcctttaactgaatagagcccatttccactgagatctcacaaccagattcggattaggtaaaaagatgttttttacctattattaactcagcatttccaccggcagaggcagaaccttgccctgctgcagctggaaatcattaatgaccactgacgtggcagtgaccaagtttctcccaactgctctggaaacttgtgcaccatctccgtgaaaaactatgctctgtgaatcacagttactgtagtcaagtgtagacacatctggtcaatcaggaaggtgtttgctgttcataatttcaaacactgggatgtatggaaccatccacatgtttggcatttttagaattactgggggtaatccccactcccccaccccccacccccagcacacacagaacatttggtaatatctggagatatttttgattgccacagctggggtggagtggtgccatttttgtctagtaagtagaggctagggatattattaaacatcctataatacacaggagagcctcctgaaagcaaagccaaaaatgttaatagtgccaaggtcaagaaaccctgttttaaaccaaactccctggtgatgagctgcatttttcctttacatggatttgttgtttcttttacacaagacttaccctatgtctaaaagcctaacaggtaccaccactgattttcagtttgtacagtggttctcacacttcattgtgcacataaatcatgtggggattttataaaatgcagagtactaggtggcatcctcaaataatttcatttggcaagtcttaaatggagctgggaatctgcacttttactaagcacccctctcaaccatgaatctaaagcatttggtctttagatcatacatatttaggattttggttgtcaaactaggctgcccactagaatcacttggagagggtaaaaatgctaatgcctgggctccacctgcagagattctaattaatctggaatgtggcccaaacttcatgagttaaaaatctcaagtgatttaaatatatagcaaagttcaagacccactgattgagggaacattagtttgaactaactttttaaaactgaacccattttctgaaaagagagacaggagaaaaaggaaaatgtgagtatgctcagctggttgcatttggcgatcataaaatccacagatgtaaattgctacatcttctaatttttaaatcagcttctaaggttgcagtacttaattctcaccataatatttttagtattctttctagatgacatttagattagcatcactttggtcactatcccacagtgacaaggcaatcaaacagctctgatgattgcaagttgcgtcaatgttccttggatccctttattattgggattggaaatttttctcatttacattattatttaacatttcttgaatgccagtgctgctcttcacatatggcctgtgtagaaagtacattgtatcagcaattaacaaatctataatgccaaccgccgcaatccaaagtaagctgcatagattaatgagtaaagcagatgtaagagggtatgaatcttaaaaatctctggcagtgtgctctaaagatttcttttgggcgatgtatttggagccaaggtgctgcccatgttcagagaccatgtgatcccttgtagattaagatttgagtaaccaaacaatcaaatggaactcacttttctcctgttactctgccaggattcctaagtaagtggtttcatcctcccggttgcccaagatagaacctcaagagccatccttgacttctctttctccccagtgtgtcacaacaattcaatttctatatcctgacaatgcccttaagtatctctcaagtccaccatttctccctctcttcaatgccactaccatagtttaggtctctatcttctctcctctggaccacaatgattgccctattgactgtgcccttgcctccaatgttgggtggccgtttcaatccatgtcacataatggttccttttatttctttttggtgaatgccttcctagtagtaaatgagtaacacatttttttctttcactctaactccgtcctctctctttctcatacccgtgcatacacagacacacagacacacacacatacacacacacacacacacacacacataatgacattacatccggtgcttctcaaccctttttcccacaaagataaagggcaaaaactgtgtagtggggatagctctgttttactaacctctgcatgtagcactttatatagcaggcaggcactgatgcggtataaaaaacacctccacattcttggtctcatgttacacactgaacacaaagattattgcacttgtgaacatgagcatgttgctggctggccttccaattctgagcaagtacaggccttgcacatggctgagtcatgctctctaaattctaaggagccagctttacttaataggaagtacttggaagagaaagtgggaaaaattttcaaacaaattttacgtataagtaggcatcccagatgtccaaggagaaattcactttggaacttgtttccttttaacccacgtgactctctttctgactttccccatgagaacagcagattctcccatcgagacatgaaatcttgtgaaatatgctaaattacctattccattggtgcaatctttctggcccatagcaaaccatcagataatgtgtttttcctcttaaaattccaacaatgtgtctttatcccatagtcattgaattaactggtacaaaaacatattttcagatgttacactccttttagagtggatgtgatatcaaaaagccacacatactactggtctgaccactcagaattttgtatatggtgtcttcagaaaggaatctaaagattagttgtctgtatttgtctagaaataaagaaacacatcccttattcctcaaagggaaaaatctatgcagtgccaatttttaaaattggtcctcttgggggtaaaatgcatgctttcctgcattttatacaatttctctaatcatctgatgtgttcttgcttcattcagtacctggactgagcctgagccactttgactaatgtccttgtgcccatagcatccatattctttgtgactgttcagtagagagagacttctccacgactttcatcctttaatagagttaatgacaccttctgatactgttaggttataaccacatatttaggagaactgtaaataagtcaagacagtcctcactggtgtatttttgccccttccaagccttgtttggagattaattattagccccaggaagctacaatgcacacttgtaatattgtagaaactgcttattgttgcttcctatcttattctttgtgatacaaacactttgatatatttgttttagcagcgtgtctgagccccagggcatcagggcataattagaaaagggcatgggctggaaggaaaggagaggaaggggtgaggctggctttcataatgaagcagtaactatgagatgtgagggccctaattataatttataattaacataggattgtacaaaccatatagatgagcaagcagggatatctccttttgagaagataatgctttggtgctatcttgaatttgtggttattaatcacttgaaagagacaaaggaaaactttccatgcaaggattaaattcaaaggtatcattctaaaactagaagtaataaagagttagtttctgggagaactctttttctttttaagtcagtggttaaaagaggatgtttggtctaaatgtcctatttagggagcactgcaaagaacatctactaagatattctgtccctctctggccctttaagctctcatgtttctgggctggaacaatttcgtagcaagtaggattcagttatcatgcttgtttaaggacattttcatggatccatcatgcggtctgcaggcatgcatccatttggagagagagaatatatcatgtttacggtgcctgcaccagcatatgtggacatttgcatttggagatgaaagtatattccctcttcagctggagttttaccccttgttggtagtgactggagcctgaaagctggttatatgcggagcagtggaccagacactgtttcctcttctgtggaattcatacatttctttttacacctggattctgcccttaatcaccaaatagatgcaatatcagaacatatagatcattgtaagctttgaattaatttagcattctgaccctcttgaagagacatcttacctttcaaaagaaggtttttgtggcccagcttttaacataatatggagaaccattctagaaagataatgaactgctaaaagtctgtgtgctcacctgggtgtgtagtgacaatttaacaacactaaagaggtaaattcatttcacaaaacacattgaatcttgaattctttgactacactgttcacacttaatttcaaatattaaaatgtttcacattaaaaactcagtacttcattatattaatcctataatagatattagttaataaactccaggtcagaagcatttgggaaaaagagaacaatttgcataactagtcactcaaaggttgggcagctgggttatggtagtttcaatttgacaaaaaaaaagaaaaatgcaactctagatgtattattatttgtgacatggctcaagatgggagactgtgaggagagtgaagatgacagaactggtgctaaccactgtgacaagaacttgaagagcagccgacatgacatctttcctatcatgctgccgaaaatgtcaactttgtgaaggacagtgagaaaatggtttgccgaaaacttgaaaggtggattccggagatgcccgccgtgtcagatgcgatatagtctgctgtggctggagagactcatttctggctccagtgatggcccgcaggtgggagagcttccaggcttcagcacggctccaaaaatgactgcgcttgacctgcatattgtctcaagtttgcaggatcatgatataaaagaagcgcgttgttagccagtgtgcagttaggtggaaccagagaccaggggctatgttcgcatgtgtatgtgctcatgtgtgtatgtgtttctaaagctaagttcaaagacatcatctattaaaatttggaacgttgtgaaggaagagatatgtgctttatgaacttatatcgagttcaatataagtaacaaaaactaactctgggtaatctaagcaaaggagagtttattaggatgatgctgggggcctcaaagacggggaaaggaatgctggaatcaagtgagctatggaagagtagaaagcaggactgacacagtggttcttactgtatgttagagtaacacgggaaaccttaaaaatgccagtgtcaggctgggtccagtggctcatgcctgtaatgccagcattttgcaaggctgaggtgggaggatcccttgagcccaggagttagagaccagcctgggcaacataatgagaccttgtgtctgaagaaaattaaaacaaaattagcagatatggtggcatgcttctgcagtcccagcctctcaggaggctgcagtaggaggatcgcttgagcttgagatgtcaatgctgcagtgaacagagattgcgccactgcactccaccttaggctgaatgagaccctgtctcaatagttagatagatagatagatagatagatagatagatagatagatagatagatagatagagctttgaggatgcgacctttcacaattctaagaaacagacaagatcaaaaactactgacctgtaaggacagtctggtcaaggcacagctgctggaacaagcaaattccgtctgtttattctagccttgtatcatttattcaacgtaaggattccagaggagggtgtcctggtagctgaactgaggtcatagtccagcttagatatggagtggctgtgaaagggaggggctggcctctaggaagcccttcggctttaatagtaggggaataggcacctcgatttaccctcacacgagagtggccagaatgtggctgaggccactcctccaaatccaggggttagaaattggcaatggatgctaaaaagcctgaaagcaagaagaccagaatattcacagtcaggacacgagagcgtgagagagtcaggcttctaggcaggtgttctgtgtagacacatctcagcctggaattttctagctagcagtttaaaatccagcttcacccctcctcttctctcactctttgtgtctcctttagtgatttagcattgagaaaggaacaagatgcagagctagttttaagacagttgtagaatcacccccaaatattttcagaaagacaaaacaaaagcatggcgtctgaaagataccaatatagctctactatttattttgcaaccagcactacttggaatggcaccttgtaaacaatacaaatgccacttttggaagggattcatagttaaataataccatgtatctcttgcagaatatcttgggttccaaatccactccaacctaagagaaatcaggaaccctgaatcaaatataccctctctgccactggaagaaccacccacctaatattttttttctctagaacagtggcacttagagtgtggtcctcgaaccagcagcactagcagcaccagtaaacttgttagaaatgcaagttctcaacccctaccccccagctctactgaatcagcaactttaggggaccaaccaatccaggttgtcaccaggtgatgctgaggctcattcaagtttgagaaccactgctctagaaaaagtatgctgttgcttctgtggaaaaaacagtactctccaaagcatgtaacctgaatttttcagttaatagttctatagagatctatctaaacctgtatagctaacattgccaaattataggggtcgatgaacaagaaattgatgtttgacagaattttcgaaaacaatgaagtgaaatcaaacaaaaaagggatccttttgctttttaactgacctggttacaacctatgatctttgacaagttgttattcctgcatgtcttttcctcactttgtaaagcagcatctcctgttaccaataccatttcagagcaattctggcagttacaaatttacattttatgtcaaaatcattcgacatcaaattgttttatcacctgtttttattggtgaactctgtacttgtaccttacagacttagtaaagttagtttgttttatttaaaataaaagttgtcgcgctgacataggtgatcaagaagcaaatttaagagacaacactacttttcagttgtttacttttattggaatagtgagattaatagtgttcagaaagtagtacgaggagaggttatcagcgaagcagaagctgctatctgatacttttaataattacaaatgggaatcatcagaacaaaaggaaaaaacataatccattgttaggtttgtaataatatcttttatagtgagaattaactgagaaggccaagcatacactaaatgttcagtttttatcatctcagacacaaagcagaaagctgccttctaattgcctaattgccttagaaggcttgtagggtaatgaatgaatggttttattcacagagatatttatctcctaataatgaccacaaatatcctggctcttcatgttaaatagtctccatactttttgctgtgatcagtaaaccttttctgaactgtaaaattatatttaacagcatttttctctgggttaattctccactaaaaaacaaatgctttaaattgctccatttttcccccagttgagtgtgtgcatgcacatgctgattacataaacaaatgtgtgttcagttcattaacaagctgaaggttgtttaaagaaatttaaaaaccacagcttaaggaagttgtaggttgtagcatatacacgaaaagttacaaacaaaagcatcacatgttttgtggaggccagtaaattcatcctgttatctaactgtagattcacggacgtttcatgtaaaaaaaaaaaatttgtttttgttaagcatggtagcttgcacccataatcccagctactcaagaggctgaggcagaagaatcacttgaggccaggagttcaaggccacagtgagctatgatcacactgctgcaccccagcctggacaacagaacaagaccctgtctcttaaaaaattttttaataaactttgtaaattaacatttgagatttaccagagaatttgaaggcaacctacctgttgtttatcattttgcctttctttggaagagtatgaagaaatggactgaacaggattttactgtttgggggtattttttataaagtggggaagaggaaattttcgcatatttcaaatagggcatttttattatcaaaaaagaaggaaagctgactgattaacccgtaacaggaggtacattgctgtcatttgccaagtcttttgtgcagtcagactggtctagtataaaggattttcccaacttatgctggatccttgagaaggcctataaataagaccatttgtttggtctcaagatgacttgcatttgcaaactgaagaatgttccaatagaagttttatggtgacacaccaatctgcaaactggctcagccagtagtcaaaacaagtcactatgagatctgggaagctgaaggctttgaatgggtcagattatcctgcatttagtttggaacagataaatttgggctataaatatgtatcctccctttatattttcaacttgaatggtccataacaaatagagtatatatgtatgcacctaaagatgacacagaaccatgagaatatgatgatcaaactgaaatcatttatttaagctggggtcctttttattacaatgagtaacagtttgctaaaattggaaaacatgtggtttgttcttcaacgaatacatgagcacttaaataaatctgaacatcggtagttataggcaagaaattgagccatttaagacgtctgacaccgggaaagacaaacacttacaagtcacctgattttcataggaatttttgtgcataattcagggaccccaaacccaagtgcctacaagagagataggtaatacaatttagcaatgtggaccaggtgagtgcctgtcccaggtaaggaagaagctgttagccaccaattaataatgctaactgttccaaattttcaagaaaacagaaatcagaatcgtattctcaaacttccctaatttaaaaaaatgttggcaactggttcaaatttcttaagacgctgtgagccaaacagaacaagttcaggggctggacttaaccttcaagccaccagtttgtacattttaccatttcacaagaaaagagctacagctctgcacatgtttccaaaatgataacccaaacacaacccaacgcctttggaagctagccctgaatagctgggcttctcctgagctcacatcgatcactgtagttgtttcttctaaaatggacagtttcctcctgctagagatttgatttgatggtgtcagcatatgaggttcccgtcatttcatgacatgtcttctttcaggcctgatggaattggaactgtgactgttgaagaaaaggaacgttttgaagaaatcaaagagaggctccgagttctgctagaaaatcagattacacattttaggtaaggatctggggctggagagctttaattaggagatgagagtgggaagggaaaactaaaggacttaattttccaaaactgtaaatctaccagaggatacattggatatttagaaataactgagtagaacaagcaaatcaatcagatatggttccgcaataaccaggaaactttgcattcttaagttcatgttatttccacttaaagaacaaattcttccatgtttgagctgaccctggtcaacaatctattacaaaaagttgaatttgaagcttcttcaaggttcctaagtaaaaatgaataaataaaaaatcttgtgaatcagaacatggtgaacaaggaaggaaggcagtgatactcctaggagagtctccactttttccactaccgcagaaacagcactggctggcaacacagggaaagaatgaaccttgcatcagcctgggtggattgaatctcccctgcatactcaagagagccagcagattctgtgcttgagccttacatcacatagcccacttctcccttggagcacattaggtgtttttagtgctgtcctggtggttctggaccagagatcctgaaatagtaactgaaaaataataatagcatttgtaattgttcctatttattaaatacttcctatataccagatatagaactggaggctggagaagtattaactcgtggcataacaactttgtaaggtagttatcataatccccatttaaaccaggaacaaagtgaggctgagagaggttaaggaacttgcccaaggcaatccagctggcaagtggaagaagtgggatgcttacataagatagtccaggtttaagcagccatgctagtctctctgtcccatgcacagtgttctgacgggccagtgacaacctgaaaccagtcactggaacttgtagtggtacctgacatagtttttttctgtgccatcaaaatcctcctggataaatctttattgatcatacacactatatgtaaaatgcattaccggtagcagacggtccataacaataggaaaccgcaagcagggaaggatagctagcagaatcatgaatttgctctaaatccacttttctattccatatattgatcttttggggacttaagtaagtgtatttgaatttcagcctgttccaactaatacttttttaacgccagtctcgataataacatataaggtcacatttgagctaacaaatagttctccttcacaatagaaatctaaacagagccttatgtcaccactctgaatattcttttctgctgcagacatttgcagagtccctctttagtcattattcacacatacacatatatacattatatacacacatatatggtgtgaattcagattaacataacacaacgtgacaaaataaaaagcattttccattcctcagagagagttgctataggaatcaaattgcagcatatttcatgctaaaatgtaataatttaggcaacctgaagaattttgtcttttttaggtattgctttccatttggtcgacctgaaggtgctttgaaagctactctctcactcttggaaagggtaagaatgaaagtaaaagatagatcacatatatataaaaagacataagcataattgtaatgaaatgttttggttgaatgacctagttgtaatttttataggatttgtttaccattcatcaaatatcagaatagaagcgaggaaactgccaaaactcttgatattttatcttcaaactcccaaataggatatacagaagatatgttcctagcccttccctgactcatggacggcctttgccaatgctttgcaattctggtgctttctctttaagcatggctctcaatcttattaagtcacaaagaactgattttaaactttcacgcttctaagaagtatggatgagtgacacatttgcttgaaccttcttaataatccctctttttcctacttgaaggttttgatgaaagatattgttaccccagtgccacaagaggaggtaaaaacagttatccgtaaatgtctggaacaggctgcgttagtcaactattctcggctctcagagtatgccaaaatcgaaggtaaggctcccttctgcccccagttttgaatttaaattttgatatgcctccctggggaagtctttctcttttctcaagggcacctgaaaacagtggtccgtctgagtatattaagctgaaacctggaagcacctgaaatgtcgaagtttccttggctgtggccaagtaaatgaattaaaagacattacaggggctttgtaattacagttccctttgtaagggaacaatattgaaaacaggatgttatcagataactaaattccttctgagagtctgtgttggccctaagtatcggctctgtggctgatgttttcctatgaaggagttctgtagaattgcccccttctttaaacagaggaaaataaagcagtctgttgtccgctgctgatagcattggaagcaatacaagaactgaaaagagcaagatcaaggttttgctctttcttgcccccaaaagtaccttgtcttttggtagtgcttcaagctcgatggcaggttagtgctgagccatctgtgatggctccaagttggctttagatctcattcattcttgttactccagaccttaaatgcttgttaccactgccctctcaagttttagggaagtggtcactgatgacccagtaatcaccaaaggtgctttgagtaaactctacttgagaagatatggttctttgggacctattcatccacgaaggtattaatcacttttcattgttaccctgttggctgctatagggtgatttgaaagccacacccaacttgaccagtggtgtaagtgtataaatgtggaagttctgtgtgcaaaactcgatgtgtccgcattctggaatctgatgttctctcacacgtgaaacatgacacctgactaaaactagcaaatgcgcattgtctgcctcaagacaactggggggaaaagaaactaaccaatcactcagaccccatcacttactctgccaaaatccttgtttccttagagaattaggttaagattatgtcaaattcacagtgttctgtacattacgtgtcctccctctctcaattttgtctgtctgacaatgcaaattgtgtaccagtggtaatgaattcactgttatgcatccagggagaaacacttaagaattgggcaccaaaaggatgtttatcaactcttgacttggtaatgagtgacaaaaatagaggaacaagaggtcgttaaagggctatattagcaaataattgttccagcatttactgtcccaggacgtaatgattggttgtatttggtaaagtcagccaggtacctaacaattctaggcaagtccagagatgggatgggatcaagaaacgttctgttgccatggctgctgcctcataggtcttggtctagctattactactagtcttttggtaagatctgctctcttctttcagataaatctatccaaaaacaaactttaagatctgtaagtaaaaatgcattcatttccaaagtagatcagctggtctgtaatttccttttgtgcctcaattcttcttggttgtgttaattatcttttgcactgtgacttttaggtctggggattctttgaagaaaccaattcttttttttcaactctcttttcagagaagtacctcattccacactacctgctctcttccgcttctctccttccttgtccgtgattggctcagccactttaatgtgacctctgcaaaagtggctgagacaccaatttcaaagcatgctgggattgttaattcagacaacccaacatcctctggctgcatgtatcaggttttctttcatgaacatagtccaccataggctgagacattgcagcctgaaagatattactaccagacaactttcttttacaaggctctgatcctaccctcagagaagaaatctttcattttttacatttgagcccctctgtgagaattaacagctttgttatctgagaattctggaaagaagttgtagtaatattgctggagactatgtttatgaagaaatacctcaagagccttagatactaaagtcttaaatccttagtatcttggagccttaaatcaatgaaattttgtttccctttactcatgatgttttggtcattgtattcttgcaaacagctctaaagagacgtgtaaaatcatggtcacaatctctctcgtgactcacggcatgctgaatggttaatccagtagatctccaattttgaagctcctttttcttttatcctgtgtttatcccaaaatactctgtggctattttcctttgagctaatgtaacgttttcctctaacctatgacctttaacctctttacctctgacctaagcctcttgcatgcccaaatcctcttttatagggaaaaagagagaaatgtatgagcatcctgtcttctgcttggcctcccaagtgatggatttaaccattcgtgagtacctaccacctcctcaccatgctgtcttcactctttctgttttcattatttcaagaaaatccagatccaaaccaactcactctccttgcttcaagttttttagcattggcttgtctgttggttctgtctgtgaaacccagtgtgagaagtccagtcactttttatcagcctaaaacaggttagacaattaagccatttgtttgtgataaactcagatttgtctgtaagtttttcagttattctctgtctgtgacctgaatgcatttttactttgcttgtgtgtaaccctaatttgtaaagtgcttgtcactggtacacaatcaaaaggtagcagctaggctggggagcaatgcgttaggtgtcagataaaggatatttggggcaaaatcatgccttcttttccatgtttaagatgccaaactattatgggtatgagaccacaccaggtggtccattctctgtaaaaattagatcttatatgcctcctgtctgttctctatcaagctgggaagcttttccttgttccctctagagattttgacttgtccttgtcctctaaactttgcctagaacatatgacttaattgtcacttggagagttcatgtatgtttcatagcttgatttcacattaaacttaattttactaattttctatttgtgcagcattttccacctctgtgaaggagccttttttgctggcccccaaactttggggcggtgggaacccaagggcaaccttttctttccaatatcatgtatcacacataagtggggggcattttggtccacttgctcattaattctgcatatgtgttcttgtttctctctcttctctccttgttgtgctctctctttcaaatagagaatcaaaaggatgcaggtgaaccaattgtatatgcattataaattatcaggactgttgagttatattcagtttttgtttttgtttttcaatggctccttaaggtttgtactcccagagagccatgtggagttgcaataatacttaaggagttaatttgtgctgtctaaatacatctcatgcccatttgatgttgacctttatagagcagaatttctgaaaaggcataagctttaaaggaatagaattctggtttgctgcagagcttcatttcatccttggttataggattccagtgatttggcctcatgtgcattttttaaaaagttgtttaaccaaatgaatcttcctctttgtttttcatttcttttttctgttttctgccctattgagaagtttgtgttctttgatgaatgtttatcagccaagacagagagaagttgtatccatgttgttcttgtatgtatcgcatgataaagcaggaagcatggacaggatgaccgaacaggggctgttgctggaagttgtattagaggaaagctcttggaaagttctggcttcggaaattttcttcttgtttggtcccaaaacttctgatcttattttgaggagaagtctgacttaaaactttaataaattagaatagggatcatcatttttgtagtctaaagggttgtcaaaaataactatcagttaatccaaattaacagttgagcacatttcaaaacatttcagaaagcattcctgagcacattccaagcatagggctgcaataagtatttgaagactcataaacctgtgttcaagacacatgaacctttctctctggtagggaagatatttattcagtcatttattcactcattcattcatttattagacaaatggttagtgggagcctaccctgtagcaggtacagtgttaaaagccagagactatgtaaacaagagggaaacggctattagcctcatggagtatacatgcaaatgggtctatgtatgtaaatcactatattgcaaggcctattggtagagttatgtgtaaaagggatggggcattgtcagaaaaccatggaagtcttcacgagatggtaaggattgaactgcatcttgagagatgaattagaataagcaaaggggagctaggattgggaatggaaagtcatcctacatcaagagaataatatgtgcaaatatgtaaagccagatagctaataaaaaataatgaatgcttatttaatgcatatcatgttccaggtatgattctaagcatattattaacttatttctcctcaaaatcccttataagagggaactattattattcccatagtagagatgagcaaacggaggcacagaacttaaaaaaacacacatccagaagtataagtggtatagctggagtcagcccaggcagaagccacacttttaactactctgtaattaattcaacgtagctgcaaaacagagtgaaatgatagtagtggatgggtgctgatgatggcaaggtaggcagggacaggacttcaaaggtctttctatgccataataatgctgagttcagactatatctcatggttcaaaatttcttaacttgaaaatcatgccaaccttggcatgcatatggattttttcagaagaaagattccacaggtctcaactgcaaaggtgatgaagagtcattgaaggctgtttatgcaaagggatgggttggcggtttacactgcagaaaaatcacgctagcaggaattaagagaaaggactgaagagagggaatagggtagaactggacttaaaagttgaggttaaagcagagatgggtttgaagcttggtatagtgaagctttttctaagtatatcaggtctcaattgcaatcttaatcataattacttctttcctggcctttaaatgttttttctttcttaccccttccctcccttttcaattttcttaatgagaatagagcacaaattcatggataggtctacataaccaactgtatggaggtggtagggcaccaccggagttacaggtgcaaattgtagggaagtgggtagaatactggggactgaaatatggacagctgctgagtcctttagtcagactatgctttaagaatctacagggctatgcagatggcattttggtggacttatgctttatgtttggtggcattattagaaattaaatgttcaatttaattacagtacctccaaaaaaagatgcaaaagcctgctagtctatgaaagaaaagctgtgactcctgcaaatgaattctattattttaaatacatttccatgtaaaccgtcacacattctgaacccagcaagctctgagaaagtctacactactattgctgttttgcctcagttcttggctaaatacttgcataattttctgagcatcataacgattccactggaatttgaaataaaacaactttttcctccaaatatggcaaggatttgcaaaatcagacagatgatgatttgtagacagacagcagatagatatagacagaaataattaggtaggcaggcagatagatagatagatagatagatagatagatagatagatagatagatgcagaaataggtaggtgggaggaaaggagaggagagaggagaggaaaggagaggagagtaggtagataggtgggtgggtggatggatgaatgatgggtaggtggggagagaaagagagaagagagcagccacctatgaacctatgggccttggccctgtgctaagggcttctgattcaatcttaaccttagactcataaagaagtctttatttttgcaccctttacagatgaaggagctgtgattcagtgaggataagtaactttctgaagcaggatttgaactcaggtctgtctaaatttaaataccatgcatttttgtctctttctaccatgtagactttttgcctgatgtggtgagcacttagacaatatccattcattcagtggataaggtcaagtataatacctaccactttttacataggaagactacaaattaacagagcagtcctttctggaactggatcattgacaaaatctttacattgtaaattcttcccgagggcagttgagattccccaaggttgtccaagaactgaggacttttcttctctccaattgacagaaaccttctagatcaggtcaaatctatccaaaggacttccaggaagattgtgtgatgttgaggttttgtatctttctctgtctccaggcaaatttcctacagatctaaggcttgttgaaagagagaaagagaaccaagctggcaaaactcaccaacacatagagccaagccaccaccccactgtcttccacaagggaccaataatagtgaatctcatccccacaggatggccattctgagatgaggaccatctcatgcttcatgtcttatacatgagggactaagtggttctcttttatttctttctttctttctttttttttttttttttttgagacagagtcttgctttagagtacagtgataggatcctggctcaccacaacatctacttcctgggttcaaacaatacttttgtctcagcatccgaagtggctgggactacaggcacacaccaccatgcccagctaattttttgtatttttagtagagatggggttttaccatgttggccaggttggtcttgaactcctggcctcaagtgatccacccacctcggcctcctaaagtgctgagattacaggcatgagccaccacacccagcctttccatcctttttgtttcagtggtgcataaatcagggtttccaagcccagattattctgtggactagcacctcatctatactttacaataagtggggaggacaaagagaaacatgttttaaacactgtcaccaagaaagattttgggaaaaaaaaggatgtgttaaaatatgctgtgaacccacaaatatgaaaccagtgtctctctcttctatcagaaaaaaagatgtgatgctgcagattatgataaaaattgttgtttattgagaatttagtatgtgctaagtagttatacatatctcatttaattctcaccatgaccctgtgagataagtgttttattaccatatttcattgaatctaaagggccatcaattataagctgcgccattcatatactgtattgtgacatgctatcaaacataagatgcatccggatttcagaaatgttacgatgtgcctcttacttcaatgaaataagaacttatgcattcatgcatggaaatcctgaagtagaaacatgttaagtcactcccccaaggttaaacatctggttagttgtagagtcaaaatttgaacatgaccctgtttaattccaaagtccccattttcaacttctacactataaagtgcttgtgatttgttagcaatgaaactgtataacacaaaagaggtttcttggtcattgacagctagaaaaatcaaggcctggagaaaagaagccaggttcaaaaaaaatgagtagtcagtgactctccagtctcttgtcctatgtgctattcaagagccatcaccaccccaccaggctgccttacctttcagccaagatataacggccctatccacaatccattaactggtctgagcttccagtaggacatttgatgacatctagcatccacatgttagagtcatatacgtgcagctctaagaaaacactacctcaagcccagcctgagcactcaatgatttgttataccccaaattcaaatccttatcttgcctccactgggctttctaacctctgtaacctcacttttattttctataaaaggtgctaataatggttcctcccccagagaattattgcaaagattaaaatacatattctaaataaatcggttagcacaaatgcctggcacatagtaagtgctcattatatatattaatttattatttgtttgaaagtatttaaaaggatgttcttccaagttgaaatgtatagtataatgatatcatttgatttcagaaatgaatcataaaacagtgcttcttcaactttaatgtccatctgaatcactggggatcttgttgaaatgtaggttctgattcagcaggtctggggtggagcctgggaatatgcattcttaacaagcttccaggtgatgctgaagctgctgatccagggatggtactttgagagccaagggaatataagaggtattcaaattgtcttttattataaatttcaaatacaacattgcaatctccatatatatttgttaaatatccactaggttccaggagctatgccagacaccaggggagtgtgtgatgagcaaaagcagtcatgctccctacccttgttgagcttaccaaaaaaaaaaagaaaacagagacatgaaacaagcaatcacaatctgatgatgatagtaaagggaacaagcaaggtgtcacaggagtgcagcacaagggaattttacccaggccagggtctttgatgaattgcagagcaggggatagtgccagagaagggcatgatgtaggtcaaagactggacccctaagaagaactgactggggtgttccctagccttgtttcagtgtttgcctctattcatcatccctccagatgctccaagctcccgcccaagacagcttgtggcaatgtacataaaagtttatttggggactaagtgggtacttagtagtactactgaatcagagaaaaaaaagaactcaaatagcctaagcaagaaaagagaattttttggttcatgtagctaggaaatccatgaaggagttggtctcagaaatgaaaaatgttcatgtgttttcatatctccagctgctgacaggcttctttaatgtgactggagctaatggttgaagtttgggaagcaatatggccacaaatagcaccagccttttatcctagctaatgactctagaagaaaaagagcattcctctccaagcaactgtatacaattccagagaagggccacagtggcccagcttgggtcacatgctaaccccagagccagtcatagtacccatgatggtatgaggtactatggttggccaggtgtagctcatgtggcttcccctgaaggatactttccttggaagtcccaccaaaataacatggagtagagaaggtaactcccctaagcaaggttcttgcacatacaaggacagatttccaacacaatgtccatgcagaattaagctcacttttcttatatgcaacagctcagcccgaggaacaaagcctgagttggcatacaataccaaattagagaagaaaaaccattacaagagtgttatatttctttctttaatttaaattaatttgtattaagttaaataaaattatttttaattgtcttaaatagtttttgtttttgttttttgagacggagtcttgctctgtcacccaggctggagtgcagtggggtgatctcggctcactgcaacctccgcctcccgggtccaagagattctcctgcctcagcctcctgagtagctgggaatacaggtgcacaccaccatgcccagctaacttttgtatttttaatagagacgaggtttcaccatgttggccaggatggtctggaactcctgacctcgtgatcctcctgcctcagcctcccaaagtgccgggattacaggtgtgagccaccgcgcacagctgtcttaaatagtatttaattgcattaagaaacctgatgttattctctggcttggaagtttaagttatgatgtttactattcagaattcagcctagtacatttgttaagtaaccagagactttggataagagataagaattcctgtgtagtttgtatgtatactgaaaacacagagcattttatttttcatgaaagcactgcattggacaggatccactgagaattcccttctaccaatatttgatgacctaccctggccccagcactgctctaagccctagaaatacagaattccctggcagacagggagatagacaaatgtatataatttcctattatccagggccagaagtgctcaagtagaagcatcgacagaggagctgaagctttgctatgatggcactctcttgttatggcatatgaaggcataacccttgtcatgaagggaagctctcaaaggtttttaagcaggagcatgacaagttcagatgtgtgcttaacagagatcactctgactgctgcatggcagagaatgaactgcagaagagaaaagggactgaaggctgccttggaggctttagcaacagttgaggtggaaatgatgagacctgagtcatatgcccaccccctcggcaagagtgtggataagcacgtgatctagtacggtgtgagataagagacattttggaggtagactggacaagctataccacctaagtccttacagggaaaagacaacgatggctccaatgaaaagcatgggaaaaatccatgatccatccaacagcctgtattaacacatactttagactgacctagagctggaaccttttgaaagggagtggatattggagaatcaaggggatcaagtatacataacagacagtcccactaaataaattgtattagatttcaaccttgcatgtttttggcctatgtagccatcattttagggaagctgggtattcaggatagtatgatgtggctatctgctaagctttctgttgctacttgagcttttatctacccccacccccagatcatagcaaattgctacaggctagttattttctgtaattgcataatacaaatactagcatcttcagcaacacatcaataggctggaacttggtaataagtgagtttccatcaatcatattcatctctcatatgatatttcagggactggcaattcactagctagagccagagttggtcaggttatttaagggctaattggagtgtctcttgctcctggatgcatctcttccttggcttagataagcctgctgcggaattctctttttgtttttctgcagtcacatttaactctctctctggaagccaagcagatttaattgtgtaaacatgagcaatggtaattgggtaaatgaagttggaaaccaaggtatgatgtttttgttttgctctttgaggaaaaaaaaatagggagcttgtttttctatggtggcaaacctcactgtcagaattctggacagacagttggcaggaggaaatccctttatgaatttctcatcaagacccatttagctgaaatatgtatctgctgcctcatgggtgacagatcaacccagaggcgccttattgttttattcaccaccagatcaagtctttctctacccaggttcagttaactgggtgagaatgagtcaggaatttctgtgagaactgcacatgcaggtaacatgcattcactgaaagagccatgaggatggattaccagaaatgctcttaactttaggcagtgctgtcagtggaaaaccagattttaacaaaatatacaatatggagtactattttttatgatgaaaggattagtagttgcctccttttaaatggttatcatttaaaactgagtcttccaaattctatttacacacatttttttcccaaacaatttcaataagaggaaactgttaatttttttgtcctgtattctaaacactgaaatggtccagcaagaagaggatctcatgcttttaatagatgatttttgccagaatattatattttatccatatttttcaatcttttttattaatgtcactagaattccatttcctacatgcctgcagtaaaattcattttcccagttgaaaattcaagcaaaccaagaaggaaacttggcaatggagtatgtccctctcaccatacagattgctttataaaccagaactattagaaaggagcaggtccaaggttaatgagacactcattaaagagagagaattgcagaagctgatagtgctctgtgcctgtactgaaggagaggctattgttataggatgtttgctgtgctgatattgtaaaccacatgacagatgggtcaagtgctgattacagtattctaacatttggaatagcaagtaacatatttgataagctggcaagtttttatatatgattcaacccacaatataaaagccacgagaattccaaattgaaaataattaaatgagctggaaacaatcagataccacacattttcccccaaaatgacagattttgacatgttgaaattccacaaagggagcaagaatatttcctagctcacttgaactaataacggcccttcatctgcttttgcaaagcaattaattgcagccttctcacaatgtggaggtagcaataaacatgtgtaggcatcttgagctttacagagatcagtcccatagattgctttctttgctcttatcagcagccctgtaacatatacaagaaaagatactctcaatttatagatgaggaaactaaagcacagagaggttcaagtagcagatgcaaggttacgtagaaagtaagtaacatatgggggatgacaagccagatcttccaactattaatatatcaagtcctatttctggtcatctgtaaaaaagaagcagctattaatgtataggtgttcttcattgtacgaagtgtatctttttttggtcagtgctgctgctgccatcattcatgtgtatccatctggataaagcatctggtatttgcattcagcctctgagtgtctcggtggtggtggtgggtgggggttgctggtgacactggtaagagtccttgtcaaacaatgtcacacctctgtagtgttgaagaattgccaagaaagcagcagctctccatttgtgttttatcatttttgcttatttggttgttcttttcagagtttgtcatcttacttgtcaccctttgttaaagtcactttgtctttacttttttactgtctctcttcacctacccaagcagctcccctgccacatcctgggcctcctcctccacccacccaaacacagaccagcatgttatatcagaggctcaaaggcatgcctaggccaaaatcaagtaccgtaaactttcatcattcctctacttggcagctttctagtttagtttgcttttctgttcacctttcttcttgaaattttgtttcagtttggaacactaagctgagactcgggctctcaagtataattttataggttttgagatactcaaaagagagcatttatttccaaatgtccacatattttttgtctagctatgtctgacatatgcaacattttcaaatctcaatgtcagcacaaaataacattgttgttgcgtaacattttgcatgacaattttttctgtgttatgagcttcaattctattgtatgaaatggttcttaagtatactatatttttagttccattttatcagtgctccagctagcgcaagcttgggggataggaatattgtaattcatctgaagacagcgttaagtggccaaaaaaaaaaaaaatcacttctaagcacaaatttctccttgacctctgttggggagagggaagaagtgctaaaggattttgcacaatattttctttaaagacaacatcttagggaatttacttttagttccattttgccatttagctagtagtacagcagctatgcaaacaaacaggaaaatagtgcagtgtctcactaatgtggcttgatctacagatgatggaatcacagctaattaatagtaaatgaaagactggctacatgggttaattggcagatcaagtgttctagattaaaggatccttaacctgcttactttaatggttttatgttcaagtaaaattgcaaagggttttattaaacatactgtctgtatatatacatcaggcatacacatatctgcgtacatgtgcacacactcatagaatggctgcatgcacatgcacaatttatgtgtatctattgatatctattgtagtcaatctaagagtactgcctattaaaacaaatcttcaggtggtcctagcttcaacatcttggatttttccaaacataaaaattattgacttttttttaaaaagtgcataaaaatattggtatgaattatttatttatcctatgtcataaacagccagaattcccctagatttggggagtgtttcacccaaaaggacaaagctctctatttttaaagcaagagatttcaaagatgtgccccaagtgggatttcctgaagatttgtattaatgtgcaggcttgtctgttactagaaaatgtatgtaagtgtgtgatgtgtgtatgtgggtgtatgtgtcgaatgggtaataagcataggatgaggaatttgcaaattgatgtgtaaatgtgaatatcaacgaacaaaaaatagtagcctgtgcatatttactatcaaaatgcaaatacctcactctacacatattacccaaaaatatatacacagtatgtttgtagaaatgcctgaaagtctacgaatgaaattatgatagtctatttatcaaattactaacaggtcagatgccccaaaagcacagaagtcaatcttgtcatacactctttctctaaatatatgttgctctagaccaggcaatgggctctcagcacctaagctcccacatctacttattctgagtgttggttgttctctgcctaatccacatgtttatgtttcccacagccccaccttcaggctctaaccagatccagccacatttccatctgggtttggcagagataatggagctttccattgacttgaatccaggaagcccattttcacactagccctcaggccctgttagactgagactttcaacacctggctagtcttaccctgtcccactaatcaccttacatcccatttgctagaacactcttcttgcatagtgtctcgctgaatttatttttcattattaaatcctaaattactaatgacctgatatgttcattacgtaagaaatgcataaaagaatattaagaacctttttttttgtaaattagcaatctcttatgattttaagtctgcctacttcctcccacccactgctgcctgccagaaaccttcctatttagtaataggtaattctttctagcaagaaacatcctgaagccaaaatatacctgtttcagatgaagagatgaaaataaattttgccagttcttttgcaaatgtatgtacctacttggggaattctactaaatgatgtttatttcactatatcccatgtgctctgactctgagacttcaaggtttgaagggggctaaacatgaaatacaagttcccctggaattcagactggttgaatccaagcagtttcactggccaagaaaacctttatgttttggccgggcacagtggttcacgcctgtaatgccagcactttggaaggctgaggcgggcggatctcctgaggtaaggagtttgagaccatcctggccagcaaggtgaaactctgtctctactaaaaatacaaaaatcagcccggcgtggtggcgggtgcctgtaatcccagctactcaggaggctgaggcaggaggatcacttgaacccaggaggcagaggttgcagtgagctgagatcgcaccactgccctccagcctgggcaacagaataaatgagactccgtctccaaaaaaaacaagaaaaagaaaagaaagaaagaaaacctcctttatgttttaaatattactgttttcccaaaggaaaaaagtttgtaatttttggaacataatgacattgtcaaactcatgaactcagctctaaaaagaaggcaacataagccagggttcagattcttcttgagctgggtaaaaatacaacactttcagtttaagagaaactaaaaacaaagaaaacaattaagtacattgtttcagtttaactgataaaatttcaattgtaacaaccagtagcacaaactatcacaacccattcaataatctactcctaacacccttttaagaattattattcctgactaatggcccaggcatatccaatttttcttttctatctcctccctggacaacttgaagcagacatttgaatctgcattttcaaaatgagcgttccaacatacgcgagcctgcaatgaaaaattacgctgtagcatttaataactaatctaaaaaacaaatgtaacagcaatcaatattaaacttctgttaatcttcccacttcaggtagcataattacaatctagagagtggtatagtacatttatgctgtctttaaagaacatgtgtacaaaatgtcactaaatttgatatgggctgtcatagacttaatatagcttcatatgcaaatttgaagctggagcactgcttttttctaatatatattataataatggtgataataataaaatggctttatggtttgctcactactaattacatggcacttaacatttgcatgaattttttttaaaaaactgataactattctcaatttcttatccactagttctaatggccataaaagtagcctgccactttcgctgaattttaacacaaactcttgtactacagaaaatgtaggccggttaatcactcctgccaaaaagcttgaagatacaatacgtcttgctgaactagtcattgaagttcttcagcaaaatgaggagcaccacgcagaggtgagcaggcttggtgggaagtgtatcttactgtcccttagctgagcttgcagagctgattttcccagccagattgtgaataagatgccttaacacccattttcttttaactgggattgcaaagggaatgaaagtggaagttttgcaagaagtctttggaaggttattttaaccaaccaaaaagtggttgcatgttgtatgtttcggcctaagttttcagatgtttctagcgatgaacaaatgaggtgagtgctttttaaagttaatcattcaagcagcatctggttaccattgtccagaacacaaaatattttttggttttttgtggttgtttttgttgccaccactgttgtttttattagttatttggtatgagaaccacagaccttctttctcaatttatctcggtaacttactctgcttgtactacagtcttcattttttttttcatcttagattgcctgggttgttaaacacagtgacagaagcaaattattctgtgtcgttcaacttgtcgattctccaacatacatctaaataaatatagcttactttttttaagaaaccactgtcaaaatgatccttttgataataattataaaccaagggatttcaaggctaactaaatcccaaacctataaggacttaaacaacctaacacttccaaaaaaattccaaaatttcatgatggttaaatggttatatcaatgctcatctcaaaagtgagatttaaaatcatctctcttaaaataatctttttgaaaattgcataattctccccctttctctacattcagatttacagcaaaggggaaaaatgacatttcctaaaagtaatttctcaagtacctaaaatggtcattccatgactaaatggaaattgccagtatagttaaataatatataatacgccataaatccagccgtcccgactaatgcctgattgcatatttaaatttcctccctgtttttctactattttattcaatcttggctgatcatggcaggggaaagaggtatgtgactaaaccgaatgaaccagccacctgctgtcatactttgtgcatgcccttccagtaccatgtcttctaatgggacttttcctggtgctcctgctttctaacactgacccaaggaatgtaacagcaacttccagtggactgcttgtggaatgggtgaccctccacggcagggtcaatgtgggtgattctcttgtgcgtgcatgaagcaattgatatacttaacaacgactgcagttacatcccaacacaacgcctcctacctgccttgattctgtccttagcctggtgtagtttcctatgtctgtctgtacttacctttattacagcagatgagtatcaaacttagtaaccagtagctcaccggagtgatactaatcttcctcaacaaccgtctctatgtgaatcatatatacagtatttatatatagagagagtactgaagaatttttttccctgaaaacccttaaagaatgggggtaagaccccttgaggcaggtagaactaattcatgcagcatctatccgcaacgcacagccatgagtgatagggaaaagcaaatcgataacctccaaacatgtaaacaattaagtgggttagaatatttttcctacgctatcctataggatgttcttttcagattgcaggcatctggggttccggcgatggtaagtgtgttcttcccacgtgtctacaaagtcatctccagaggcatggaggggctccagcctgccctcctctgatctgagtggttgaggctcttcccatgatgctgggccaaacccacacattcttgaagacataaatacaaagagcacagttttctcagtcacaattgtgcttttaagtgaatcagaggagaagaaaaatgacagatatacttgatttataatcaagttatttttggaggctgctacgggctaagaaaggatgtatatttttctaaattgctcaaaagaaacaccaaaggagggcttatatgctaaacaaggcacgtttcacttttccaaaaagccctttctcgctgtgttaatccttatcctaaactgccctaataaccatcatcacaaaatattttaatcttgtatattcaaaagccattcaaattaaatagagtagacatcaactcaattcccattaccaactttaaaacttagtaatgaaaacttcagcatactttgaagtgcctgagaccaaattttcttttagataaatgtacaggattctttccaaaattaaaaattttacccaatcacaaaatcttctccatcaatcaaaagctacctattgagcgtcttccatcttctgagcactgaggcaactaccttggtgctttttgaaagacaactaggcataggacagcctgtccttcaagcaatagaacgcagggtgtccaggagtttaggctctgtgccagagaagtttggctttgaatcctagctttgcctcttctcttccagtataacttctctcatcctgtaaagtggagataacaatagatggtcattgttagagtggaaggccacattcattaaagcatctggtgttatgcctggcacaaagtgagcactccacaaagcttggctcttttgttatgaggaacaaattgctaaggaaacaaaatataagaatatctgattatcaaagtgacaaaacctgtgtggaaagtaccaaatgaacagaataaacagaacgtgttgagagcagattcatttcaaggtacagtgggccagaaaggcactaccacctgttctcaacttttacttacagattgcaatcacgtggacagctcttgaaaattcagatctccaggtcttgtcccagctcaatttattgaaatcttccagggaggtgctgagcatgggtaatttttaaaagctgcccaggtgattccagtgtacaaccagggtcaagactggctggagtacagtggaagaggtagccttactgctggcacactaaacatagggtttttcttccccaaaagaaaaagtaagacaattatgttctactgatcagtactcactaccatgttctctgggtgctcagtatattaaaaaaaaaaaaaagaaaagaaaagaaaaacaaaagactaaatcctaagcttggatcttggctgtgtggccatgctgtttggtggtaccactcaaatcaaagtgactagtaggcttgcctcctccacctaaaataaaaacaataatccttaaaggcattttaaattccaagataaagtaattaaatgtcccaagaaaagaaatctcaccagctaagagtacatcatatgcacacacatgcggtatatggtagcagtggtcacagttatctcttaattgcagctaaactctgtttccagagtctaatctattcacaaacatacacacacgaattatgccttcatgtatggttgctacaccttcccaatctctctctatgtatacgtatgtatatgtatatatgtattgtggtatatagaggagtacatatatacatgttagtttgtgtgcaaaatatacagtgtgtttgatgtagactgtacccctaaagcacacatctttgtctttgaataacgaaaagctctgggtaagtatttagtagccgaagtataactccttattctccttattgtctttggaaaaggtttataagactttagatgcccatgaacattgtgagttagctcaagtacaaaaatagcattcacctgtatgagcaagcataaaataaatatttttaaagcctggcctttcccaacccggtcacacagattctgttcatttaattggaattacacttttgctttctggttgttactgcccttgctagaatcattttgttcttcttggagagtcaggtttgattataaggttttgaaaagaattcccttgaatgtacaaaaatagctctggtcctcacttactctacagtccccaaatttaaattctcttggttcactagatccctaaactgttctaccagactccaatagcaatgattcatgccacagtagtcatcgttctttgcagggctattaatatctaaatgattattaatgcaaggatggtaaatatttgctcaataatatattaaattacaatgagggatgaagttctctatagatcgtagaagtggcacttcttatgacctctggtttgcaacttttaagctaaaaagctggtaagaggccaggtgtggtggctcatgcctgtaatcccagcactttgggaggccgaggcaggtggaccagctgaggccaggagtttgagaccagcctggccaacatgatgcaaccccgtctctactgaaaatacaaaaacaaacaaacaacaaaaaaaaattagccaggtatggtggcaggcgcctgtaattccagctagtcaggaggctgaggcaggggctgcagtgagccaagatcgcaccattgcactccagcctgggtaacaagagcaaaactccgtccaaaaaaaaaaaaaaaaaaaaaaattgctggtaagagccaggtatgaggttgggttaataaacttttaattgcaaacatttgagcttggtttttttgttttgttttgttttgttttttcctgtcattctagggcaaattatatctggggaggcaactcagtcttcccaataacttttcttggactcatcctgaagatgtaaagttagttgaataactaaagaataagtactagccaacatttagtgtacctttgtgaatttttcaaatgtctggaatcaggattgatgagagtcagccttccacacaggggtggagatggaacttcatccagcaagttccagggtttagatggtctctgcctaaaaggctggtgtctgggaaagttctgggggtggcatggagggtttctctatctactggacttagctaggtagtcagtggagtaagccctaaaccccagggctctcatctgcaggtggtgaaactacaataaaacctcatcggttcagacccaaatattggaatctgtgaaaattcaattgcagatgtgactctttctcttatgtaatatatttaacttgatctcaactttctcaggaaattctaaagactcttcttacaagttagaggaatccaatacccttttttccatcctaggatctatgaaattaaatctactgtttctttgacttcaatttataagtcatcttatctataattattacatgcttaaaaaacgtttacacttatgttgcattaataactaatgtaaacttaatgaatactttttactttagtgtccaattataggctacattcaaaaacagtaaaaggatacctctttttagaaagtccaataagttaggcttttttttgctgacaggccagcatctcccctctcccattaatctgaatcagtgaggttttactgtaaattaaaatggaaacagcaggtgtctatttccagccaagccaaccttgcagaatggtccatgacttgatttttttcatttaatttgcaaaccagccacatgttgataaaggagaagtaagtaaagtgaaatctcgtgaaagaagagaggtggacccctattctgcctcctagtggctgttagaatatccctctaataactaatagatcacagaagagcttggccattgaacaaaccctttcatttatggaatttttccataatcatctttcatattttcaaatgccttcccatctttttttggtgaatgctccggaaagtgtttccaatgtaaatactttgcggcattgaatggggatgtgggggaccagaagaggctggcaatttgtttttgtttttctgctctctttgaaatcggcaaaacagggcctgttgacactgccactcattctgcatgctccctgccagaaatgattagtcaacatgcatgcatgcctttgaattgaattcacatctggcccagtctgatgtgaatgtcaccccctgagaccctgcacaatgatttccaagggcccatgtgcatgaaaatgagttacttcactgatattttttggttttcaatgtacatatgtgtccaacccccagaaaaataactcctgatcttactcagtgttttctagcctaagcctgatctttcctccagactggatacaaaaccaaagcctccttgcttaaaaagattacaactcaaaagttttgtgacaattgcaacaatggttttctttgacttagtatgaaataggagtaacatttccaatgtgtagggaaacatgagttcttgagtttttgtatgagaccatagacaagccccagatatgtagatataagtgaacaataattacaaattttcaagttagaccagcagaaaacccataaacacagtgaagaaactcccagattttaataccttagagcaagaactagccaacaacaatgacaaagagcatgactcaaaatgtactgagttattgtaaattgaacagaagttccacgtctgtcatttctactgcagcatcctctgacccataggtcagaataaaggctctctatggcaggcctggaataacgcaaagcactgccttaaacacttaacaccccaattgtatcaaaaattctgttctctttacaataaaattaccaaaccctgctggatgcaccattaattttgaacagtgagggctggaattcacgtcttatgtccgagaaagaagctcatcacttctttgtctattgtttttctgccaaattttaaaggcctttgcgtggtggtcagatttaatggtggagcatgcggagacgttcctgtcactctttgcagtagacatggatgcagccttagaggtgcaacctccagacacatgggacagttttccactatttcagctgctgaatgattttctccgtactgactgtatgtattacctttgactgtttgactttcctaagtagtgtgcagataaacagatcactaagatgtctttatcccaagcagactacaggcttgacatagctcttcatggttttattatgattaaccccaccccccaaaaagaaacatacagctgaagggtattccctttcttccaaaaagtatcctgttctagggacgctctctcttaactagacagaataacctgagagtaatgtgagaagaggtatccattttttgtgtgtttgattgtctctcaaattaattaacctcttcatattttgcaatttttatcaaaagatgctttctagatgaaaaaaaaatttccagctgactaacatgtcaagcatttcagagtatgttatagtgacaacagccataaaatagaccttcctccccagggagggtgatgaaggagggcagagtatgaagaatgttctttcttcctaggaacttaatgggaagaagggaagtgggtgcaagaaaaacagaaaaaaaaatagtgtggattgttgtttctgttgtttcttaaagtagcatgatcgtttttccttttagaagatcaataccaaggggtaaagtgtttttgaattccatttcaatgctttttatgtacttttttccttctcttctctttttggcttccttagaagcagtatatttaatgtagaagacaatcaatcatctgtgtgtgtgtgtgtgtgtgtgtgtgtttgtgtgtgtgtgtgtgtgtgttgtacgttgataaagtagctgtgggttcttaacaagcttttgcttatctgttctagataatttgtgcaatggaaaatttcacaaacacctgcaagacctgtttgccccacttgttgttagatatgtggatctgatggagtcctcaattgcacaatccattcacaggggctttgagcgggagtcatgggaaccagtcaagtaaggaaaccttttttgataccatcggagtttgggtacaaatggctggagagtaatacagaaatggattaatgatgtcatatgggtttcactgttattgtggacagagagaaacaccatacatttcttctactatgatgctcatagcttctttgcccaaatggcaggagggtcggggatggaggaggtgggtagggtaggggaagaggctgaaaaaacgtttcatgaaatgaaatctcttattgcacaagataaataaggaagaaggaatataaactcggctgtgatatttgtgtggtatgtcttactccaatggtgttatctctaggattcagtgtttcccaaagtgtgttcggtggggttctaggcagggaggtcagcaaactttttctataaaaggccatatactatatacttaggcttttggagccacataatctctgtcacaactcaactctgtcattgtagcatgaaagcagtcatagacagtatgtaaatgaacgagtgtagctgtgttccaatgaaactttgttaacaaaacaggtccatagtttgccattgcctggtctaggccttttagatgcacctttttaaaaaaaacctttatggccaagtatgtttaggaaacaatacctaccccactgacctagaattttgtgtaactctgtttaacccggattttcctaaatgtatttgacaaccgtgtgctttttttaaaatgggacatataccctgcaggataaattatgggaaatcttgtgggttgcaagtttgtcaatttccacaaatgtttggcaaattttaggtcttatttgaaaatgtttggcaggcttggtgccatctccattccccaaatgggaagagggcttgacttgaggctccagagggtcagtctcagactcccctttctgaaaaaatagagactcctatatggagagtttgatggttatggtttgatggtttgaaaagctccagtaaagcctactgctggatttgccttgttagtttctttctttctttctttctttctttttttaaggaaatcatttcgttcatgctagtattttacatctttgggatgcagcaaacagtatggagcaaagtagagggatgttacaagcacattttaggaactccagaacaaatattcatgaggcctttcctcagtttggaagccttgacttgcagcctatttttaagcagttttctgaactgagaccctcctctaatgttatactgtataaggctctcactgataaattaatgcaaaataggcttttctgccccccttccacatctgagccacaagaggagtttccctattgcagggaggttaataaccagtagctcctcctttgcaaataccaagaaatttaaattttagtttgttattctccagtttataacagtctcttaatatggccctactgacttttcactcatgagggtagaactggatcccttgatggtaaattattgagagcctctattttttttcaatgttcaatacaatgaagacagttgtgctggagaatagctattaagaggaaaaggttaaaatgagtaatatttacgttttaaaataacaatggtcttgaaataacatttacttacttgcacttaaatacggagactactactaccaacacacatggaagagaataattggtatccttcactattccttgaagagccctagatttagtgcccatttactagccagaagtcaagggttcaaacctctatgaacttgtttgctcccctgcaaaactgaagttttaaaaatgtgcctgtccagtgtctgagaattgtcatggaacttcgtgataatgtcactaagtcattttataatctgttaaatttcttaaaagtcaaacacggccgggtgcggcggctcacgccagtaatcccagcactttgggaggccgaggcgggtggatcacaaggtcaggggatcgagaacatcctggctaacacggtgaaaccccgtctctactaaaaatacaaaaaattagctgggcgtggtggtgggcacctgtagtcccagctactcgggaggctgaggcaggagaatggtgtgaacccaggaggtggagcttgcagtgagccgagatcgctccactgcactccagcctgggtgacagaccgagatgccgtctcaaaaaaaaaaataataaaagtttaacacatgactgctacttctttgggggcattaaatattcttaataccatcagaaataaagatagactcaaaaatcatcttcatacctggaaatcttagtctagggatgttttcttgggaatatttttaccaattaaaaaaaaatttgaactcttgcatgggcaatttaaaggtctgcaaattgtgaataaaggaataatagttgcgaataataacctgagaattatgcagatacgtgtgtgttttttagtagctttttgctatctaaaattatgctgttagtgaatatgattgtggtttgttcaattcatactaaatagtatatgcctttcagagtctgtggagatctttaaaagtgccaactaagggctgggtgtggttgttcacacttgtaatcccaacactttggggggccaaggcgagaggatcacctgaggccaggagttcaagaccagtctgggcaacataaccagactccatctctacaaaataaaaaaagtagccaggcatggtggcacagcatgtagtccaaactactcaggaggctgaggtgggaggattgcttgagcccaggagttcaaggttacagtgagccatgatcctgccactgtactccagcctggggtgacagagtgagtccctattaaaaaataataataataaataaataaataaataaataaataataaaaacagtgctaactaaaatacaagctaccacacacactgtatcagccgatttttaaacagagtgtggatgccacggggcagctttgcagaatggaataaaatggagtgtaaaaaagagcttggagacatgttatgtgctaagaggagtgactctctccatgtttcctacaacgtgaatagaaataaagtgtgaacttccatctgactacttattggtgggttgatgaagaagcagattcatttctcttcttagattttttttccaagtgaagaatgatctttttggcatacttctcatcaagctcaccccaaaacaagaaactaacttaggtaaatagatttagtttgctcagtcttttccatttttgccacagaatcttccaatacatacatacacacacacagcctttctttcaaacaattgttatcctcaagtagttctgttcttcttcttttcaaaatttataagcacctcgttataagtaaaatgagaaatgcattgtaatgaaatgcaatgtaatgttcaaaataattagcatgcaaaatgctgaagaaaaatagcaatctgacaagaaaatgctaccaatgtattgagtttgctaaaaagagaatgaaaaatatcctttattcttcagattttcttatttcaaaatatggccctgtaaaagaaaatagatatcatcatttaggcttgatacaattaaggttatttaagatgaacaacaaaaacaacaacaacaaaaataattgaagttatttgacggaaagggtaaaatggctgagtcctatggcagcctttccctagaaagacagtcttccatctcttcgaaaagagaaaagggaagctacatctctgtttccgttaagccagacacagtcatggttagaatctctatgaattggtggacaatgtcatctctttgcttctaaccatagctaaagatagtcagcttctcaaagacagtcccaagttgtcaataaaatctggagcccatggccctctcatgggtttccatcaggacatgtagtagggtcaccactcacagttgggcaggttgcccacaatccttctggcagctgtgaatatgaggttttggtcctaacaagaaatggacaacatttccatcagctcttcagtgttagctcattggtaataagccatggtggccttcaatatgaaagaaaacctagaaaacaactcattcaaagtcttaccaagtctagtagctccaccacccttgcctactaccttttccctgacagatggtcactcaatctttacttaaacacctccaggcatggggaatccttggctgcatggttgcccacttcaagttaggactgttctgaggcaagagccagaacttaactctggaggtggggttcagaaaccagaccaaattgggaactagctaaaacaaggatggggcaaaagtggctttccataagacattcccaccagtgtgccctgtcagtttaccattgccatggagttaccactcatttccatgtcaatgacctgatgacccagatgttactaccctttgcctagaaatatcttgcataaacctctccttaatctacatgtaattaaaagcatgtataaatatgactgcaaaactgccctgagctgcttgctactccaagcacactgcctgtgggaaagccctgctctgcaggagcagtcacagcactgtaacaccaccagagattttacactaccacttcaataaagcatttttcttccactttaccatcggctcacccttgaattctttcctgggtgaagccaagaaccctcatgggctaagccctactttggggctctcttgccctgcatcagctctgaatggtagaactaaacactgcttcttaatatatgcacactgtaaaatctgggattctcatttctcaaaatgcactttctcactctgcctcagatatgcatataaaaagtattttttaatgtcactttccaaatagtcatagatatcaatatcttttttttttttttttttttttgagacggagtcttgctctgtcgcccaggctggagtgcagtggtgctgtcttggctcactgcaagctccgcctcctgggttcaagcgattctcctgcctcagcctcccaagtagctgggactacaggtgcctgccaccacgcccagctaattttttgtgtttttagtggggcagggtttcaccgtgttagccaggatggtctcgatctcctgacctcgtgatccaccagccttggcctcccaaagtgctgggatcacaggcgtgagccactgcacctggccatcaatatcttttttgaaaataggttttattgtatatatttaagatataaaacataatgccataagatacatgtgaagtaaaattgttactatggtggaacatattagcatatcaaccatcagaccaaagacaccttagcaatatgcaggtggcctggtgtcaaatagacaagtaatgtacttggtgtcagatctcatgattctgccaataatttgctgggtgaccttgggccaccaagtgtcctgagttgagatcctccctcagttcacctccctgaggctcagtatcctaccttgtcaaacaaggactttgaataaccaaagcttttccaatgctaacattcttgaagatatcactgtccatattcagacacatatacacatttgatcatcgctgcctccctaacacctataacagggcctggaacataacaggtgctcaataaatgtttgttgattaattgccatatttgttaaagaacccacacaggctgaaaatgataaggatgtaatgggaaaactatggggatgtttccccagatgagggtttcaatctaattgggtctgagcaacatacacacaagaaaaatgactttatgaaatgtcaaaattatcatgaaaaaggaaaaacgactctatttgccaatgtaaaatctgtaatttacaaataacataaggaaaagttatgaggacataagaatagagggaaatcaatttccactaaggggtcatgaaaaacgtagcttgagagcaggatttcaaaaggggtagggatgctgggaaagatgatgtacaaaggtagaaatacaagggagggagagcatgcaaacgctgagttttcgccagcatggattataacaaaggcaagccataaagttggagagatgtttgggaggttctaaagtcccacaaagtttggaattttttttttttctgtagatgatacattctcaatgggggctttacagctcataagttgagaaaattgactcaggtgggagggtggcgcttaaaaacgtcttactctttttatatatatagcacagatctacatataatacataaacagatattctatatatctgttgtattaaattttcatggagaaggaagttgtggggcagggtgataatgagtaaaagattgtaaaatactgctctagattctaggaagatattagagaatgcccctgccccaaagtagggattagacctaagaacaaacactgacagaggcttcagtgctcaaagcactaagaaaagacaagatgtgctacatatatgcatgcaacaactgattcataaaagtagaaggcattttgtatcttaaatacaaccccatccataaatctaaagccaaaatctttgagaaaggtacaactatatcccttctgcatggagtcagtgtcttgattagagtcaattctagaagcaggaatgacttcacctccactcatttctatccatagaaatgatgagacgtgcacacatctgtgacattcatccatgtaagagtgagtagatgagaatgtttctaaaccatccacggatgggcactttggcctaaatggaagctattctttttcaagagtccccaaaatgaatgaaagagtgtaaattttaatgcatataagttgttaggattgcaattcatacttcttgtactatccagagatatccaattatgattctctcagagatgcataactaacttgttttaaggtagctgctaaaaaggccctcttcaaagtaataattcattatagtcatcagcagttccaggagcctgattggaactaagtgctacttaaaaattcccccttttcacatgtatattagtaaaatattatgcttagaattacctccttgattctttatgttattaatatccaaatgaaatattagtaacactagtaatacactacattatttttctaaaagcagaaatatcaagcatgtttcatccttttaaaagtagagcattataaaatttgaaagcagagcattaaaaaaagagaaggaaatgtttctatgagtccagtgcagtagtctagctgaaatgtcatattttacaaatacaatatgttttgattaatagaagtattttttttatttttgtgtgcaaaatgaagcttgcttctaatttgtgtacccgccacccgctaatatgtttaaattaaattgcttttgcatacatttgtatgttatgcactcctagctacttttaatttgctcagaattgacattttaactttccgggctgccatctctaagatcttctaattccttgatcattattcagtgtgtgtatcatttaatgatcacatttgcttatataggcttacacatgtctcagtggaaatcgccaacggttttgttacatggcagtgtttaagactaagagccaccagggactgaattcaaaggcaaattccccatttaaacagagacacataaaaggaaaagttccattttcccttctgtttaatagtcatatagttaatcttttcttgaccattcccacaagagcaccctttagttccaagtagagatgtataattggctttcccaaaatgtgaggtgtaaaggacaaatttatgagacacctgtttcccttacagaagagaatgccaggtagacaattttgcattctaggtttttcagtctatgagctggggctatattgccattgtgaaagaataatctgtttctagagggagacaggtatccaggtgatcttcaaggtccagaatttctgacttagcagaaggcatgtacccacctccacccccccaccccctaacttcccccttccctaactcccccactcccccactcccctactcccctactcccccacttccccacccaagcaagcccagaggcagctccagctcttgcaggagtcctgttagtcaaacacagcttgcccagggcagagctgctttggcaaaacttgctcttctcctgcaagatccaaaaagagaacctcaagtcctttgccaaagtgctgtcaacttcacttaaacaggaaggctcctctcagatgcagagttaggctgggctctaccgtgccagtgactttggctggatggaacacccttaaaatgccactactgagacacacggtgccagcttgaggagccgtgtatgacaccgtccttccaaagaaatacagttgattcaagttgggggttttgttttgttttattttctccctctacttataaaaccatccatctctcttccatcacgtcagttgatccatctttgtccaaaaacaaaaggctggtatgaggtaacatttttaactttttagtcacttattttaactttttacagaaaaatacagagcttgattaattttcacaaattgaacacacacccatgtaagccatcacacagatcaaaaagtagaatctccccagaagtccctttcatgctttctcccagtgtctgtcccacttccaagggtaactattatgatatgaagccacattttaaatccacttttggtcaaagagtctaatacaagagctgaattggggattgttttcatttccttggtgtctgtttctgtgtgtaaacatttctgcatttttgttgaacttagtttgagagagaaagtttctattttctttaaatgttctataaaattattcaaatctgatctttcttcttgatacaatttcataatttcaccatcaactgacatgccattgcccatacacctgtctttagaagcagcagttagaaagagcttggtttctgtacatcaccattaggtgtgcctccaagtgggtgaacttcctactctatttggtgtctaacgtctgattgagaaatatgcctccatcaacagtaatttgttttaaaaataagaaaattgaagtgctccaccatttctatcaatcccagtgacttcacagcaaccccagccccagccacaccaagaattccaggaacttcaagttcttagcatgagaaaagttctagactcttatggcaatggatatggaaaccaaaggcccctcccaaaggcatgtgatcattgtgtatgggtgcacttttaagtcactgtgtggttaatttttccattaacttttgtcatttctctggatacagagccacaccacagcttcccatctgtaagctgctttctgaagtgtgtcgcttgagtttttgctgttgtcttgctgtggacttggtcaatttatttacaattgtcgtgtgcttctgccacatctgcattgtcactgtgatggtattttttctttctgtctgtttcttccacaggagtttaaccagtaacctacccaatgtgaacctacccaatgtgaaccttcccaaagtaccaaatctaccagttaacatccctctaggcatcccacaaatgcctactttttcggcaccgtcatggatggctgctatatatgatgcggagtgtgtattcagttcacattagatctcatttaaatttaagtgatcttggcatggatatgtattgtttatttctatacatcctatataacagagatggagatggataattagacatattttgctgatcatacagagacaatattgtttatttctggcatgcatcatgtttgtaagatgtttgctatatatacagcactaacaatttgtcttacgcccactgaatgctggaggactatgtttcacttcctgaattcttttgcaaaaggattctaccctttttggcaggtgacatgactttaggagctagacatccaaaaatagtggaggaaacctctttggtgggctggccagtcatctctggcctgatccaaatctaagaaggaagcacacctacctagaatctggggtgttttctttaaataaaaataaaaaattcctagagaatgtttaaaccataaagcatatttctggtgtcagcaaatggcaggatatagtaacagtatgttcagggctaaatgaaaatttctgaatggatcaagccttagtcacataaatgttatgtaaaaaaatatattatgtactttccaaggtcacagtacaatatggtgctttgagagctaggtaatgagaagttcaataattctcgaaacacaagattcaaacaataaataattaaatttgtggtagccatatcatctgaatatagggctatgctttatactcatccacatgaatgtcagagttgcatgggccacttcttgaaagccagcagtttgggggagtgagggttgagaagccatttcttctagcttcaaaaatgaatcttctctccttttttagttagcaagaagatcgagcacccctaaattctacctcagggaaattagaaccacgtgcatgatttaataagtgaaataaggtttagcgattctgtacccttctttgatccttttcttagaccacagctaattacggaccagataagctttttcttgaaagaataaattggcacgttttcaaagggaagtgttattatcaaaggaataaaaaatggtctgaaactggcagtgatgttttgaaatcttagaatcacattcatcaagacggccctcagcatttttattcttgcagtaatccaggtggaggacagaccattaaaatgactgctctagctggctcctccaaagctgcctgatatttctacaacctacaattgctcacaagttcacactaaaatcatatggtcaatgtgtctgattctcttttaaaggcaaattacaacctccaaaaatttatatctgaaaaaaagcttctaaaaaagaacacaaatcatattcatgctaagatgactatatgaaaaaattagattaggtagtatctgtgaaaaatttaaaaatatcagaaagcttctcttatcttcctctgtgcatgctctgtgacactgtttttgaaaagatatgaatcaagacattgtaataaagcagataatggtctccgttcaattaattaaggcatgagtgggaacacattttggtaactgctcagcaatcaaaataatcttggtgctattgccttaacattaacagtttatcttaaaaataaaaagaaaatattcttttcctcatgtcaaaacttaataataagctcttcaaagaaaaaaaaaaccctacaagaattttttgaaactctgaaaccagatgggtgtcaaaatgttgttgtaataaataccaattattgcattcatatgtacttaatgatttaaaacatacaaccatgcagttccaaaacggggcttagactagacaaagttggggtttctttttcccaagcataggttggggcagggggaaggctgaactttcacggagaaacaacgcattcccccacttttgaacaatgctcacggcagtatctgaaaagaaggcgtggattctcaatcacccaccaggaaatgcctgattctatatcttttcataattccagtttcttcctttgccacctttcattttaagggcgtgtttatatgttacctgctccatcgtgtcagatacgtctacgtactgacctcagactggtctgtccttgaaaacattaccctgttggtccaggccgtaggctccctctcagcatgcttgggcgtgtgccccctccccgccctgcagtagctgtgtatgcatttatgcactagctatatttctctctgaagcattaattcaatgcagctggcatctgtcacaatagaaacacccactctcatctgtttctatagacgatgtcagaacaagtggtaatgcatggtgtgttggacattttataaattactgtgttagcattagtggtatgcgaggaagtgggtgggggggaggacacccctcagagctccaaatgggattgttacaaaaaagacagccagccagaaaagggcaggaggatgagagatggagcatttttcatacacaggctttttgtagatgccccaggtaaaagtttcttagacgtcatcgtatagaaaggcatcaaaaccaatttccccaactgcacacaggactgggtaagatggtgcaatggtaaaagagctcaggttttgagccctaaagcattgacaatatcccttgtccactaacttccactgtctcgactcacctcatcctggtgaggaccctgcctatgcaatgggctggtctatgaaaattggaacagtaaccaaactgaactagaattttggaatcaaggtatccaggtgtacccctcttgatctgagtcaccctaatttctttccagctcttcaagagagaaagcaggtcctcgctcaccactttgttagcactgtcctttgaaaacgaaaagtcttgtgcaatctccaagaggtctccactctggaggggagctggggaaatgcatgaaaccctgaagtttaataactgcatgttgccatgtagttattatctgttgagactatttctccccctggttcgtggccttcatctgaatcatcacatgtgttaatgtggttattaaaagaaggctgatttttaccatacaccattctcctggttgttatggggcaacaccttccccagacttctcactggtctggggtaattggctgagcaaagcacactaagtcatgtatggtaaaactcaaaatctgccggtggagactcgcccccgcctccaccgccaacacacgttgttttgtatgttgaagctgctgtttgccttctagcccccagttgtctctgtgttagtttttgtagagcctgaggccagtgggtgactctcattttctaatttttgtcctgccagtaatgggtcaggcacctcagaagatctgttttggaaacttgacgcccttcagaccttcattcgggacctgcactggcctgaagaagagtttggaaagcacctggaacaacggctgaagttgatggcaagtgacatgatcgaatcttgtgtcaaaaggtaagtataggtggctggacaggttctgcacaccctccccaccatacacagactcagggaagggtagatggctgctctttcaattggctgtagtttgaaactaattggagaaggggattgcttgtcaaagtcagctggagtagtggctgtcaacgtctaacttccattcacctgccctccatctgtcccaaacccaaaataatctggctgccaattttttcatggttgttggctttaagaggaaaagatccctgtccattcttttttgtatccctgatatctagcagtgtctggcacaaaatacttaactagtaagtatttgttaaatgtatgaatgtgtgcctgagtggacaattagaagggaaaaaaagaagaatatgcaattctggagctggcgtatccagtatggctagcagaaatctaatggttttctaacaatgtggatagggccttagcatcatcattcactccgtatataaaagatgagcatatatgtgggccaacttgtagttgtcttgttgaaaatctagctggatttcaacagcggggcatgagacatggaacattacattttgcctgcacatagattccctgttttgtcactgtggcttttaggactaggttaggaatgctgtacttgaagttcccaggcagactgttctgagaaggtgagggaaaaaaatgaggacaacattcatccattcagcaaacatcatttgagctcctcccatatgccaggcacagggctaagttcttggcatacaatgaagaatgagagtagtagaatccctttcctcatggagtgtctccatatcaaatatagaaataaaattccactgaggggacatcatcatcatcactctgtctacccccagatacacatccaagttccttttctagttcataactgttgcattatttttcctcattcaaaaaaaaaaaaaaacccagattgcaagcagcacaggctactccaaatctccagatgttgtgtagcttggttgatggatcaattgtgggtgatgggggccgggtttgtctggaagttctttgaatttattatttcatatcttggaagaggaaaggtgaagtaatatcatcagaactggaaagcaaagaagcaaaagaacaatgcaatctcaggtaggtgaacagcatctcagcaggaattgagaaaggaactatgcactatggagaatctgggcaggtgtttgaggccacttccagaagcttaaagttgtagtgatccagattttttagtattgctcttttattctctctcttagaactgaaggcaggcctacttctcaaactcaagatcaaaatatttccttagggtcttgaattccacgatctcctagatagtctatatcaattttaggaaaagcaatgcttttccaatggccaaaccattccataaaaaaactttttgcgtgatctgtcctaggggtgaaatgcattacagtaaaggcttaccagttcctaaactgtgcacataattgtacagaaagacatgcatgtccttcatggagaggccagtctgggtagggagcaagaaatgggaagatgctcagagaaaatggacagatatgaggatgtcacaggtggatagggactcttatcccttaccatgctgtaatcatgtcttcacggttcagacacctaaagagggtgagctgcacagagccagggagtggatctttttcatttggcgttccttaccctccccaggtctcagcaccatgcttggcacacagtagctgttaagcaaccttttactgacagaagttgctccactgcacatgtatggctggcctggacacttaaatttcctgatgtcccttttaaatcagcccaaaagcagacaagagcaaaaatgggtggaaatacccccggacctacagattcagaggacagagcatggacgagtttttgaatgttttaatacatagaatctacattagaagagcctagaaccgttgttctccttggtagaacagattctgtgtcccttgttctaagccaacatagcaaggacattgtttcataggtataaatatgccatgacaaaaagtcaataaggcactcctcatgtttcagtgctccagaaatttaattcatcaatttgacagacatttacagagcctctagtctagtctatatcaggttacttgtgctgaacacaaaacaaggcatgctgtcttttgccctcaaggagtcagttgagttaaatgacctctccttttctggcgttttggtcctacagagccctctcagtcatattaattttgcattcagcttcctcttttcacagccctgcactccaagggctatgaacagttctcctgtgaaaactgaagacgattacttcattggaagggagcaatttagcatttccatttctcaaattgggccggaactggcacacaagcctcagaagatcagcacagggacctgtccaactcagtcctcatcaggcctccttttcacaaaaccggcaaatgatgtattttcagcgtagcttaaaatgatcatcatgattagaaagctacttgagtgcactgaatcttcagaagccaagatacatttatctttaacatgatcatataatatataggggtgttttaagggtttgggatttttaggtgtttttttttttttttttttttttttttttcttaagaactgggctcccaaccttagaaattatacttggcttctctgcatgcactcagggtgtgttagcaagctggcatcctttcctgagctaactagctgtgtggtcctcctatgcactgttagaaaactgctacaaattcctcttaaagtaatgctttcctggtggctgtatgatctccagaacttgacagtgaacaatgccaaaaagatgcatcaggcaaatggggccttaataaagccacttactaaccaggtgcttttctttaaagacatttgatgatatcacccacttccctgaaaccttttaaaatataactaggccccttttacaatgctgatgtcaaggataagatctcccacctgtattaccagctggccatgtcaggctaggctttttctatgagttgttagcacattgctgagatcctaatttgaccaatgtcagaattatgttactttcagattccaccatcacacaattcttgaatttgtatatgtatattaagcgtacatataaaatagttgtatattatgacattttaaatcataaaataatgtattttattgcaaaataatacattgacattgaaaacaaaacatagtggaagtcccccaataccacacctcctaatttccctcccctcctcaaaggtagccatctttaacagcttgatgtattacctttttatgtcctttaacaagcaaaataaattttgtagtctttaaagcaatgtaatacacttgctggattttaaatttttgtctctttcaaaaccagaaaggggaaaataaaaacccacagcaataaacatcatttaagatttttttccccaccacgaggttttgaagattaaaaactgctttggtttttgtttgttttgttttattaatgaagtaattcaaggtaggcagttgccaatgtgagagaacttacatatgctatactgctataatcgagtttttgtgaattcattcattctcctgcaattaaggttctccatagcatgtaaactatagagagaaatacgccaagctacaagtgttccgggtactgccggaaaggaagggtgtgcatgtctgtctccgtgaataggccttccttagttgggaaagtcatttaaaagggaacacatgtgaagtcattgttgactgaaactgattacagccttcaattttctttttcactgacctctcagaaaatatctcctccacctgctgccatctgaacgctgaattggtcttttcctactttgttttaatagaaccaggattgcatttgaagttaagctgcaaaaaaccagtcgatcaacagattttcgagtcccacagtcaatatgcaccatgtttaatgttatggttgatgccaaagctcaatcaacaaaactttgcagcatggaaatgggccaagaggtaaaaaaaaaaaaaaaaatacagatttttttttccctcttcattgatcatgtagaagaaaacttcacaaattccttccatctaccctagtctgctagtttcagaaatacactctaacatttgtggattaagccatggatgagtgttcagtatctgtttgtcaagtagatttctaaggcatgtgctgatgagaatgtcagtcacttggaagtgattcttggctggagttggggtggccatatagttctctaagctaaatgaagtttgacgaccttatttattaggctggtgtctcgaacagatctgtgtttgccagaatgaaagtcattttcacatttgaagtgcattttatcactttgaacatctggacagcaagagaggcctttcttgcatcaaacaacttccaggatgtataatgttagatcaccctgctacccaatccccagccagcaggttctgaatttccaaaaaaaaaaaagaaaaaaaaaattgcagactttcaattttccttagactgaattgatcatgaatctttcctgaccaaaagtttagtcctttgctaagtttgcaattccaaagcagtatttaaaatgtaaaggagaaggaaacagcaacttgggcttgattaaagactatcatgatcatttttctctgatggccttaagccagctagatattcatataccaatttagaattaattcagaagcatttctggcaactctatgttgttgccaattggcataaattgctcctaaatcagatctttcgataccagccttacatgttcagaatttttactaaattatatttgctccttattcgttatttattttctctttcagcaccttccatttttaaatgtgggttggtggtattctcttcctggcaagatcatcttcaaccttgtttcccctacaagtcagcttcctcagcccccacccccaccctggttaactctgttcctgactaattttcttgtcgaggaccttttcctggggattaagttctaagcactggagtcaaattcagggtgcccttggttctctgtcccagcatcgtgtgctcatatgaatgatctggggcagtggttctcatgtttcagtgtacgttaaactcacccagagagcatctgaacacccagatcattgagtctcacccaagaatttcagataggtctgcggtgtggtctaagaattggcatttctgacaagttccgtggcgatgctaatgctgctggctgttccagagaccacactatgagaaccactgatctggatactcagtatgtaaacctgacttcaggggaaggactcaggtaggaaggatagccccccttggggaagacctgggttcggtgttcagaaacctagattcttcccctggctgagctgaaagctggagtttgacaaatcactcagcttctttgggcctcagtttcctcatctgtaaaatggtagcactattctagttttattcagggtgtttttagtggcacaatctgtttttcaaagcaaatcaagaaggccagcatgtgacacaaataaaagtacagctgctctggatggagaggggaggagggggcctagagtccaagctgccaggtggccctctgctctgcacctcttcactgcccaccacccacctaagctgctctggaatatttaaacaatctcttaggcttcatcaagcccactttaaaggccctgtttttggtgatctcaaaagttcattgagatccctttgagttcatattttccagaatcctgttcctccttaatttttctccccttggagctactgtttttaaaattgagatataattcacatacccataaaattcaccagtttaacatgtacaattttgtagttttagtgtattcacaaagttatgcagtcatcaccacggtcaattttaggacatttttatcacctgaaaaactgagtacccattaattctcacacccctcccttcttcacagccctaggtaatcaccaaaatactttctatctctaaggatttaactattctgaacatttcatataaacaaaatcatacaatatgtggccgtttgtgtctggcttctttcactcagcacagtgttttcaagatttatccatgctgtagcatgtattgttcgctcctttttatgtatttattgaccattgtatattttctttaaagaaatgcctattcaaaatcttttgcccatttaaaaaattgggttatttgtctttttattattgagttgtaagagttctttatatgttctggatacttgaccattatcatatatacgatttgcaactattttctcccattctgtgggttttctttttcatcttctcgatgggatcctttaaaacataacaggtttcttttaaattaaatgcagtgcagttgacctatttccccttaaatcttcttgagatgtacattttaactgagttttctaaggatggtgctaggccagggtgcagaagggttgatacaacaggactggtcttgccttctcctcagcagcttttgcagtccctccccagcttgattcaatgacggccatgtttcaaaagctcccacatacctggtcagatggttaaacaattcttccaaacaagccaagtcactttgatctgggctgttttgcttttgagctgggggtttagggagagtagtgggagcgtgggagttgctgtcacaaacttcactgagaatataaaaaaaggtatggagccatttctcaggggaaaaaaatactttcatatattattactctacaatttcagacgacctggggaccttcttgaccaaaccatagaccccagttggagacagaggatgagaaagaccaagttgacttttatcacaatggcggacccttcttttctctttaccactaattgcttctgggccaaggtagaatgaccttagcttgacctgggagtctggttttatagaagaataagttgccttttggtttaatcatgacatcgtatggactccataccttagctgccaaacgatgtgtcatcatttgctgaatgaagaacatagcatgcaacacacaacctttgggaagtatgtggtttgttaaaattgggtattaaataaagtcccctaattctggatataaaatcagaaagttgtcttggacttgcagtaacatttttgacatgaaacagcagtgtctatttctttctagacattgttctatttgataaagtagaaaagactacccatactctccccatgtgactcaacataatttttttaatgaaaacaaataaccgaggcttgtaaacatttcttgtttctcccaaaatagcgcgcacacacacacacacatctagactgaatatctttattaagggcccatccaataatgcatcctagtctatgattcttattgtaagactgttggtttttttcccaagccatcttagagagatctttcgtgacatttttccttagtataattgaatctgagacacttaaatgaccagctgtgggaaatgaggcttctttgaatgccaagtggctgagaacaggtgagaataaagctagcttgacttaattgtctgtaaatatgtacttcttctaagtggtctagcacagtggctgtaaccttaatcagaacttcaatggaaagtcatatggaaatgtttcctccttgatttttctcactttgtagaatgggaatattcatctccaaagtaaagctgagttgctaaaatgagatttaacaagaatatctggaaacatcctggaactgggataagaatagatgaaagtccaatgtttttatgtagtttgtatttctgagtatgggatatgaagcccatattatagacctagctactaataccagcctccacctgggtcccaactccctcaacctgctttagattagatactggccaggtgatgaaatctccatttttaagatcgcatcctggatttcatcattgggtaatatcacatgtaaaggcagctgctgaaacatttgttaagcatagttttccatcttaagtatttatttttttcattaaaatttgtgaagtaccaatagaagggaaattgcgtattaaatagtttctcacttggtctagtgtgttttcatctcatttccaaggtcagatggtcttaacagaaagacaacatacacacaatctgttctatgacaaggcaaaacgtgtagcacaggaagtcaagtggaatgattttcacacagtaattgtgaatttgcacctcagcccatcagaagcaaaagtgaactgaccaaactttccaggccattgaatattagtagttccctcaggatataattttggagtatagggcaagttaatccaagaaggccagtagaggccggacgtggtggctcacacctgtaatcccagcactttgggaggccaaggtgggcggatcacgaggtcaagagatcgggaccaccttggccaacgtggtgaaaccctgtttctactaaaaatacaaaaaaatgagctgggcgtggtggcgcacacctgtagtcctagctactcgggaggctgaggcaggagaatcacttgaacccggcaggtggacgttgcagtgagccgagtgctgctgcactccagcctggcgacagagcaagactccatctcaaaaaaaaaaggccagcagagaggactggaaaatgggaaaatggtaaagctccctctttgtaccgtatctggatagtcgatcagactgcaaggcattttataacaaaattgtctagtaggaatgtttgttaattaaaagttgccccactgatatatatataccccttcatggagcttcacatctgcacagaacaatatatctcccaagaaagatcaaggagtgaaagcagagtactcactattactccagaaagcaagttaatccaataagtctcatatatcagggaaaactagcaaaagggattcacgtattctgtaattacttgaataggaataggggctgctttgatatttacctctttgctacatgataaacagagtaattattaccctgctctgctatcttccacaaagaagcttatatttaaattgaggcataatttacatacaacaaaatatagagattttaggtgagtttagagaaatgtatatacacatgcaaccactatgttaatctattaatcatagtagtagtagtaatactgccacatagcacctctcagtttctaaaccacgtttccatgcattgtttcattatttggttaagtgaatatgatgtctatattcacaagttataattctagccccactgcaaaaatgaggaaatagaccaacagagattgacatgataaagtttcccctggatgggagagacagaataatcatatcaaaatactttgttttataagcagaaaaaaagcaacgttcattataacagaagaggaatggagatgatcatatttgtatggagtgaaagggagagatagtgggactgcctggagaaaaattaaggcgaagtttggcatggaaaaattgaaatgggaagaggttcccataaatcatcatatttccataagccacgatgtctcaaccatgtctccttatgaaagggtttgaagtttctagctcctgaagagaaagcttgtttctcttgggagaaagaatgacatcattaactcctcagagtaagaccctaaatctttgttggtgtgtggagaacaattactctagtctctatttgccacttcagcccagtttttcaagagagtgttttgtttctcaatgatgttcttctttgcttggtatatttcatattattttgcacacagctagcttttctgatttagtttactcccataattaataaatgtgaatcatttatagcaatgcaaagaaaacctagacgagtgaggcagtcatatgaggaggaaaagtaagcatgtgattctggatcttatctcaagacctaaaaatgaatttggagccctgtcaattttcctgaattcttttgctctgacatctttctttgtgtttctagcaaagaattctgcagataaattttttgcatttagcttcaggtttatgccacttaggagtaaattcctttttgaatctagcagtatagccaacatgggttctgattcaacgggactacaacatacaagccattagctgtattatttttcctctaatcaattaaaatgaaactggaggagatgactaagtgataagactgtctctctctacccttatctaatacttgatgaacttgaacaactaacaatatttgagtcacgatgacagttgacaaaatattttcacatctagactctcacttgatctcccaaacagagacttatgagtctgaaggcatgactacaggaaaggactcgggcactggtttttaaaataataatactagcatagacccgctaaaaatctttatacagggttggctttgttcccgttccaaaatcagagtttcatactggtttctcccttctcattggtccaggatgatagtattattatctcttttgtttgttttttacagataaggaaactgagttaaattttcataggtaacatgacttcccaactttgcactgggactttatccaggtcttccaattacaaacaaacctcgcctatgattctaaatggatttacctaattcacatccctttcctcactctcaataattctgattgccagttatcagaatattaaaccacattactatggcttatttccatatgtttacatagacttttgaatattttatttaatttttattttctcatgtgtccttttgtcctaatttgtatttgcactgttcctttttttttctgttcctaattaatcatccttctgaaagtttgctaaaatgtgggtaagtgcattttccttttcaaataacaatgtcttgcattgttattttttgttagggaaatatgggataattcaaatggatactaaaatgatctaataaatgtcaaggagctggcatataatattttgtgttaaaatcacttttcctttttccctggcatttacagcagatttttatttgtgtgggggtttgtcttcacattactatttaaatgtaattgacaggcacagttagagaaatttaaaaacttagcagtggtctcagtgtaggctctcatactgggtctgtttatccatgtatggaggaaatgagtggcttgccacaagagttcagaaagagacactttgcctttatactgagtcaagacttggagacaaaatgaggagttctgaggtattaacccaaagaacctgagggtttcagaacagtttttgcaaaattagtcacagtgtcttcatcaaattccctttggaaagggaatctactacctaagccacaacccccagcagttttccaaagataatttttaatctcctgtgttaaattattacagtatcctgctttgtaagatccaaatcaacacactgctgggtcattaagtcattcatgtgtgctatttgtaaaagtgtttaagtgtctacacacattagaagcatcgaaagccttgagtaaggaacaatgaacttggtaatatttttaagagcttcagatctctctctatcaaagaactggagtcaggatcttataaatatttctgggactaaggaaataaacggggtccgcaggccaggctttatttataaattaagttgtctaaaaattactgacggatgcagtgccatcacctcccaaacatgctaatatttgtctttctgtgttcttagcatcaataccattcaaaaatagacgaactaattgaagaaactgttaaagaaatgataacactcttggttgcaaaggtaacctccagcttcaggtgaaatgtttcattgtgaacactgctttgttatgtctccatttccattaaaatgtaacacattaaaaagttgagctggatacttgtgtctctcaggaaacaagattgtacatcacccagcctcagctctaaatgattttccgatgatctcgagccgtgtgaagataaattgatgaagtggcatatgttaacttaataagaatttgtccccaaacgttgcgctaggttatatgagaaatgtttgttttgtttttcagctctgacaaagttagatttttaaatacagaaagttaaacggtaataaggaattctgccatcatgaaaaccccttttcctctagtttcacatgcagtgagagtcataataaaacataaaagtcagataaagctatttcagtcaccctcatgaattatagaattttaactaagtaatgctgaatgggaagacatttatatttgccagtgctaaacttctgtttcccccaaattactgataaaatacaaataaaaatagattggattaaatgtagtgctaatatgtaacgtagaaactgctttgcgcagttttggattttaaaaagtgcatttaatattatcgcatgctatatgcaactcaataatattttgtcactttgcacttctgtaacactctatatttgcaatcacataataatgaagagaaagccggataagtcaaatatttctatgtaaaggcagtctattcctttctccgaaggcgggaatcaaataatagactgcagaaatgaacggagggctcgatcccagcctttatgtggtggggaaatgatgtgctttatggtgaacaattatagtttgaaataacatttttttcttttttgctgtttttctagttcgttactatcttggaaggagtgctggcaaaattatccagatatgacgaagggactttgttttcttcttttctgtcatttaccgtaagtaaagagcttctttatttcctggcttttgttttaatttttggtttcggcttgggagaggagttatgttgtgtcattttgttttgggatgggtgtgtgtgttaattatagtcaactattgtataatattaacactatgtgaaaagccaaacatttaataacagcaggtaatccaacatcatttctatttcatttgtaaaggtacaatatgtgtgtattttttatgaacacacacacacattgctatttgtatgcatccagagatttgcctacctaagcccaccttagctagctctggcaaatgacttaatgtgggccaccatttcctcatctgtaaataagaaaaattaattttagagttttaaatgaagacctgcactcagtcctggaaatatgttttatatggtcctcactgtgtcaagtatgttcttcttaactgaattgcctacatttaaaaatcaggagaattcacagaaaattctgtatttctgggggtgcctgcatagcattctaggtgcacagcaactctgctggagctgtgtcttgggggtcttagactggacatgtgtttgcagtttgctgtaaccccctcctggctgtttcactcattcacatacctacctgggcttaggagccatttaagtttacaacttctgggacatatgatctaattatttgcaaattccaagaggccctgattctgtgccagaattaggcaaggccatagaaatgaggtagctaagtctgggcagaaaccagccttattttctatggataaatgatcaatgaagatggttgctataaatggactgcttcgggggcccagttctcccactcttcctgatgctaggcagacaccacagctgcatgcttccctgccatttctgacagcaggttcctgctggctctgagactagctgttttcctctgacaacaccataggaaagggaatcaatttaggacccactgcctgtgggtctttaaaacagcctcactgtatgaagaatctcccagatagtgactgaatgccaagacaaggcccagcacagggtagtggatggcacattattgtccttggaatccaacagatccaggctcaaatcccattgccaatgttaacagctgtctgatcttaagcaaatgtcccatcccctcagaacctcagttttctcatttgtaagggagtgcagggcagataatatgttccctaatgagctatcatgaagataataacgtaggcaaaagagcttagcataggcctagctcataatagagttcaataaatggcaactattatttttaaaaagtaactaatatgattattgtaaaatgcagacatacatgcacacaacttctttccaaatatgccctactttgatctttccccaacccatacattaatcttcctgggaactaagggaaatataaacagaacatttaaaacagtttcttctgatatgcagttctgaccttcccaggtacgaggattgaattcaatcccagaggtgcgatggcccctatccctggagcttattggcaaaggtgaggtgggaaggggataatgacagtaggaattccatccaatttcacttatggaacattcctataatgtgtcacagctgaaaggaaacctatccaacccactcctttgacaaagcaatgaaggcccagagaggggagtgatttgtctgaggtcacacagcaatgggcagagtggggacaggaaccagtgtgtcctgccagctttcccccaccactgaatggcttcctggagagagtgggattcagctggcaattgcctggcactggaaggcagatgggcaaatgagtggggaagattcataaagaaggattcagggcacatgagtgggaaatattagacaatgtttcattcctcagtgaagtcctggaaatggtgaaaagaaacagaattcagtgcaacatttctggaaaatgtttccctgacacccgtagaagacattgctttctttgtgtcttcactttgagcaactgtttttgttgcattggacttgaacctgtgaaactcaggaaagctcctctactctttactgagcagaattcaatccaccaagggccccaccctaattactggcctaccaagaggactatgggaaggtggtccaggggcagcgatatcaagaacagggcaccagagagtctcacaggaagattagaaacaggacacccagagcatcctatgcagaagtgttcaaactgaaattcccatcctctcatctcccttttcagagacattttgcagcctcacagcatgcctagcaaaggcagtgtaatgcagaacacttcggtgcctgttgctgggcccgtaacttccctccttagtgacacttctcccacacacttggccaccccaggccaaaagcacccacttatcatttgcagcccgtgttctcatctcctgccagtattccagtattagagaaagtgaactgtgtttagaggtggcaggaatatctccacacatggattctgagttcctgcccaaattccaaatggcctttgatggcttccttcggcccaattgtgttaattccccaggagtggagtggaagtaaaaaggatgagcagaggcagcaggtattgtgcaaagagcttgaaacctgtgaaagaaccagctgtgcgtcctaggaccctgtgcagaggcatagagatagtgccgacgctctggcatgagtttcttaactccactcccatttctgattcaattccttaagtattactgtgcacttaccacgtccccacctcagcagagctgccaaggatgagccatgtgctctgccccccagaaagctgacgagtatcgacaaatatgccaccctttccccctctttctcccgctgagcgcctcctttcctgggtgggcttgtttcatggtccaagccagacattttggaaaacgtctgcagtggcacggagcaggcaggaatatttatttctcgtctccatctgcattgcttcctctcttggagaggagctggagggaggagggaggatgagatgtggcttcttcgtgccagcccgagaggcgcccaagcgcaccctcctctcctccctcaccagcttcagcagcagtagcagcctgggatttatggaggcaggcgcctttcgaacttttgaaagatcagcccagttggaagacgcaattagcaactatctgcccatttcccttgactacaagatgtgcttttgcgtgggatgcctgtttggaagggtccctgtcttgtgggtagccactcgctgttcttttaggaggccaagaagagggcaagcaggtacccaggttcctcccacagaaagtgacaatgctttcctctgtcctctgcaagtgttaacaaatatgctggttctggaattcattcattcatttactcaacttctatttactgagcacctatgtgtcatgttctgtgctaggtgctagggacacagcaacgagctagaaaggtgtgttctcggcccttttgggagcttacatttagtaaaggagacaggcaattaaaaatgaaagaaaattatccggtgggagaagcatttccacaggacataaactggagagcaagagaaagcggggaggtgatattactttagtcaggatgctcaggcaaggtctctctgcagaggacatgagcgacttaagctctcaagcttgaaggagtcagcgatggatacagaagaggggagaatcttctggacaaaatagcagctgcattagccaggaggcaggaaagcaggaggcacttctgtggatattttggaggccacataaacacggtttagggattaagtgaatgttgggggtggagacttgactggagagggcaaaggtggaaagcccgagaactatgatataccggagagctcagctgagctaggagtcctgagagtccatggagtacagtaaaaaagacagcacagggtagggagactgggatggtaacccagctctgccccttaccaaggagctgtgtgacctggaacaaggtaccacatcttggcttttaatctccttcagtgtaatatgatgatggttatattagatgaattcagaagtctaaaataactataagagctacagctcctattccttaaacacttgctaagtgcctggcacaaagctatgtgctttaaatgtatttttcctgctgaatcctcagaacaatcccattccaacaacactcttctgcagatgttgaaactaaggcttggaaaggttaagctccccccagctcacgtgaattcttccttcactaaaccctggggcccctgcagaggaataaagatgtaggagtagcccaggccccatctcaaagcagacagaaccttatcaagttctgtctgaactttatatcaagtcttctcaagtcccctagaattcagacatcctcctccgatcaaataaatccatttgaggtggtcacaacacaacatggaagccactcacaacaggaagaataaagcctatcttagggctgtcaagggcctgaaacctaccgtatgtccagtcttctttgtcttaagttactctcattcaccctgttttccttttgccagcattttgattgtcttgccacctggaaatgaaacaaaacagatatgtttctccccactagaatttgcgagacgtttgtgtaaatcagtagcattgactgcttttgtgcagagctcttgatgccatgccttagaacgagaatgccacctgggtctaaagcccaaactgaatcaatgacattcacttctgttcacagaacatttttgttaagaggcagtctgaattctagagtggggtgaatattcctcagagtttgttagtattttctctgatggcatttcacttatgctttggcttcagggaatgtccagggtaggagagacggctttttacagtgtgggttgatgatgagtgatgcagacagaggttttggttcaccctccagagggtaacatcaccagattattcactgccaaatacatgtaatttttaagtcaattggcttctatatttcagagtggaggtgtctgccttggacagaagcaccaactgtggtagtagtagctggcgtttattgaacacatactatgtgccggacactgtgctaagtgtatgcatgcattttctcatttgatcctcacaatcagtctatgcaactgatttaattagcatccccattttatagataagtgatggtgagtgatttgtcaaagtcacatagttattaagactctaccctaaattgctcctttattattacaaaaatgttattccccatatatacacagaaatctgtaggtgaagtcaattagtgacttttccagaaactatccactagctgatactacttctaagggaaagagtcatctatttttcatatattaccagcaaaaataatttataaagattttactcaccagccagctattttaccgtagtactgaagtaatagacattcaaaattctccacttcctttgtgctgtccagataatcattcattttacattagtccttcattctatacctgtttatggagtgcctactatgtgctagacactgggggggttagcaatggataagatggacaatgctgtttattggacatttgcatgagggagatacatattctcaacaggtagtttacaagcatggtgattactcagaaagagagagtagccagtgcagtgtaactatggaccaaagggacccaacctcatctgggagaccattgaaggaaatgacatttgggctgagacctaaaaaataagtagagttttgcttggcaaaggagagaacaaagagtattccaagatagaaagacctggaggtgaaagggaagatctagtaaattttaggaactagacgttccttgtgaaaggccaggccagaaggagaaaaatgacaggcatggagttaaagagcaatcagtgcaggagcctgatcatgaaggagcttgcctatggtacagacttccagcgttttcagcagggaatttagcaaaatcaattcagctggagaagttaagcgaggtcacagagagaccagctccctgttataagccagctgggtttgtggtcttctgatgctggagctgagggccaccttccaatggaagccaccatttattttttctaatgtattttgttcatatgggccaaccaaaaaacaccgcgctttaaaaagttagagaagtcttaaacactgatctgctatatcttctatcagtttctttcatcagccactccctagtgtttcagaatttgacatcccctttggggtctgtgacagatcattttattgcctactaggacatccttatttccagttgatgccatgaaaatggagttaacaattaacacacttgctgtctgaagcaacccttcagaagctttacagaagagaaaagataagtatccaaagttaactatttcacttaatattgtgtagtgaacagctgaatatcattcaaagcaaacataagacacacacagtattttctccagactgtgtggtctaagtgaccaggtcacagaaatgctagctacaaaagaaatacctaaagaatatgggtatttcccagcactttgggaggcagagatgagtggatcacctgaggtcaggaatttgagaccagcctggccaacatggtgaaactccatctctactaaaaatacaaaaattagccaggcatggtggcaggtgcctgtaatcccaactgcttgagaggctgagccaggagaattgcttgaactcgggaggcggaggttgtagtgagctgaaatcgtgccacttcactccagcctgggtgatagagccagactccgtctcaaaaaagaaaaagaaaaaagaaatacctaatgaataggtacatggcttcaaacaggaaatagttgtcatgaaattaattatagattctatcctgacctccaaatcacatgcagtgggaagtttatcgccagaaagttagagagtgattaagataaaggtgtgactgtgaagcccagactaacagaaacgtaggcaggctattgaccgtttctgagccttggtttcttcatctatacagtgggaatgctgatagctgcctcagagagccactgggctaataagagataaacagtagccctttcataacacctggtatatagttagtaggtgctccataaatagccattcttagccttactgtcaaattattcaaaactgtaagaaagtttacatgaccctggtgcttttttaaaaatttttttttaaattatacttcaagttctgggatacatgtgcagaatgtgcgggtttgttacataggtatacatgtgccatggtggtttgctgcacccatcaacccgtcatctacattaggtatttcttctaatgctatccctcccctagtcccccacccttcaacaggccccagtgtgtgatgtttccctccctgtgtccatgtgttctcattgttcaactcccacttatgagaaaacgcggtgtttggttttctgttcttgtgttagtttgctgagaattatggattccagcttcatccatgtccctgcaaaggacatgaactcatccttttttatggctgtgtagtattctatagtgtatatgtgccacattttctttatccactctatcattgatggacatttgggttggttccattttctcaccagttcagtcttagcataccaatcatttctcctgtaagcaatccaaactattacccatgacaaggtcaatcaaaactcttgtgacttatattttagcatattctttcatgcaaaaatttgattcatcaaagtcatattccattatgtttagtgtattttagcattttgtgttttattttaatgccaaaagaatttttcgtttttacatagtctctaaaacacctctttattaatcaaaatgtttgcttaactagaattgaatatctcattctccaagcatattttggtttgaatcaggtttatttcagtgtgcactggggtttcttatttttccagttctgccacttcctaaagtataatcttagacagattgattaatctctgaccttagttgcctaatctgtaaaatgggaacaataagacctacattatgtggtgtgggtagaattaaatgagaaaatggtggattggagtaagtatttgacacttgttagacattgttattattgtaattattagtgtagttctatcactgagcacaaatgttagcatcagctactcaatcagccactgctgtatgtaaattgctgaactaagagtggtagagataggtttaaaaaaaaaatcttactctactgtctggaagttagtgtctagagtgcattcaatcgaaggaactttctagactttctggttcaatgtttccactgatatgctagagtctgcttggctcctacctgctggtgagagccgatctccatttctcttcctatgttcgaagttagggatgtcacattggtagcctaaaactgaccacagcaggagcattttactgaaattggcaaacactatcttacttatatttcagtatattattatattgggttttttttttttttttagacagtgatagataaagagaaagggaagagagagagtgtgagcttttcagaaaccagcataccactgagtatatcccaagtgcaggatatgtaccacatgggacctcagatgctactggtgttagatgctccaaaaactcatcattaaacaagaccaatcacattgtgagagggttattatttttctaattctcttttcatctttatccttatgtcaagaagaaagtttccatttggtgcttgtttgtctttcacacttttctaaaaatctcaaattttcatttgtaacagaggacggggaggcttcaggctcaggacccttagcaggcaaccatgtctacccagaatttactaccattattttagttatattgtatttattttcaccctggcttttttcttattgagagtgatattgctttttcatttatagtagaaacatgtttccctttataattaagtatttttaaagtgagctagtttaaggaggaataataagtaactataatacagatggttcatgggttgcagccaaaatcaggaaggtgtattgatgctggaagtctgggaagtactgatactttctagccactccattttgcagttgcggaaactgaaaccagagaaggaaaatgacttgcacagctagtttaatagaactcagacctcttaactcatcccttgagccttgcaaaaatcctccctgggattgcttgttttcttcactctttacctgagaaaatgaaaacaaaaaagagagagagagagaaaccaaaccactgtgttacaaacccaggctatgatagataagttgtcactggcagcagtgacataaattataccttcaaattcaggctaaagcagcctgcaggaaaagtcaaggacaccagaggtcacaagtgaccccttcgtgcagaagcattactattcagtaacaacaatatagccctcacttgctcagcaccaaagccatgtggaagccagggacacaagtaagacatggcccttgtcctcttcaagcttgcattctgtcacccttcttagtgttgagagatgttcaaaaggcaaacaaaacacaaaaatgccagaagggggcaggggcccccacttaaaatccgcaaaaataagcttacatgtctgcttggagattttacaaaattaaaactttccaatttgcacttccaagtttctcttaaaataagatcatgtcacaaaaatcaacaaaatggaaaagcatacaatgtggccattaggagggcaaaccctggagtccaaggaaaccatgcttcaaataccagctccataatgtcactagttgtggatcttttcaaaagtcgattaacctctctgagcctcagtttcctcatctgtaagcaatgagaatttcacgcccaccattgtgagggtgaattccttataaattgcttaaccttgtgctaggcaaagagtaagcatgcaaccattgttaagtatcagcagtgttaagaggctgggtctgagggagcccttgagccttggaaaaatcctctctgggaatgagggattgggacagaaatgaggaaaaggaaaactggaaggaaaaacaggtctacttcaatcaggcatctgttcagaagccccagggggtggggggtggggggagatgagaacatacacttcctggatctagtctcggagcacagtaccctgaacaacaggagatgagaacaattctcatcgttaatgaggctgcggctcctaatcagagcatggaatagaatgcgtttgcttaatagagatcatttccttgcctcttgcccaactccccagcagtgccagcagccctttgtttaataaaaggtagggactttgaggagtatggtgggatgggctgtaggaggcattactaccctcattactatgataatagtttaatcacaatcaatatttatgaacatgcacagaagccgtacaatcaaccagtagccctgcaactcagttttcatgttcttgcctaaggatgctttgcaggaaaacctcggctctctcccactttcccatggccctctgtgaagctctgcagtggttcacagaggtcatttcagaatattatccttgatggttacagttttatatatgaggtcttatttgcggtcagttaatattataatacattttgttgttcaaaatacttccacagtcatggtaggacttttcccttcaaactttgttaaattgtcttgtgaaaaggcagtgtagggacaacctgatacagtacagaatcctttgaagtcaggcccacccattagggttcaaatcctagctctgctacttcttgactgtgtgccctgaggacagcaacttaacctctctgagcccagtttcctcattcataaaggaagaagacaagtccttagaagacgtgaataagatactgtaaattaggtgttcaatcattggtaaatgcatcctgattttatatatgactatcagttattaaatatttctgtattgttcatgagaaatctgagtagttcattgcttttcccaaggtcacatagacactaattgagaaagtaggagtaagagtcaagacttggtcagtattctcttttccattatctgaaatggttccatttataggcaacttagagaaaccttattttttaaacatctcaaactttaactcttttctttcaaatgggaatcaaattttgaaagccagtgatcatttttcaagcaatggacatctggtgagctacttatgagaaatttttggtgtcacagttcccacctctgtaaaaatggcatttacaaactctggccctcttataaaaggaagcaacggacaatggcctcatgatgtatatgcatccatgtagcatttgacccagtgctcacatggaaatagtgcctcccaactggcccagcacagtactgacgttcggtaagcaaagaagacatttcaggccctctggtgacagagccctgggaatccatcatgctgtctatgattccagatatactttaagggttgtgtttttctccagtcctcagaaagtattggaaggggctttcaccgtaattgtcacttggccccaggcagaagccactgaggtttgctcaactgctcacccgcacacgcagtcccagtacatccgcccactcacacattctgtctcacccaagcagtcagtccctcagttggcacttaaaatttattcatcttcccaagatgcacttagagcatccagattatgtattgagtgttggttctgttaggttttggttttgcctttatagaggacatacctctaaaccatgacttcatcaaccaaacaccttgagaaggtcaccctgagaaagatatattcttcctgcaaaatccctttctccactagaattgaaaattgaaaattctatcacttttgttccttttttcaataatttttaatgaaagtcatatcggcacatggctaaaaaaaatgaaacagtacagaaacattcataattttttttaaaaaaacacagctctctgtcctagtcctttctgctctcaatcccttccttcaaaatgaaactttttaacaattttttaacccctggagtgctaagtactattattatattgtttattattcttattatttagagatagggtctcactctgtctcccaggctggagtgcagtggcatgatcacagctcaccgcagcttcgaactcctgggttcaagtgatcctcctgcctcagcctcctgagtagctgggaatataggtgcacacaaccacacctggctaattttttgtttgtttgtttgtttgtttgtttttgtagaaactgaggtctccctattttgcccaggctggtcttgaactcctggtttcaagcaatcctcctgcctcagcctccctgagtgctaggtttataagcatgaaccactgcacccagcctttgttgtcatttcttgattggtcaatcttagtgattatttgactccctactgtaatagatagagcttcagctcactttacatcatccacttctcctccactctccttctgttacagttattacagtattgttcttcctgtcttggtaccattataactttaagctgtacccatccacctttatttcctgtttcacccacaaaatgagactatgacacccatatcttttttcttctcctgcttcctcctccaattaatttcattttctaacatagaaattcttaattcatatcacttaaaaatgcaataacctatatttatgaatgtcccttgcgtctagaccagcactgtccaatagaactgtctaaagtgatggcagtattctgtatctgagctgtccaaaatagtcactagccttatgtagctctcaagtactctcaactgcgactagtgcaactaaaaagttgaatgttacttgtattttcttttaatttatttaaatttaaagagccacatgtgtagggtcagaccaaccttaatatacaagtgcaattcactaaaacaacctgactttccagcagaaatgacaatgatttctggcacatagttcttactatgcccagggactatgccttttgaactgatcatgcctagtggtactttcttagttgtcctataagagtgctacagctcaaacacctactgtaagaaagtgctagaaacctctaacctctgccctgggtactgagtaaagagtgccattctctaaagttcattcattcaatatatttttattgagccactactatataccaggtagtgtagacactaaggaaagagagcacctacattctagatatgaggctggtgagagatgaaaaatcaaaccaacaggagacgaaatgattttaggcatggcactgagtaacatttttacatactgaattgccttgacacacaaaaaaatctacatttctaaattgcttgggttagggaagtggaaaagggagcaaaacagcatcattaaccttgcagcagaaatttcaaaggccaaacattgaagtaaattttgctagccctttgacgtggtggtgtggtctgcagtatctaggcaaaggacaaaaaaaattaactcagagctcttgtgaagtcaaacaggcgggggtggagtcagctcatggagagaataaatcatttccttgattgtttttttcctttttttttgtgagagatcatggggcgctcgggcagtcactaatgcggtggtatctgttcagacttctttcttcttccatctttgagtcttacccaccagacttctgtttgcaaaaagggcctaatccactttttttttttgtctgtgcattgatttaatagtatcaaaccctgaggtcctcgtggtctgcacctgggttgctttttcccctaatgaagcaagagaagtggtttaagcccctgccgcgctccctatcaaagctgcacaatgattaactcaggtcccctttttagggccaggcagaagaaaatcccttagtcatcagcattgtgaaaaccccagaatggtgagtgctcaatgaaaagattaccttgggcacctgaaaaataatggaagagctcaatagagaaaccattaagcctgtctacactggctaagtgaggtggagggtcgaggtaattagctgggacattcaagccagagaaactattttggaccttctgcactgactcaaatgtattcaagtccctcatacattttttttttgagaagccatttaaggttacaagaaaaaattaagacttaaatatagctaattaataaaagtggtttcatagtttttttaaaaaaagaaactaaataataggatgataggcagcttagggaatgggaggtccaaagctgtaacttattagtcatgtgccttcaagccaagttgcttatctcttttagccttggtttcttcaactgtaaaatgggaatattaataggatccccctcaaaaggttgttgaggcagaaatcatggagcaagcacgttcatcctacagctcctaatgtggtacctgtacatagtaaatgttctttgtttcaggcacaggaaaacatgaacaattgctcactgacagcggctcttcccaattttatccttagcctccgtcagcctctctggatttgtgtctctttttctaagctttttccagaactggctctatctggagagtcggggacaagagggttcatgaatgctgctagagaaaagatatgggttgtcctaccagaggggatggtcagaaagcagggagtcccaggagatgaagttctgctgaagtcacagttcttgcctccctttgagggcagttgagaacctgctcaggagggatgccagaccaggtatctggggcaagccctaccccctcccctttgtctcctgtgccctagggtacatggctatggcttggtcctggagagtaatagattgtgttgttgattataacccagggcactggcctggggaactgccctctcacttatgcccacactcagtcatacttagcaaagagaacaggtctttgctgtcagcctcaacatttagagggtgagttctcagtgcatagggtgtcacagaattggcagaaagtatgccagactgagaatcagctcagatacctgttggtaacctggggagattccagaatcttttttatagcaagaaattgcccgtgggccagaggtggggagtgaaactgactatcaccaccaggctgaggagcatgtgctttgtctacaccggtaagccaatattaccagtaatgatgataagcacagctacatttagttgaaccctttgagtagcgttattactgtcccatttacaaaggaagctcagagaagttaagtaatggctagtcaccaagctaaaaaatggcaaagccagagttttaacctagctaatcctgaacccattctgtaagccacttctctagatttaaagttaaaaaagaaaagaaaattacacacacacacacacacacacactcttttaacaaccattgatggaaaaaaatacacaaagacaaaaagctactatattatatagtgcttttaaagaaatttgcgttttgttcatcaaaacaatatcttattataatgtaaaatagccttgtgtagatggtaagggctgttggttatttgatctagatacagtgcctggtgcatgcttggattttctggcaataattccaaaactctagtgggttgggaggatctgatcattcccttctacctagagtatagctggcaaaaagacatattcctatggatatggatatggataacttaagaaaaggtgatccttaaaaagggagcactgctgacattgtacaggaaaagattctcatcctggttctgtcaatttctccgctctgctacatttatctactgtaaagaatgtaactggtgacaacttcctacctctaaggggacttgaatcagagaatgaaaagcagccctagagataaactctcatgtaggtaaagaaacaaatccaaagaaaagaaaagaaaagaaaaacacgtccagagccttctacctagcctctgtttgagcttctccagtgaggtggaggtctctatcaccagaaatggccagttcctggctggagtgtgatagctgtttagacctttttctagggccctgtaattttacacattcattctgattctatactctggaaccattgtgaacaaattcaaacctgcactgaagctccttaattaactacatgaatattatggttttctttgcaattagcccatctttttctaggcaagatgccttttctttcactttccttatagaatatactgccagaatcccccttttcctcatcatcaatgtccttcttaaagttcaatatccagcggccgggcatggtggctcacgcctgtaatcccagcagtttgggaggccgaggcaggcagatcacctgaggtcacaagtttgagaccagcctggtcaacatggtgaaaccccatctctactaaaaatacaaaaattagctgggtgtggtggtgggtgcctgtaatcccagctactcaggaggctgaggcagtagaattgcttcaactcgggaggcagaggttgcagtgggccgagatcgcgccactgcactccagcctgggtgacacagtgagactccataccacccccccccaaaaaagttcaatatcccgaaccaaaaatgatacacacatgtctctaaataataatagaccacaatttaccctgggttattttttcctgttattatgggatgggaggaggatcaataagactaagtgcaagtcatcatttattaaataaaagaacaatcctaacaaaccgagggctggtgcatgagggagagtggatgattttcatttgtgacagaaacttgcctcatcttcccaaactgcctgtaaaggaatagaatttggtgtcattctccggattgtaactgcatgttagtagtaaatggtaaatggtgtgtttaaaggttgctcatttcagctgtaacaaaacccctaccaactgctaagcatcaacatcacagagtacaggaggcaatttctagctgagaagaattgttctgctagcacctgctctgaccaccgatgcttgaattcctcatacttttctaccaatattgaggagatcaagagttccaagggagaaagttgggctcagatgaccgcataggagtcttggcttctctgcctcctgtctgtgatcatgagcaaataaattccttaaattctatgggttttacgttctcgattgtaaacggatctgattgaatcaccccctttttgcagcgtggcttaaagaagaaactgtttgtggaagtgttttgcaaatgaaaaatatcacagaaatgttagataatagtatacatgggggagacatgaaaaaaaaaggcaagccaccttctttcctgaactaagttctagcatagcaatggcgaggaaagatttgaggtttagaatcttttagtagaaatgataattgtgcaaaatctggagagcctgcctcaaatccctttaaggactaagagtattctcctttacccaccagcctctgcaggcagtcacctttctatacaactatgttggttttcagactgatcagtgacgtggctccttgatgcaatcttgcctctgcttacttctcaatcatcctgaggccagaactggtcattagctttctctcattgcttccctctataaattttccctgagtttcctttctaagctggtaccaggtgaatcaatgaggagacagccatgagcaagaccaagatagcctttgctctcatgacattatatgggaggtagacattgcacaaaaaaaaatttcggctgaattgcaatcaatgctgcaagaacaagtgtaaggttctaagagaatctgtaacaggagactccaggaatcgtcttgggggctggcaatgattcaagaagatagaatgcattgccctctcgataattacctaattgatgtgtgttccttgctttaaagtttacaaagcactttctcatgccttttctcatttcaccaagctttcagccctgcaaagtacacagtattgtcaccttggtctagaaatctggaaaccaaggctaaggaacttggcatgatttccccagggtcaacgagttctggcactgaaagaacttttgactctatattctgggctctttccaccccaccctattggttcattggctgttttctcttgagagctgacattttggaaactagcattgagaaaagagcaacagaggaaatcactcccctgggtacttttctgggagacatttgggtgaagcttgattcctaatattgatctcagccaaattgcaggaggaagcctggctgagatgtgaaaagacatcctaactgctttttgtgcattgcagtctttgtagttcccagtaaaaacaggaaaccctctctgaccccaaatgtagctccttagtcttaattgtgcctagagaaacatgtgtgacctgagtcaaaatgaaacacacagaatattaaacatactcccataggctttatttctcaaacccagctgttcattgacttttcacagtactcagaactcacccacatttgcttatgaattcatcgtcttagctgccatttgttctgtatttacatcctggggctaagtgtgaattcacccttatcaacctgcggaaataagcactattactaataataactccattttgcagatgaggtaacagaggctcagagagatgaagcaacttgcccaaggtcacacagcttgtaagtggtagagttgggattcgaactgagatctgactccaaacttcatgctctcaaacataacactctagcacgctaccatactccctccccacaaaactaaaaattttataaccacttcctgcacttcccatctggaatttttagcacgtaaaagcaggagacataacggcagcctttgggcagttttgaaaggttctcatccccctacccgcagacaccatctccctctgggttgaggatgtccatcttcctcttaaaaacctgagttaatgaaagctgagaactgaggtttttagttatttagttaggacaacctgcagccaaattacacaaagacccaaggtaccagaagtaacagcaatcttagttgcttctctagactggtaagccccggactaatccatgtgggtttagctagtcactttactttttttcagagggagggaggaaaatgtaaagctcccgctccagcaacagaatctgaatcagtaaatttgcgtgtgcattctctctttctgcaaagcagtggctatggcttgaaaaaatagcaaacagattttattttctagtacctttctgtttttcctggtcagctccatgtgccagcatgttgttttgattctgatggggatacagcattgagcagtgaacaattaaacataaacaccagcctcacttccatcctcttctttcctctttaggtgaaggcagcttccaaatatgtggatgtacctgtgagtatttgaaaattgtttctcgtggggtttttttgttttttttttttttcatttttactttttgttttcatgagaattttgatagtgctactcatattaattgctgctagctaaactgtgtgttgctgacttggatcatcagaaagaagccaagaatattttgtagtagaatttttttttcagataagaagacggtatggtttctttcatcaggaagaaaggtcctgtttgagggtaaacccacttcactttcactttcattttcattggtttctctgttgtttcattctgttttcatcatgttcaccaaccctcctgtgtgcacaccttcagaggaaagccatgaagctagaaacttgcacaagggtgatagtattttttgttaggttgatgaaaaacttaattgtggttttgcaattaaaaatgtggaaaacataatttctttgcaccaacctaataaaaaaaacaaataaattctaaatttgttcattttggggtcaattctgcaattgttttaaggaaacctcacaaaactgcttataatttagtgcaggcctcattaatgaagagagctctcaaagttcacagataaagcactcgaagtttcccaaaatttacatttaaattgaggttaagtacaacacatgaatgctaaagtgtgggattacctgtgataaatcaggatacatttatggacagactttgccctgcctattagcaaaataaaattggagagattttaatatattccagtaaagtgaaaaagaaaatgattttgtttctccatttctaacaaaagaggtgtgagtctattataaaatattaaatttagagagcttatctcaacagccaccaagggtcttgtactaagcatttctcattctgaacgtggttaagtaccccccttgttcaaatacttatttgttaaaatttgtttttttctaaaaggatttgtattaacatttaaattcatttccccaggaagctaagtgtgtaatggtttactggcttatttctcaaaggaagacaaaatagaaaattggagtgaatttagcattagcatatattgtgtttgtttaatgaaagaatgtacaatcaataattatgctttgaatttatatgatacttcctatccacaaacctcagactccttcaggtagacagttcttataatggagaatagaaaaagctcacataactgcagcagggagagaacttaagtaatttactttctcaagcctccaaagtataaactttcccttcgtggggagctaactactcaaattttctggccctgtttctccatctttaaaatggagatgacgataatacctaagtcatgggtttgctgtgcaaattaaatgacacaacatacatagaacatccagcaccatacctggcacttattaggaatttcagtccaggagaaggacacacgtggtggtggtagtgtgatgtccacactctattgcatatagatggatgggggatgaatttgcagacatcagcgttgggctccactggtcttcaacagtgatagaaattgaaattctcggctttcgacccaaagatttggtagctgtggtctattctctgtaggatccagagcagagggggtatctcagccaggtttgaacaggtggcctgtagacaaggcccaaacacctagagaaacttgatccagccattggtactaacatcaggttatgttagattgaaccacatgaaattggcatattggtgaggtcaaagaagtcaaatatcagccatttcatatgattcgatctaataattcctgcaagctaggttcagatttattataaagatgggagggcagtaagtggactctatagcaaaatgcagggtgccctgatctgtactcattaagtgtttatggattaattatgctaaattagaagactcgttaggtgcattagtccattttcatgctactatgaagacataccagagactggataatttataaaggaaagaggtttaattcactcacagttcggcatggctggggaggcctcaggaaacttacaatcatggcggaaggggaagcaaacacgtccttcttcacaagacagcagaggtaagaagaatgagtgaaaggaaaaaagcccccgtaaaaccatgacatctcctgagaactcactcagtatcacaagaacagcctggaggtaaccacccccatgattcaattacctcctactgggtccctcccatgatacttggggattgtgggagctataattcaagatgagatttgggtggggacacagccaaaccatatgtcattaggctatgaggaaacaaattgaattagtagagttttcacactctggagggcagaagaagttgatgcagcatgttccaaaatgtggtacatttaccactgattatacaaaatataataactactattactgctactacaaccaagcgttataaagtactcactaaaacagtttacattttatcttcacaataacctcactttaaatatgaggaaactaaggcacagagaagttaatttgctcaggatcccacatcgggttagtagaagagctgagatttaagccaatgcccttacaaattctgccatactgcaagataattccagttagtgcataaacaaacaccttgatttggatagtggtaattattttagtgcatattagaaaaagtatttttttaccagctattaatgacttaggacaaagctaaatgttaagttgattaacatacgctttaatagctaataatattatagtaaaccttttagtaaataaataacaattttatagaaaacaatagtacataatacacgtatattctatatgtacattgtttatatatggtagataatagtaatcatttgcttctgaaatcaatcctaggaggggttaatattatcattctgttttatagctgaggaaactgaggcacaaagaggttaattagcatgcccaaggtcacctggtgaataagcagagtgtgactatcaggtgctgtcagttggaccataaagcctgcacttccaggggtgtggtagagtagctagcactggttcccaaggtcaattatgtgcatctctctccaactccgccttcaatgagagcacattggtagctcaaaattagccttgatgggagtatttacaccatgcaaattggtaaacactacaaatcagggtgttttgttttgttttgttgttggttttgaagagtcagtttatgccgggcgaagcagctcacgcctataataccagcactttgggaggccaaggtgggtggatcacctgagttcaggagttcaagaccagcctggccaacatagtgaaactccgcctctactaaaaatacaaaatattagccgggtgtggtggcgtgcacctgtaatcccagctacctcctccagagaggctgaggcaggagaatcacttgaacctgggaggcagagattgcagtgagccgagattgtgccattgtactccagcctgggcaacaagagcgaaactccatctcaaaaaaaaaaaaagagtcagtttaccagcataccactaactattacctattaagtcagcagtccccaaactagaatgtacagcagcaatacttggcaaaaaaaaaaaaaatttctggtttgtttttgttttttattaattaatatattcagcttttattattattttttaatgggcacataattgtttttgttttgttaatacagagtcccaggccctcacctccagagattctgattcagtcattctggggtggagcctggatattgctttccattaagttcttcacataattctgataagtagtacaagttgggaaaccaatggactaaatcagtgattcttgaccttggctacatattggaaactagggagcttttgcaagcattaatgcccaggtcacttgccagacaaaattgaaacagcatctttggggttcagggcccagacatcagtatttttaaagctccccaggtccttcagatttgcagccaggcttaagaaccatcagataaaatcatttctcaactcatttctatctctgaagcctctgagatcacctgtgtttccctgtgaggtttttgttagaacatttaatggtttagttccatgtgggcactagcagttagtcacctttgagatttgtctcttaactatccacactactggagggaagttctagtaccagtcacctaaaacattacatgatccccaaagcatatgtctttgttttagatgtagtttttgacccattggtatatgtaggagatttgcattcataagtagggctgacttaggatgctggaagtttgagctcatttttctcaagctcagaagtattccggtaggggcaagttcagattaaaatgttcttctttttctgagccacagggtagcttattcacaaattatgtcttccacacatggatgcagttaactatacagatatttgtttaagtgttttctaaaatctgtgtcatattcaatcagtctgtccaagccacatttaaaatacacaatgtcattatgagatattaaaaaacatctaaaagtttgtcccagtgtgtgcgggtagcacaatgatataaaagcataatttaatagtatcagctgtctggtcaagtatattttccagctataactaagggttagcttgtttgtgaacagtttttcttttaattgttttgattggaaatctacttgaaatgcattacacaaccttcttgcctttttaaacagggtactgactataatcttttctcaatgactcaggatcaccattgtgaccatgtctttccccagtggctgcatagtgacccactcccctccagggcctcccaagatataggggaggcttgcccctgccctcgatagtcccaaaccccagcggttggtgagtctgcatgtctggtgttgcagttgggcagcctcctccctcaccgtcaggcataaggaaaaatgatagctctctcttatctgcacagttttttcaaacaatccccctcttccctatttctgctccatcaagggatggaaaccaaacttgttggaattggttgggagtgggagcttgaggactccattatgagaaaactacacatgttttgtgctgaggctttatcatttttattttgacgttggctcctctgaggcccccttttcttcttggttctagagtagattctaaaggtaggtaaggctgtggaatggtataatattatgggggggggggaatcatagtaattcatgtttgtattacaatatatggctttcaaaacatttttacatacattattctagctgatgaccataacagtccgtggaggtaagtaggggagctgttagtaatcccattttatagatagcataactaaggcccagagaagtttttttttaactcttcttttacagaaaagtttaagtgatattcacaaattccaatttgtgggagatccagtaaaaatccatgcagtgtgactgaagagcttgaaaaaggaggagatggagaaaggatttgctcattcattcttgaatttgtccattcagcaaatatttactgggcccctactatatgctaggtaccattttgtatgctggggatgcaatagaaaacaggccaaacaaagttcctgggttcatggagcttatgttctagtgggataagagagaaaacaaatagtgtataatacaacatcagctattggtaagtgctattggaaaaagaagagtcaaaagggagcaaatcatggagtttcttaactacatgggtaagatgaaccacactgattttttaaaataccagagtttttaaaacttgaatgaagtgcccctttgaagacagtgaaacttcgtgaaaagagaaggagtggtgcaaatacgcatcattgtagattactgtttcttctaacattttgggttactgatagatctgccgcacttgactttgtaccttagctctaagatggttgcatgcgcccaggaaaaggccatattgccacaagcatcaccaggggagaaatagaaacaataataagtttctcaagtcccccaggtagagatccccatccctactgagaatgccctttgatgcacagttgccaaacggagagaaggagagaggtgcctgcttagaactgatagctatcacttacatctcattggagaacctctattgttttgtatcataaaactgcaacaattataggaccatcatggaacctgctcaatccattcgctgaaaattgtttgaaagtgtaacacttgactactgtggctttgggttgtcctcattgtttttcaaattaataccttgtcattgtttcagcaggtgttaagaaatgttactagcatcccaggggccaagcattggccctttgcatgataattgtttgctttgtatcaggaaaaaaaaatacagtcctactgtttctaaaccttcctcattttcaccctggaaattacacagaagtgttaactaacttcaatttacagtgcctgacagtcacgtctagtagagaaatgatactttgtgatctaaggtaaatcacagtaatgaaaactaatctttttagttattagcagacatatatatctactgtggaaatttgaggggtttgtggccactctcctaatgacctatattacagtgttttaataggtttctttggagataactttgattgtgacatctcaagcagagtgctttctgagtttctttttttttttacttccctacaataagtcatttcctaactgcaggatgaaccaccagcttacctttccagaaaatctgatttatttaaaaatcaaatcctctcctccttcccctgccttttgtttcttctcttcttcttcttctttttaatccttggactttaaggctgcactggaagcaaagacaaatggtttagtgtctcctctgagtgaactaattaattagcaaatactatatccactcaggttaagctatacacacacacacacacacacacacacacacacacacacacaatgagacttgggtaggaagaggtatagattgaaacacaattttttttacttagtactttctcaatattttaaaagaggaaaaaggaatgggaagttccatcacccgtctgataatatattaaggacagtggaaaacagtatgtttggatattctttaatgcaggtttcaatccaaggcaaagtcagagaacatctatgggttatgcagtaaagatttatccattagataaatttgccaggaaaaaatttatcatagaaaaactatttataaaatcctacaatctcaatgcccttcttagccaggcttgatttctggaaagaggaagcagttctaatatcaattcctaccagcccaggctgtggacagcaatcccatgcctacaaagctgatccagcagaagcatctcagggtgtgtgagggcaagtagagggtacaagtgaatggtaaacaaggaagagtggctgtctgaaaattcgttttcatgttttcctgtttctttacagaaacccgggatggacgtggccgacgcctacgtgactttcgtccgccattctcaggatgtcctgcgtgataaggtcaatgaggagatgtacatagaaaggttatttgatgtaagtaaatgccttctcctccttgaaaaccaaggaggagaccctccaaaatgtgacaaaataagagacaggaggataagtcacattttgagaaaatggattggttctgattcagactaaatcttttcctctccctctgccttaggctcttatctgtcttgtgtctgttctgaacccactctggtgtggcagtgtctcagtcccaatctgtgtgatacgtaggacggcacacagcctctcggcaagcaggctcattcctgcacgaagcttgcaaggcagctctctctaactggcaaagacctttcttggtcatggttttcctccttgcaatctggcctcactttagggagatattctcatcagggaggctgagaccaactccctctcctgggggtggcgcctccctgacaccagctgtggtgtgcagatgtgcagtaaatgtcgcatcgttatcacttcaaagataatttcattcctggaagactggaaatccttaccctgggttttggcaaacacttacattagagttgctcagtcagttgcagctttaaaccatggcgccccctgcccacccagccagctgataatttatgagaaacaggtgtacaaagaatgagtacattgggctgcggacccagatcaaacttcagaaaatgcagattaccaagggttaatcatttttgagcaatcttatttccactgagactgcatctgcacagcaaagcaagccactgaggcaaaaagaaaaaaaaaaaaaaaaaaaggaacctgcttcagtctcaaattgcctatctcttttaggccaaagcagatgaggctacctaatttagccagatatttcatctcgggtttccaccgaatttgccagtgtagacccggccagagtgcatggaagctgatgttcttgtctccctgtggctctgagtgtgcagcctacttctgtcttgtgaaacgtgagctcctcctgtccaggtttccatatttttagtgccaatgcgaacattaatgttttggtctactatggaatccatgtttctatttttttttttctgtgattgtgttcagcaatttacattgagtttgtgtgtgtgtgtatgtgtgtgtgtttttgttccacagctaagtgagctcattgttggcaccgctttctgattctgcggcttctgacttttatatgctttgacttccagctcatttgctttcctcgtgtgtagaaaggctcctttctttttttttcttttcttttccaatcgtcccctttctgtgcttgatacccctctttcccctgcatcacctttcctcgacaaaacccttcttactttttaattcccacccatcctctctcagataaaaatggaacttatctctcatgtcaaatgttttatcacattatatcaagtggcatgaattagaatcaaataatcttcctgtgtacatcttctagcatgacccacatccactgagaatgcctcatacatgcataaagctcaccagcgggtcctcccccttctctgcatgcatgccttatatgaaagtactgagcctagaatgtccggggcacaatcaccatccaataggcattgaaaacagagacaggcaggaccctcgggtctgcagttaggagtgtggacactctgcccatctccattgaattaaattccaaaccacaaatattcaagaagcctgtgggttgtccttttcaatgcctaggttgcctttctttttcctttgatcagtatcttccgattctcagttttatgtggcccgtgtgtacgtgtgtgtgtgttattgtgtgagtgtgtgtgaataaccaataaccttgtgttctctaaaacttaaatctagtactgaatttgatgtttaatctgcagtttagcttgttacttaattgacaaataatccacccttgcctctctttttttgaaattagaagtacaagcaaggtagccttgctgaacgcagcagggcacattatctcttttgtggctcttcttaaaggaaagtgcaaccaaatcttcatttaaaaaggaaaagtgcagccttggctagtacaggtggtaaaactggacttgcctgactgttgaagaccacaggcaaaattcaagccctccagcctttaattaattaattaattaattaatagtaaattaatagtaaaaagaaatattactgagaatatttttttccgaaagcaagttatagttagggacattcaaaaattcacaagtaactccagtcccttgttgaattccactgaccagcataaaatagcatcagtaacattgtggaaacccccacaatttagtctgatgttgtcccaatttggttttcccaacggagtcttagttataccctcctgagtatatctgatggtaaaggcttaactattacaatcactcactgcacatcactcccggccccgtggaaaaaaaaaaatttttcaggagcttatttagagataacaagtttctttgccatttactttcttactttctaaataacctgatctcctactttacagaatattggtgctaggcaacctaactgatgtagtgcaaaaaaagttattgaatctgtcatggatttaaaacatttgtcattttaaaaacccagagcttctcgaaaagcttcattaccatgcagccttagtaatttaattcagtacttactgtttttctataatctagcagcaaaacatcagattaccaacatgtttgattattttcggcttctgtttcctcaagcatggtgtttatttctttgtgtacatgctctgcaaatctcttgtgtccaccaagctaaacaagggaataggaatatcaaggcagaagggtctgtgaaagctgccactctaaatttcttgctgcaaatgaacttattctttaaatcccattccttaatgataggggtcctggggcaagtttctaaacaattggcagaaacctattgagaaagacttgttgctctgtgagatttttcttccaaatcgttgcattttgataaatggcaaaaatgaataatagcaaattaacattttgaatgaagaaaaaaatatatatctccgagattgtttgctgtttgggggttgttgattctgactgttgtgtcattctctggtttttagttcctgctggcatctgtcattcagaggcatgttctaagagttcctgttgtgtttttaactgtgtttcaagtctcagttttatttacctgataagtcctttaagttgttgctgtttggtattgttcctgtttttgcccttctgagtgtgcccttgtagaaaaggctggatggttttagtgtgtgtttgtatttgagaatatttggattaatagctggtcatttaacggtgcattttctgctttaactaggcccctacccagtgctctctgagctagttttctctctgccacgtcattgtacttttggctggaagtgggtgcttgtgggagattatcggcatagcatttgggactctatatttgatgttctgcatttttatctattttattacgtaacttaagaacaggctttccaaattcatcctcaccgattttttttgttttaaccaagcattctctaggtttattggagaaatacatttggacataatgttgcctaactgggttgcttttgccattaagattcctttgtttattaatataattgatttacctagtctttctataaaatactaatgacttttttgataacgcacctaagaaaaaaactaaccaatccaagacaaagtgctgatcagaaaagaatcggcaaactgtttcccataatatttcagatgtgcagctggacattttttatctgcgtttttatattttttcataaaaaatgaagtgtaattgtatattgttttcagttgctgcagaataacagtttataacattttgaaacaaaacaaactgagatttaaagtaagagaatattccaatatacacaaaaacaatgaattcaagtagattaaagatgctgaatttttaaaagaagatcagactgctgtgagactcaagtggaagcttagccttcttgaaaattattgctgacattcaaagaaaatataaaacatggatatgaaataatctccatattcctaaagcagcagctacagaggaaagcacaagctcaagaaataacttgaagacagtgatttaaagttggagtatccataaatcatgcagatggcttttccctccttctctagtgattaattcaacatcttccccaaaataaaaacatgctttttgaaattagagatcagatcatcaagagacgcacctaagatttcaaggtctaaacaaaaattaattttctttcttccttgtacttcttgaagacacagactgagaagaaaatcgggattaaaagagatgtgcttagggtgaattcatctgcttaaacctcacaggctcggagatgagtgattaaaaagccatctcgaacttggatggaatccacattggtagtaatgccgcatccgcactggctttcttcaggccccgtgtcattgggaaccaggcccagggaacatttgactggagatgatacatggattatataggtcaattatacacttaatctgccttctggaggattaagtatttgcagattgactctgcatttggcttctccgtggcagttatcagatcaggaaagggcctcttaccaaaccacctcgtaagaacttaatcaagcagtgtggtcagcttcggaaggggctgctactcagtattctttgcctcgcacggattttaatttgctgttccattttcaaatcgtgtatttgtccagtttgtgtggcagaacaataattgagtgtgactagttcccttgaaaagggtaatttgaaacatgaaacctttgcctgttaaaatatatttgctatatttatatatgaaaccacagatacccttattttaacaaccttattaaattactaaagcaccatacatgtgagcatatatcaatcaaagtaggaatcatcctgctggaggatgaaagtaccaaataataggctacaaggaggacatgacgctatatctgtaaggtatatcaccagctgtccaggtaagggaaaccacttccaaaaatatgaagtggggagaggtgcataggattcactaacacaataagttgcacttctaaggggctgattaaagaaattcaaggcatatggcattctagacactgagacagtgagttatctcctctctaagcaataagcagacgtgagtgccctgaatgggacttactgtgcagtgatcatgggccctgcctctggaaccttcagacctgatccttactagctgggtgaccttgaacaaggcatttaatctctaagagcctcagctgattcatctatataacagggatgataatcgtggagttattatgagggtgaaatgccatatgaatctgcagcatcgagctctgaggaagcattggtaagtgttagccaccaccatcatcatcatcactatcatcatcatcatcaaaatggaaatgcttttcccagccttctttttttccttgttaagcaaagtttcatattcatgttaaggtgctatgagtctccccatcactttaagacattaaccccaagcttgcttagaattgcttgatgtagagcagcctggtaccttttttacttttggtaaaacatcttcctgaaacaggcaaaatagtgatggtcaggagtggggctttgaagtaagacagacagaaggaggaaacttggttctgccacttttgagctttctaacctggggtcaattatttcacttccctaagcctcaatttccccatctgtaaagaaactggcttcttacagttttcgtgaggactaaatgatataatgaatgtagacagacgtagttaaaaattcaatgagtctcttatcatcatcatccttatcatctcatagaactacttgttccttcaagtgattttgaaatagcctagctctaccccctcaacaaaactacactgcattgccaaataaatcagaattaaccttcggaacttcagggttttggggggtgggggcagagagagggagggagtaattaataccctttactattaagatgcagtatatgtatattgtagacatttagaaaatatggctaaccaaaaaataagaagattaaaatgttgtgttcccagcacccacatatcattatcagtggtgttttttttaatctttttctatataattatatatatatataatgtactctttttctaaaatgagtaagcaaaaaaattgctttttaaagttaatggtcactatttcccatgccagtaaattttcctctcatacactgtattcaaaattacccacttgtccccaaaatattctttacagctggtttgtgcaaaccaggatttgatgcagggcaaggttgtgatgccccttaaatttattttgaaccagcactggcccttttttcatgatcttgacttgttatagggactgccgtgccaattgttctgcagactggaggagtttattactatctaaacatagaactgatttgctgagaaaaaaaaaaaaaatcaagctgaattcaaccaagtagttcttttaaacataattagtaacttagcagaattcaaccggggttttttatttaagctgttctctgtatgtaaggaaaacttctgaagctagtttaaaaaaaaaagattgagggggggctaaactgtaaaaaactcacagaggccagagtacaaggtggccatgtgaagacatacagagattttaactactggaataaggcacagctatctgagctgggtgggtaaatcagagggtcacagtccagcatttcttgtgtcactgtaactgctttgaagtcttagactggtgactttgacacacacatacccatactattgggaagggtcctttgttaattctaccgggattttccccgaggttatcaatctgaaattaagccctccaaatcagtctgaagctgagcttttccatactctttagatcaaattttaattgaactgtgacctcatctctatcctcaattatgaagctaaagagcatgtcagccaggctactaggacatcccttagaatctgtgagattatgtgtattgaaaccagaaagctaatccaaatgaactgggaaaggcagttacaggaagaagagacagttgattctttcatctattttcgagccccaaagtaaactctggcaattaagtcataccctaggccatgcattacagctgtagagtgtcatttcccaaaaagaatacagaaactggagacaagttggagggaaatgagaaacccatcactcaccttgattggtaacattacctactaaatattgttacgtaacgggtatctatatatatatgatatatatattttaaaatagggtgtgtgtgtatgtgtatgtatgtatgtaagatatataccttattagggagttaagtttccttggcagaggaaaaccatgtattcagtcccaatctaagctctgtttggattcttggaagtgaacctcaggatacttccaagctaaaattaaaaaacaatccaagttcgttttcatgacttatgccctccagggccactcgaattcccagtgtcttcatgctttctctaactcccaccatccaaatctgcttttaacagttttgataattcctcttctattaggatgagaggagatgaaccgagtgttttggtgcttttctgatgccctattgcagtgaatagtattcaaatgtcaatcccctcttcccccatgggcttcacaattacaagtaagtgataacaattaattactttgcttttggagtcttaggtatagaaacacatttccattccacatggacttgggaatgcttcactccatgcctgggtattttgaactttcagcaatcctgcatacaaaaaaagataaggggcattaacagatttggattaatcatgttaaatgggttattactatccaaaagaaactgaggggttttttgttggtattctcacagatttacatttctgtaacatatcttcaagtagttttctaatctagctatttccttccaaagccattcatagaaatagaactctcttaccttcaggcaaaccttacataaagccagtcttgaattttctctggagcttgtaggcaatgaagagttttgctaagtgtctttatcagaacagctttctgtgttccagaagacatttggtgaagacagttaatttgttttcctttccagaggagaatgttccattaatcattctaagaagccaagctgattgctctgttacgttaaggtcacagtattcttgttaacatgacccacacaatacttctgtgtcttagaacaggggtttttttttttcttatggcagacttaacggcatggaagcagtaagtgacagactcaaacacagtacacatgtacaagtacgcgtgtgcacacacacacacacacacaaacacacagagtagccaaagcacattttgtggaagaaatattatcacattgcattgcaggagacgagctgtgttaaatcctcaaatacttctcatttattaaacaagtaactatttctctccctgctgggctccagataggctatcaaaagatttcacgatcaatacctagatacatagttactgctctaattattttaatgagtgaatttaaatcttgcataggttctttttattcaaaatgtgatccacaggccctcagcatcagcatcatctggaagtttgtaagagatatatagtctcagccctaaccccagaccaaatgaatcagaatctgcattttaacaagagtctctttgattcaagtgcacataaaagtttggcacatagtgggcaagatcaattacttcaaacttatttgccccaactcacaatgagaaagaaattttacattgcaacccagtgtgcgtgtacacacacacgaaacaaaagtttataaaacaatatttatgtgatgcagtctgatagttcctgatattaccactgaatttcaaaaatttcagtggtaacaggtaaaatgattctactacacacaaataagtttacaatcctcagtttcaaaaatacttctaaagcaaagtttctcgtctttggcaccactgacattttgagtcagataattctttgttgtagagtgctagtctgtgtattaaaggatgttgagcagcatccctggtttctactctagacaccagtagcagccactgtccttctcaaaatgaagaaaatgtctccagatatggccaaatttcccctggggggcaaaatcatccccatttgagaaccactgatctgcacgaactagaaaagaggttaccactaaaagtatacaggtagcccttcctctctggatgtaatacagccccctgccactgccatcatcacacaaaaacgcgatgagtatgatgtagcaacaacaaagtcgagcttaggaattgttaaaatgattactcaagaagtccatgtgtccatctgggagttagcttgggagcctttgccagtctctgaaggagattatgtttggaggactccatgcaatgatgggaaaagcttgttagacatccaggaccctcttctcccctgactgtatccagagtagtcccacttagagccaaaagaaggaactggaacagcacgttagatcagcaatacagcttcccactttggcctcccttgattacttctctttcctttcctttttatagttccacccggacctcaatttaaaaaaaaaaaaaaaaaaaagtcttgcttccaccaggtggctgcaagttatttttgtgtgtccaaaaacctgaaaagaaggctcaacttaaatacttcattcattccaaattcccaattcagaagagaacagttaacagcctcctgttcttctgttaaactcctgctgagttgactaaaaatccagttaatagagtctagtgatttgcctccagtgtgaatattcctgtatcaaaaggcttacaatgatagtgtcacttgccatattgggctgccttgactgcctttggcagaattttccattctgaccatccctggactaaagccagttataccaacaaagctccaggtcttgcccaggatgggagtattattaattaacagatctgtatgccaaccaaggtataaagcccctctcattatttgtgtagaaaaaaagattttttttttagaaaagaacaaataatatgtaaagtaagcaaagttaaatgcatgagttgctttctagtgaaatttctttaaaatcatcttttaaggaagagaaatatcactcccttttgttcagaaaattcattctttgccctaggaaatcatcctgttaaagagaaaagactcagttattaggtgcttcattagtttggggaactctgagttagtgcttctaccggggggtgatttttgtcccacagaggacttttaaccatgtctggagacattcctggttgctacaactcgggggttgggggcatgttactggcatctagcaagcagaggccagtgctgaacctcctgtagtgcacaggacagcccctacagtaaaggatgatccagctcaaaatagcaatagtgtagagagattgaaaaaccatgctctagatgatacttccactgacacaaatcatttgtctttagtgaatggattatttgagtttaaatcatgagcatgatctgtgggactccagtgactgtctctaaaggatattctacctggtagatatctcgggaactcgtctcagaaatccttttgacaagcttcatccaaaaacatgtttttaggagctaaaaaataaaaagcaattattaacacctaattttgccaacttgaacttaacactcacccatctatagttcccatggagcattaatgcttcaacaaaaactcagatcttgtcagttcaatgagtcactacagcctccttctactgaaaggtgccctgtcaacttttcttttttttttttttttgatacggagtctcgctctgtcacccaggctggagtgtagtggcgcaatctctgctcaccacaagctctgcctcctgtgttcacgccattctcctgcctcagcctccctagtagctgggactataggcgcctgccaccatgcccagctaattttttttttttttgtatttttagtagagacagggtttcatcgtgttagccagtatggtctcgatctcctgacctcatgatctgcccccctcggcctcccaaagtgctgggattacaggagtgagccaccatgcctgaccgccctgtcaacttttcaagggacttgtttctttatatcgagcagatgttaggagcataggctttgcagtcagacatttctaagtttaattcctgggtctgccacttactagctgtgtgacatcgggtaagctactttaccctctccaagactcaattttcttttctgtaaaaaaagtggataaaaacagtaggtagctttttgaattaggaggactaaatgaggcgatgcctctaaagcacaaaccacagtgcatggcacatagaaatgactccatgaatatctcttcttattgttgtcgtcatcagtagtggtagtggtgtaaaaaaccaacacacggccgggcgcggtggctcacgcctgtaatcccagcactttgggaggccaaggcgggtggatcacgagatcaggagattgagaccatcctggccaacatggtgaaacctcatctctactaaaaatacaaaaattagctgagcatggcagcgcatgcctgtaatcccagctactccagaggctgaagcaggagaattgcttgaacctgggaggtggaggttgcagtaagccgagatcgtgccactgtactccagcctggcgacaaagctagactctatctaaaaaaataaataaataaaaaacaacacacaccccacaccctttcctaatactaaggtaggctttgcagcggagagaaaagtagcgatacattccacaccaacagggatctttaccagtgatgaaatgatcagaaaacatgatagcaagtagcagagagctcagttgtgccacagtatcgctaaaggaaatctttcttagactaaagtaatatcccagtgagatggaagcctcaaagaaggtgccccaggaggcaggactgggcttaatctacagatgtccaggatttggggaggcgaaagaggcaggagtctatgcttaggcactaagcaaggaaacattattgcttcctttgggagtgtccctgacttaccaacactgtatcttcattagccttaacagagcttctccttggaaatattctttcagaaattacactattcacttttaaacaaaggatggcttcaacccagttatgatgactccaatctaggcatgtaggtacctgctttgtaggcattcgctgctcgagaaacttgagggctaaattctttttatatgcgtgtaattttgtcttttaatgtttgcttcttaaccaggggtatgcatcagaactacatatgtacttttttattttaaaaatgtactcattccagttgtacattaaatattctgattcagtagatctaaggtagggattagacatctgtttttaaaataagttccgagagtttaatctggtcaagaaccactaatttagagcagtggttctccattgtgggtgattttgtcccctacagcacatttggaaatgtctggagacatttttgattggtggcgggagggtgctactggcatctaatggataggcggtgaacatactaccatgaacaagacagcccccccataacaaataattatctgcaaaaatgtcaatagtgctgaggtggctgaaccctgactctaaggataaaagatactgaaatacatgtttatttctgttaatacccttcctactttgtatcttacaagacttcataactttatttattctgtagcaacactgtggagagatgggaagagatagtattattttcattttaagacaggaaacctgaggtccaaaatgaacttgcccagatcctcagggccctttcttctgaaactatggtattttcatccccacctctgagagcactgttattgtctacctaattcaccactagtgtccggcatatgtaagccttcaataaccatttgttaaataggtattgatgacttcctagccctgatagtatcttgtgtagtttgtcaggtatattttcggtttccaattctaactcaaaaacatgaattaagtccttaaagaatctcactgtggatttttgcaattgtcagttgattttttgtaagccttgaaaatatagtattctggttcatgtaatgggtaatgaatcgctttggcccatttgattttttggtgaatttgaagattcattggaaaaccttttctgtttcgacaacttttgaaacaattttgtaaatgttttagttctgttttccaccttattgagcatctgaagccaagtctaatgctctgggtcaagacactttagaactcttgcttcacactacttaaccccaggtgtcactatccagtctcaaagatgttaaaagagtgaattatcaggccaggcgcggtggctcatgcctgtagtaccagcactttgggaggccgaggcaggcaaatcacgaggtcaggagatcgagaccatcctggctaacacggtaaaaccccatctctactaaaaatacaaaaagttagctgggagtgatggcacacacctgtagccccacctactcgggaggctgaggcaggagaatcacttgaacccaggaggcggaggttgcagtgagctgagatcgtgccactgcactccaacctgggtgacagagtgagactccgtctcaaaaaaaaaaagtgaattatccagaattgcactgcgagtaagttccccaactctggatacagtgctctttctgccatactctgtgcctctagaagatggggctacagtgtttgtcagcccaaagcacattctgaaagctgctcttttgatacaaatcccaaagagggcttttagggagagaaaaaaaggcagcattctcctaagaggaaaacacgaggaaagattccaattaattgaagtttctaataaatggctgtttaataataacaattataacatttatttagagttttctaaatgtatattttcctgactgtacattagagatagcagcaccatcttgttaaatgtgttatttcttttaaatcctcttagcagccctaggatataggaaccttcgtgatctccatgttacaggtattgaggccaatgagagccaatattcactgggcactatgtaccaggtactgttctaggcacttaagtgtaataatgcatgtaattttcatgatctccttgtgaggtaggtttttatagatgaagaaattggtttactgagtggcaaactgacttcggcaaattcagaagcctggaaaatagtcctagatccaacctctttctttctgaccacaagaatagccatgtaactataatatcttaggcaaaaactttacactattcaaatatgtgcttcctacccctaaaagcccccactatactgagtgctatgtgtcccaaattcatccactggggttcttactgtaatcactatttccctcatggatcaccgcaggatataagacagaaattgtgattctatgaccctctagctagaacgtggcttattagtcacagcttgtccactaacaatgatgggtgttgcatagctaatcagagagaccccttaatgaaaattcaaccccattagggcaggtcttttcgtgaatgtggggacattgtcactggactcaagctctatgaataccagcagaccctggtcctaaaatgatcccagaaagcacttctgtaacccacttcagggtgataccccatcctcagctgaaagagactacagcgcagtagggaatcttgcataccatatatgcttcaaaatccacttctacctaggcctaactaaggggtaggtctcagctttcagtctatctctccctctgtgttctaagatcttttatcccataagaataaagttttgtggtttatttggggggtaaaatgttggtaacacaatagcattacatcccagacagttaataaatggtttagggtagcagcttaagttccttaagcaaagcttgacacagtggtattattaaataacaatgctcaagattttccaatgaggtactgttgactcttttaacctacctacatagctaagttttcaatggcactatgaggtttcacagattagcaatactttatggaaaggggaggtgagtaatcgacagttatagaataacatggttatacaatctgtgcataatacaaatggagttgcaactaaatcattacgtggtcattatccaataatgcctaagatgtcagcaatgtgaaaatttgagatcaggtatcaccaaagtcctttcttgatttatttctaaccaaagcttacactaaacaatgtgacaaggtgatgaaagagaaaaaaagtaaggaaggaaaagaaaagaggaaagaaagaaaagaaagagaaaggaaggaagaaaggagaaaagaaaaaaagggagttgttttttctcttgaaactttaaagagctttcccgatagatcgtcagctgttagccaactcttgaaagtggcaaatcccttggccattggaaagtggcctatatgcattgtttctaaagagtttgtttattcaaaatatgtctggttttggcattcaggttgggggctcaggggcagtggctgaggtcagcactgcgtaccgtttaatgaagctcactcttgcctgtggtttctgaacaccatcaaatagtggtaactgaggcagaagggtaagtggatgtggacgtgagggaattcttgtaaaggctccccacttggcttacacagaattagagaaatggaggcctgcttgcatttgttggtgcacattagaaataaatttgggcattcaacttaaagaactcgctaacgacaagatgcacaaagaaatgctattatgtatttagcacagtctttgtaagcttagccaggcaaggaggcttatcaaaagaaatatgtaaataacacaacctgctttacaaaggaaaaaagaataaaattaatccaagacattcgtggcgtaatactattttctgccctcggcttttctttttataacttgagacatgcagcctaacagtccagcacaaacaatagcacactccaaaaaaacccagacccggggcatccctccatccctaggaaagaactccaaatgcgtctccagcctcacacacaatattattatgaaatctgacattgtcatagccaaatccttggcttgggcaaagtccccccttccccctcctttggggggaaaagggggaagcgtcaggaggggtgggggaacgaagccaatcaaagttaaaataaagtctctttctagcaagactactgtctataacatgttgttccttatagaaagtgggatatggtggcatttgcttgattaacttgctcgacaaaagtgacagctgctgtgggtgcatgcggataagctgcacggcgcagttccgcctttgtacatctgtcagcaaaaagggaagaataaagagtgaaaagagacaaattggtcccaaaagacactccattcaacttaggaggtttgccccattcaggcgctcgctgtgcgcctcaagtactgagagcttattcaatttcattcactctttcgaatgaacccacaagtgtttaatttcttattctgtcacctcaaaagggtggggggtgtggggaggaagggggagggagccttgtggacgagaagcattgacggcaaggcagagtgatccgggcctcacgtattaactcatggctaatttatgatttaactctctgtgctcaggccctagacccatctgaacacttcaatgggggacctgacgcagacttcttacctcctggctggtggatcccaaaccatctgtagctgtcgagggcacccagcatgttgaatgtgtatcttgtataaggacaatggtctgaggtttgtgccttttacagaaatgagatggctggctccccagggtaaggtttgggtaagtgatctggcaagtgtggtgtgtgtgtgtgcgtgtgtgtgtgtgtgtgtgtgtgtgtgtgtgtgtgttcgttctccctcccataaagagaaaaaaaatagagtcatatgcagtgagaagtagaaagaggagaatacggtttcctgagagtaaaaataaagcaagaggaaagggcgccattggaggcagaacccagctgtacatggtgaaaacacatgttaacttttaaaaagcagcactttgtctttattttcctcattcctgggccccaggcatcagaacctgttttctagactcccttaattgggcagttgctatggacacccaaatattccctcctaggagatcaagatgccctctccatccacctgtgctgcctgccatgctctccccaatctgctgccatcttccctcctccagccttcatgccactctgccttctcttctgaaacccaacacccctcccagctcctggaccaccatctgaatattgtccctgcacccagtccttgtatgttgactgctttttggaaaccactcaatgccatatccagctcctaaaaagatcatgttcttcccttatgagaaatcattccccaaagagctcatgttcattgaattgaaatagatctagtttcaaaactgtctagaggactttggaaagtgttcttaacccagttagagttgttgggtcttattgtcttcaaattctaggattccagacagtaccttttagatggtatatttgtgtcctttcactatctgcttggaaaccagctgtgtggtttaatgtaaagcattccatttacctattcacctgaatttttttccatgtaatagcctggaaattatgtacatacatagaccatgcttttgtatgttgagagtaatgatgaaaaccacctcagcccgggaaagcaactccctaaagtcaatttgaattttcctaagtaagaacttcaactttggctcacaaaactctaatgattcatgactctagaaagtttaatgtgtgcaaattatgaaattagccctaatatgattagccaaccctgttttaagacggcagagttggcactccactttatctttccgttctgtacatgagttactatccttattttagagtatgatttctataatcatttctatatggtatgcaaatttcttattcagttgcttacgtcaatctgcttgcgaattaatgcagttcactctaaatgcagttcccatacctaagaagcgatcaggggagtgggcagatgctgttcgtgaacaatctgaattcagttcatacgctgaatccttctcctacatcttaagttcttgtatgcatatcagagaatagttttcagataaattattcgcactgctcacaaggataatgggtggtaggatgtgccaccaaaactggaattttctttttgacataatcaagctttaaaagattgagacgacttgaaagtgcaaattcagattgtaactatacattttctcaaaacagtaagttcctttgagaggatggaggctaaaggcatgggggtccattttctcagtgcacagggaggcctatgaataaatcccccaacatatccagagaaaaataggccctaggaaaaaggtattgttaacagtggtcagtttgttaatgcccaaactgcacacctgccctgggagacacaggtggcagacaaggcctggttagaagctgattggggcttaatcacattgggctcattatttatgtatcttgaagaaagaaatggtcggaactgagaaattcaggtacataagagagccattccttttctcttacatatcacagtttcccggtttgcttgcagaaagtaaggtgtcagcttctgatgtttgctacaaaaattttctatgtaagtgtcacaaaatcgagttttcctgattttgctgtgatatgtcctgctgttgagccaggggtattagagcagctggtgtctggcccatgttccatttttcattcagggtttgaccattggttacatttttatttaatttcttagacattccgcagtttcagaagttctgttgtgcacaggcaagcacagatctaattttgacatctaagttagattctttctttcaaggcaggagggccttggaggctaatcaaaagagatagaggggggaaggtatattttgatatttgggcaccttgagttcaaaggtgggagggttttgaaggtttttgccttgctcttcatttaagttgatattaatagggcattcatgtagttatagaaaacattatttatcagccgggcttggtggctcacacctataatgccagcactttgggaggctgaggctggtggatcacttgagctcagaagtttgagaccagactgggcaatatggcgaaatcccatctctacaaaaaaataccaaaaaaaaaaaaaaaaaaaaaaatagggcatggtgttgcatacctgtagtcccaactacttggggtgctgaggcaggaggatcacttaagcctgggaggttgaggctgctttaagctgagattgccactgcactccagcctgggtgacaaagtaagaccctgtctcaaaaaaaaaaaaaaaaaaaagagagaaaaaagaaaagaaaaagaaaacatgtaacccatgggcttcccaatctctgaaggctcagaaacaggaaaaatacaataaaaattaaaagccaatttattacatatgaaattacatttccttttcttcctttttcatagagaacaaattcatataaatattatatactatagaaatgtaaaataggatttaacaagtcattacttcttaaggttgttaggagaagtaaatgagtttaagtcatatacactgcttagaatagtgcccgatatataataagtgctcactaaatattttcttttcttttcttttctttttttaagatactaggatctcacttgttgcccaggctggccttaaattcctgggttctagtgatcctcccgcctcaaactcccaagtagctgagactataggcacatgtcattgttctctgcctacttttattattattattgctaggtttttttttgtttgtttgtttgttttagagacagtttcacttcgtcacccaggctggagtgcagtggtgcaatcatagctcacctcagccttggaactcctgacctatagtgatcctcctgcctcagcctcccaaagtgctgggattacagctgtgagtcattgcaatattattaatgtcactatagaacttttttccaaatcagattcaatgagacataaacatcctgagagaatttaatgggtggctcatgaagaatagttcttctgttctggccaggtgcagtggctcacgcctttaatcccaacactttgggaggccgaggcaggtggatcacttgagaccaggagttcaagaccagcctggccaacatagcaaaaccccatctctactaaaaatacaaaaattagccaggtggggtggcacacacctgtaatcccagcaactcaggaggctgaagcctgagaatcgcttgaacctgggaggcagaggctgcagtgagccgagattgcaccactgcactccaccctgggcgtcagagcaagacagtctcaaaaaaaaaaaaaaaaaaaaaaaaaaaagagtaaaagaaaaatagttattgtgttaagtacatttggaaaaacacaaagttaaacggacttctctactacagaacttctcagagcgtttaatatgctaatgtggcacaacaaatcagaatcaccaatagtgttcagacagagtacagcatagagtatgcacacatgtattcacatatacattcacaggccagtgaaaaatgcgaagctagaaaaatgtatgcttagctgggcacggtggtgcacgcctgtagtcccagctacttgggaggctgaggtgggaggatcacctgagcccagggaggttgaggctgcagtgagccgtgatcgcgccactccactccagcctgggtaacagcagcctgggtgatgacagagtaagaccctgtctcagaaaaaaaaaaaaagtatattaatgtcacctttaattcctttttaaaacttagagttaaatccctctgagtagtcattttgtcctgtctgtgtttagcccactgaaatgataaaatagcaatggtcccccaggaagaacctccagttttcctcctaccaatctttgagagaccatagctggagacctgagtgggaaacataacttttcctgcagctgggaggctgctggtctctgatgtacacatgttcttttctttttattgggcattgttcggtgtcttcatgtttttgaaggcgtttcacagcctcaaatccataaacttcagaaccacctcagattcaaaaggtgaaaaggcccttactcaaaatttcaaaacaagttcttattctagacaaagagaggagtcgactctatttggagctttccagtccaagtatatgtcaccgtttaaataaataaaaagacacaaactgtctggattggtttagctgggctgggagccctgtgataagaggtcactggtgtgagttactatggtaattgagtagtatcagcaatagttttgctctcatgagcattaaagcacataataataggcaaacaacagtggttaaagcaagcaggtaggattactatgttcttttgtcagaagtatataatgtcttgtagtcagttttaaagacttctcaacccccaaatccaccccaccgtcacctgctgagtaattttgtgtgcttaatctcctgccctcaactccaagctctctgctaatttgaggcaaatgggtatttctgacattaaatagggcagcaaggaagctctgacctagaaaacccgcattctgaagcactgagaaaaatattctttcaaacaattttgttaagactcttttgaatgacgagggaaaaagaaaaatagctttcactgaaacaggaggttgcagcctcccaaggaagggtattttgcagaacaagaaaaaaggaaagaaaaaagaaagaaagagaaacttgcagagcatccccactcccaacttcccccataaaacttgtcacttcgcattgccatccgctaccccaacaataatcactccgtgcctattgctaattgcaagcacagctgaggcccagcggggaacccttgcacagtctcaggcctttatacgaggctcaatctgttgtatggcacttgttcacacacaaaaaaactaccagcaaaggcagaaagaggcagagtcacaggtttcttgtaatccctctgcctccccgctgacagcccagccctagaagcattcctggttttgtcctcctctttacaaaatctgaagtgaccttaagctacgagcatgtcagcttttgaatgtcgagttgccggcttcttcaggtgcattaaggagttgggggggtgggggctacatctggcttctgcgtgtctgtttgcagcacccctggggcgagctgtggcttcctgtaacatgtaaaatatgagtgtgaactcagggttcatggcaaggaacaggaggtcatgcctccattcagttctaagtaaagaaactgggagtttgcagatgtttttctgtatgtgtaatgacaccaaccccctccccagccaccgagcaaccgagcgccgttttttgataaaatgtgccacaatcagtgtgctacttgcagatttattcatatcaatttttgcaatttatatattcagagacaagattgctatttcggcaactttatgttggatgtcgtacgtgtgcgtgtagagaaagagggaaagaagtatggggcggggagggtgggcagagaaagaaaagaaattaagcctgtgcctcgggccaccagctggggtgttgtcaaggagacaaagcatcagacgggagggtctgtgtcccgcttttgcccagcggtcacttcctgcccagacttggagctgggatatctattgcttctggcccagaggaaggcccatgaatggctactttgaggggagagtgggtttgggggggttgggaacaatcccccagtagacaaggcccaggccacttgaagaaaggccttcccgtcctccctggaggtcaagaacaggtaggcccgagaagagttttgatgtggcctctatttgggcctagtggggggctcccagcccttccttcccaccttgccaccctctgagatgagaagggaattaagcctcctgcaaaattcccacttgcagaaatttctattcccagaccccaaagcctcacactgtattttcaccaacagaagacattggttgggcgaacagggagattaatcctcccaagcctggagaataaatgctcctcagtggggcagtgttaattgctgagcttggtgcaaagatcattttgaggcatttaagaaatacatgatttttattagtataactgttccacgtaggagttatttttcagcaaagggcaaaagctttgcctgccttgcattattagcctaattctacttaattgtttcctaaaataagggcttcctgaacacacattccaaaccttaataagtctgttgtggtgggagtgattctggatggagagctgttgcccttttgggcaactggggtctcagggctgagtattgcttgagcagatctggcttgaaaaattggagcgggggctggtggataagggacaggggagtctctgtgaaaacatatgaggtgatgtggttcacggtgtaaaaaaatgcatccttttcttgttgtttggatccagtcctctatgaggattctcagttctcatctctgggcttcatttaattctatttcacagatttagaaatgttggccccgtggcatgttttaaataaaccaaataaatgactgagcaaatgctaccagatttgttctttgttcttcataatctcaaaattctgtggagccttgagagcttgagaaattgcctcagtcctgggattaaatgaaatgactacactcatcttacaaagatttttttttttttttttaaagtatgtttgggtgtgccagattagaatatgtacattgctacatatctgttctttcttaggcaaagtttcgttttaagtatgggaagtgatttttatttcccatctttcttttaattgtcataaaatcacataacaaaaaatgtactgtcttaaccatctctaagtgtacagttcaatagtattatatagattcacagtgttatgcaaccgatctgtagacgtcgtttcatcttgcaaaactgaaactctcacccattaaacaactcccatttacccctccccttagcccctggtaacactgttctactttctgactgttctagatacctcatataagtggaatcatacagtttttatcttttcgtgactgacttatttcatttagcataatatcttcaagggttatctatattgtagcatgtgacaggatttccttcctttttaaggctgaataatattccattgtatgtatataccccattttgtttacccactcatcctctgatggacacttgggttgcttctaccttccagctattgtgaataaagctgctatgaacatcaatgtgggcgtatctcttctagatcctactttcaatgtttttgcatctatactcaaaagttccacttttgagtaagtataatggtacttactcaggttgtggaaaccggaaaagtggtatttgcttttgggttggaggtagtattcctaactgaaaattcacatcagtgcctctgctttcccatcttgtgccttcgtgtctttaagttggtatcaatgagttgaactttggcttagttttctcctttgaagatggtacaccatttccagcaatatcttatgattattaggaaagatagcctttctgagaccatcacacctcctcactgatgaccacccgccatattgaaaagtgggattgggtaggataaagggggattttgtgacttgttgggttttagacaatcagattgattcagaagcaacatacttacttgtattctggctttggctagctaaaaattccccactagatgtgtcttccagagagagacccctagatagttcatataagctaagctttggattaaactcccctgcttgatttgcttttagaaaggatccttctggactcttgcctccccttgaaatttcccccatgcaacaggactgacttgggttagaaggctgaaatgcattaagtcgggagtctacttgtggattcatccctttaatcattcgttagaaattttgatgctaaagaattacttattacacattttacagagttggaatttggtcattaatagataactgcttatcttaataaaaaatcaagatatttgggaccttcctaagggagttgaaataatgctcccaaatgttaaatcccttataccttcccacagaagcagcaaatattttaagcagtaataatttaaatatatcttttaaattattatgtcttttgcattatctcttcctaatgagaaaaggctaaaggcaaaagaggagctgaattctctcagcagcaggttatagaaagccatagtctctgaaactggttgtagcacgttgtctcagactcctccgtcagtgagtcctcagggagctgccgtccaaactttaggacccggccatcctgaaaagccacagcactgatagctttgtaaagacttcagtggcatgggttttcaggtatccaaagaattacggacgttaaaaaaaaaaaaaaaaaatcctaccctcaactaaaaatgacacttagggcagctgagaaggtcattctgattatctgtaccctctgattttggtgtctgtttagagcttcggtgtctgattatagctttggtgtctgattatagctttgtgctgttagctgcgcgtcctgaagctgtgactgggaaatacccatttctaagagcagttgttttgaagggtgaatcctgaattatagcaacactcaagtaaggcagaagattgtatctttcaacggcatactggttcttgaacgcatttggaggatatgcccttttagaaagtatttgttcagcccttgggaagctttgacaaatctggaaacttgctatgaactgcgtgccgtcctttagtgctttgcccacttggcatagacggcttgaacgtgccagggtttctttgtcagaccctctgtgaatctttgattagaacaccaaatacaaccagatccccggtaatcgttagacctgagagacccagggggctgtggaattttggcttaggctaatgaagctacagggactttggtggaagtgtaaagaaaccctgaatgatgcttttcccatgttcttaaattacccaaattgtaaggaagaaatacgcattgaaagcttcaaacataaaatatttcattacagtatttcaatatagcaattgaaataggttgtaggggttttttcccttaaataatagttcacttttgtcaccaaaaacaaaatgaagaacttagtcacatgggcgtggtcaaagtattatcttcctctttgactccttgccaacaaacaaaatgttatttcattagcccctctaggcaagatgctgtgccagtttctctgaggtgtggctgtgttgggttagagaaagggaactttccagagaaaatataaaaatcctccagcattcagttcaaaaacaccgattggttaccaaacagttaccaaattgcctgcttgctcaggcatttttagaaaaacagaagctgctcaaaaaggtggggtttgtttgtttgtttgtttgttttttcagagacaggggtttgctctgttccccaggctggagtacagtggcacaatcatagcactggaaccccaaacccctgggctcaagcaaccctcccacctcagcctcctgagtagctaggactacaggcacacaccaccatacttggctaatttttaaattttttgtagagacggtgtctcactgtgttgctcaggctggtctcaaactcctggcttcaggtgatcctcccactttagcctcccaaagtgctgggattacaggcactgtgagccactgtgcttggcctgctgctcagaaagttttgtacaaccctgagtagttcacactcaaggagttgtgatttcttatttgggaagcaggttaggacaacatggctcagataataatacccagtacttaggatgtgcctggcactgttataagcactcagcacctaaataactcatttaatcctaagtaggttttattattatctccacttaccagatgaaaaaactgaggcacagcggtgttaggaatttgtcaggatccaaacacaagtggtctgagtcacgtgcattttcttagccacaggttgcactgcctctcagaattttaagtcgatgttccatctcttgctagctgctagaccactttacttctgagtctcagtttcctcatctgtgaagtgaaactatggatgatgataaagattcagccacagcactgtttagaatttagacatgaactgcccaggcatttaatgctttgctttcctaatatagatggcttgaacatgccagtttcaaaggaatacatgtttagaaaagaactaacaatagaactcagttcctagtggatttcaactatcactcaggatggagatatattggactgagtcacaagttttcaatcaaagaaggtgtgtgaaggtgtgtgtttctgcatggtatggttatttgttcttaggccattatttttttaaagagctcatttttatgatattgggtgaaatatttccctcacttacaggcatggggtaacatatcttgttgggagtatgtgtgtgtgtatatatgtatgtgtgtgtgttgctaaaagtgatttactacagtatgtgtgttatacttcaataaaattttcctgtgaagaaaaaagcaacacaggaagaaccgagtttggattagactattttcactggatttgtgactttgcctaaaattcttctcttctagtgcttcctgatgacatctttaatttcacatgagacagttttttcccctgacatgaaaaggctctaccattttgctctccttattcactaaaaattgtaaagcctatgatatgtaatttttcagaaattttgatcaacgttatagcttttgtatctctaaaactctgttaggaatattcaatcattgtgatgaaggaaacttttctagtttcttccactagcaattgatgagttaccaacctaaaatagaagaggaggtaggatgataggggacaagaaaaattatgtcaatgctagtcaagaaatggtagccttcggactcattcacctttttcttatcatttcccttaagagtcagcaatgattgtctctcatccatcagttcttaaggctgttgagtggttttccatggggatgcccccgagtccccacactctgcttagcaactttctatcttcataaaatgtagaatctttccgacaccaagccaagctcaggctctaagagaaacagtttcaacagcgttgtcctacccacacacttctttgagaacttcaaagctgaatgaatttgctttagggacacctaggactagagctgtttctgtgtaaccaatccattacttctataaagtaccaagttgaatgcaaacaacttttatacagatttagtggtaaataaccaacttgaaacttgtcccaccacttactagttgtgtgaccataggctgcttatgtaacctatctatgcccttttctctcatctacaaagcaagactgttaatagtatcaacatcttgagttcaagtcaatgattaaactatataatgcttgtagtatatttcgtgtagtgcctgaacattataagggctccatgttcaatgagtaggcaactattcttatgaattgtacatgcacgtgagtgcatatgggtgtatattaggaatcctgtacaaaatagtactttgctgaaaacagtagactctaaagtcctacggagttgtctggtctgacaggggtttgtgtaagttaaagggataaattactcttgtgacaattgagtatgaaaatacagtcagtggttctatctcctctcagccactactccttgtttccactgccactcatctgtgatatatggcttgttctgaaaacaaatgtaccattaacagtaatgtctttgtaggatatcaaattaacatcaagatgttgggggtcaggaattaagactcatgtaaatgagagtggctatcatgacagaagacataaccgcagtagcaatcattgtagcaacactctatatagctgattagatagtatccagagttaaatgaaagcccattttctgtgaatcctataatgtccagtaaggtgttaattacccatcttctgtctcaagcctaatcccttccagggggtaaagtttccaggggaacagtgaacccaagagcagggctaggaagaggtaagtgagcaacttttctatcacaaaatttaagggagaaccaaaaaatatagtaaccaagataaataacattttaatacaacatttttataaaatcaaaattagtgcaaaaaatccatgatgactgaaatatcaaaattttcattaaagacaagatctgatcctgcacttgtacaaccctgccctactccctcaccctaatcctggccttggtgaacccgaatgttagagaataaatattttatgtttaaggatttctctacatgaagtcagtatgtttgcagggcagaatgggtgacccaagtgtatctgcatattaatgatctaagcttcttactagaaagggaggatcaaaaaaatgtctttctgtcacatattgaaagtatgtccatgggccaggggcagtggctcacacctgtaatcccagcactttgggaagccaagatgggcagatcacctgaggtcaggggttcaagaccagcctggccaacatggcaaaaccccatctctagtaaaagtacaaaaaattagccggacatggtggcttgtacctgtagtcccagctactcaggaggctgaggcaggagaatcacttgaacctgggagacagaggttgcagtgagccaagatcatgccactgcactccagcctgaacacagagcaagactctgtctcaaaaaaagaaaaacaaacaaaaagaaagtatatccatgatgtttctgagaggaataacaacagtgggtaaattttattgagtccttactatgtgacactcactctgctaggccctccacatacatgatttcttttaatgctcacagtaatcccatgaagagagtactggtattaaccccaaaaggagactgaggatcagagaattaagtaatttccttgaggttacccagctaataagtagccagtgtaaggtgaagctgtaactcaccccacagggtttgagaaatcactcattctgtgtctgaatctttttaattcaagacgtaaatctaggtcaatatagtttaaaatgtgctttatgaacccaaagtttgggtgatgatctaccagaaaaaactttacaacacaattgcatggttaaggggctacttgtgtgtcctataaggcatgcatacaattccagaaatattccaatgggaataattttcttcaccaccacatgactttccctggtaacgtgttccactttctcccttgtttttgggaatcttttaggttgagagagggagagaaaaaagagaagaaagatgatgatgatgatgatgatgatgatgatgttgattgcagtggtggaggtggtggtagctaacatttattgaggccttatcatgtgccaaatgctgttgtgagtgctttatgagcatgatttcatttacccatcagaaaaagcctataaaaggctagttagtccccattttcatcaggaaaccgagtctctgagaacataagtaacttgcccaagatcacaaacccaggtggatgttagagcctgtgctcttaaccactacactgtagaaagaagaattaagtggcaaatttttagataagccttccagcttcttttaaatagagccttcagatccagttcagctgctgaagaagttcccacctttccaagggccctgttgtctatgatgggcatccttttgggtgacaagttcaaaaccttcacagaattttccccagagggcatattttaaaggtgcccaggctgttgggggctttatttctttagtgctgtgttttaggattaaagtagctttatttagcaagtttcaaattaatatatttgaattaaagggaggcagtaaaggagtagaaattatacttaaatacttagtacatgtcgtcagcccacaattcttatttctacagacttagagtatattttaccgaaaagttagtgcccaggtgttagggtagctctggaaaaggcatatctgaaccaaggactaaacaaaatagggagcacttaaaatattttattaatttcctcctttgaagatcataacaaatctgctgcattcccatccatctcaaataaagcaaacccgattaataagcactgtgagccccgtgaggaagagcagaacaacccagacaccaaggattgtgctgataaatgtttaatgactggctttctgggagggagaaagccctggtttgtggcatttgccaattcccatgatgaaaaaatcccccacgaaggcctatttctagctatcaatgtgatatccctgaacgcggattcgggaagagatgtgcaagatcggctgtcatgaccggcaaacacactgctccatcccttagggaggaggaacggaagacagtccgctctttcaatgctgtggctatcttggagagctgctgcttccggaggcactcactgtgtgacattggcaagtcacttcacctctctgggcctttgtttcctcctctacaacagataacgtggaagatcccctgtacctctaacattttaaagttctagaaggcattgcctcctgttttttccgacatccaaatgccttgaagcgcctttctggaaaaccaagttagcactgtgctgcatccaaaagtgcctccaatttcatctcctgagcataaggtttggaaaggagtgacttactcccttttgcctctttaaatgtgtagccaatggggcatcatacattttttacacttcttttgctagatgtgagatccaggaaggaaagcatggatgttccagggctttcttgttctcctggggtgggaggctgcgtgtgatgcactgattcattgctgtatgcaatttctacctccctatcctttcggcagccgagcaagattgttgatagtctcctacctttttatttttatttttattttttactactagaagccatttacaagagtgggaactgcttacataaaatggaggggcggcagggggttgcgttattttatttttttttttttttttcctgaaaggtggcacgtctctcagcaaagagaaaaaggcatgttgcacaaggcttgctggcagtgatataagccagcgccggtttgcctgttgtcacagccaaagcaaaatgccacctctgcctagaagccagagtgccacactcctcttttgtgtccctgagatgtacccctcatgaggccctggaattgtaggtttggccaggagtttgccaggattgctcgaaggtcatcttccaatcccaggaggctgggggtaaggggaggttcatcatagttctcaaaatagatctgttgagccccccccccccagattacatgtcagctacaaccagtaaatgtggaatttgaggcctggggttagcacaagagagccctccagttgccaggagtaaggtagggctgccagaataccagtgacccagtgatcaccctgtccctgggccccttcttaacaagcccagatgcagtgacagcaaaagctccagaatcccaaggcaggaggtgccaaaaacaccccccaacaaccattaccaaaaaaaattttcagtaaaatgttctcacccctagaggggaaaacctgtccatgcctgaagcagcttgaccccagcaaacaccctgcctccatggagtgaactgcaaatctccaaaaaaaaaaaaaaaaaaaaaaatctacttcctacccctcctgctccctggggagggacagaaggttcctaaaactgacagtttcgcctccatgatctttaaaagagcagaagctggctgtgaggctgcagtgctgcctcgattggggtagtgtggtctctgttgcggctgggctccaaggagagccacaattggctctgatgaggaaggagcctagaaatgaaagattgcaaagagggcttctgtacgccatggctgagactgtgtcgtttcttgcaaggtgaaacttggcagttctaccttgcaagtaaaaacctaaattaatttttttaaaagaaattaagtcagaaacaaggcttcggaaaaactgtgagtgttaggcataaactgattttggatgatctttaggtgagaaagggtggagttaccatcagaaacatgtttttatttatgcttttcgaatccccactggtgtgcgatgtgtgtgtgcgcgcgcgtgcatgtgcgtgtgtattggttagcgtgagagtatgcatcatctcaattctctaaccatttctttcttttttgcatcttttctgtgcacagttcatatagatcccctataaataaatatataggtccatccacaccttttcattttatttgtaaattgtttggtataagcggcagagcgtaatgaaacctggtgaagtttaaaagattagattttttttatactgacacttcataacactgttcatatgtctccgagtgagatttatgaatatatgagcagtactgcaaaattatactgcaccagagacttcctgcaccacaggggtggcagtctaaagtgacacagcttcaagcatttttcacagacaagaagcaaaatttaacccccttaaggggaagtatgatttcaacagcttgaaatgagctcatttgtagatggtttttttttctctcatcttccataattttttggtgttaagattaaaacagattgcacagccaatataagggcacataagctgcccagagtacagtttggcccttaaagagaaattttcattcattgtctttatcagcactcctcaatcaggtaaatgaagataaacttgcccctaaattcctaaggctctcagcccaatttccagtattgtacttagcagacagggtgtggaattttcaaacggtaagtggcaaggaacatcaattaatccagtggagaagccctcatctctctggcaccaaagacagtgacattaggaaataattaatgtattgaatataaatggtgtaaaattaaccaataaaaaagagaatcagaagagcaaaagatggtctgtatgaattgaaacataggaaatgtctgtcgtggaagagttcaattagattcgaagtcctaactgtcttagattgtctgtcttggattggtccagtacccagtaccttgcaattttgtataaactaactaacgttcattaaactctatgctctcaaattctctttaaccattttgtttcctcctggaacagagtggggtactcaaacattgcctgctctctctctgccctataaatgctccatgatgtgttggctggagaacttttgtctcttttttcagcaatggtacaacagctccatgaacgtgatctgcacctggttgacggaccggatggacttacagcttcatatttatcagttgaaaacactaattaggatggtaaaggtaaaagaaaagattattattcttctttgcaaatagcttactgaaatatatttcactggcaagctgcaaagcttgcttaacacaaagaatattagtttacatataaaatagtatctcatacaagaaaaacctatgcaattgttttgtgatgcatgataaatgtgttactcagacagcaaagggaaatttaatacaaatgaatttgatatctttttccagagaggaaaaatacttggttttgccatacaaaaatacggcagaggccatcgtgtcctttgcattagactttcaaaaactggcttttggtgtcattatgttaatcacatccattaccaatttcatttatagtttaattaaataaaatgttgccgctattaatttaatagaaatatttacccccagctatttctaaatatgtcctgtgatcattatcagaatgcaaatcaatattgttctcatagttaattgaagtagttcgtcttacaatgcgtgtatacaatcaaatgtaaaggatcacaaaggtgagataacataccctgaaagtagctttttcccttgttcttgtgtgtgcaccttggactaatgataattatttcagcgtgaaatctcagtggtttacatgaaataataagatcacagaagggggtaaatacatttttgatcatttcagtttctatttgatgcttcaccatagagggttttaaaacatttgtatgcaaaaatctcattcaaagcacaaagtcctttaaaatattttaacaataaatgtagctgaatgtctatttcttaacagtttgccaaaagtccctgcaacacccactcctgggcaccccccccccccgcccccaccccgtttcttagtctcttttggatcagcaccatttcactttaccccagtgctgacttacaaccaactgctgttccgttgtgtgtaattaaggagaattattattatctgcatttgatctcacaaagcatccacccgggaaaggttatagacagcagtgtattacagctcttaaaaaacgaatgtatacacttagactatggacccagcctcattttcacatttttttacttcagttccttaggaccagctcaatcgtcaagtggtcgcctgaccacttgaattccattttctgtgcataaatgcactttggggaaattgtctgtttgacccttattgggtagacatgaaaagaagatataattgtcatacttaaaaattatcttcccattatttctatttccagattggtgttggaaattaacaatattttatgaaggaaaaatataagtcagaggggaggtttaatcttagccttttgccaaaacaaaaaaaaaaaaatgtggtatgagccacagagaagggatatagaaaagtcactgccaaaggaaccccttcactttagcaaaaagtgggttcagcttaactaatgccacaactcagagctatgaagcagaattcacaaactttaaaccaagaacatcacccagaggcctcctcctccagggcaaatttccaaggataattggctttctttcttgcatcaacagccacttcatttattcacccattcatttattattcagcaagcatttatttattcattcaacattggataaatattaggtgggcctctacttgtatattaccagatggaggattcagaaatgactagatgtggtctctgcacttaggcattgagagtctagttggtatacacgttgctatggaatttgaataaaagggagaatgctcaaatgctttttacctttattttcccccatcatattctggcaacaattatgttattctaagtggcaacagaacaaatgattgaaaagtacaaaaatttaagttaattgtgtagatatctggcccacaccatgcctaacatttattcagtctcttacccgtccccatcaaagtgaaaacacagttcaggtagctgtctagcttcctcctctcagcaagacttgcaggttgatgcatgattgaggataaccttataatttaatgtcaaaccagattacttttttgttattggacttcagtaagctgaactgggttcactcattaactctgtagtcattacaacatgtgaccttcaagaggggttgacattgtgattgttgctatcatgaccgcattagatggactattaaaaatagaaataatgggccgggcacgatggctcacgcccgtaatctcagcactttgggaggccaaggcgggtggatcacaaggtcaggagatcaagaccatcctggccaacatggtgaaaccctgtctctactaaaaatacaaaaattagttgggcatggtggcgggcacctataatcccagctactcaggaggctgaggcaggagaatcgtttgaacccagggggtggaggttgcagtgagccgagatcgatctgctgcactccagcctgggtgacagagcaagatgccatcttgaaaaaaaaaaaaagaaagaaaaaaaaaaagaaagaatgatgggagtggtgttgacgtatgttagcattccttgtcttgcccctttagcaagtttcctatatcaataggagaaacaaacagcagaatcagtagctgaaatgatatgcagtgtgatgaggagagttgtagttagagaccttttaaaaaaacaaaaaaaaaattacaaagtagacaacagctagatgcttctggtcatattcaattaacactgaaggatttctagaaaaacagtccttgagatacctaaggaaatctgagagaaactgcctgaaggaacaaagaaagaacttgtggtgcagtaataccaagccattgttcttgaaaaagagccaaatttcttccctgagaccataaagttgtgaacagaatagatacagttctttcccaaggagagaagaaatgagtcacatgtctgcaacatattgatgaggcattagcgctccatctttctcataattgccactgcctgtaataggtttcatataccaacatacatatgtctgtcttatgaatgagacagagggatatcagtacagcttatgcagttacaagactcaaaaatactaaaacaagactgcaacagaaatcacaaaataccataatcactcaatccattatttatatattatagccccttcctgtgtctatcatattacattacactaacctaagagaaagaaccagtccacaaaaaggaaccaaaacaattatggaacatttccctttatggaactgaataaacacaagcttatgttctttgctttgtctcatctaatatagtttatcctgtcactatttctcattttctgtcattcaaaggatctcagttttcaatacaagtgaaatctaagcacagtggctttttatttgacaatgcataaagtgtgatatttagctgaaggtcagtgctctcccacccacacctgcttttaccttctccctccccatcatggagatgagatctctcttatcactgtatcttttccttccttagaaaacctacagagatttccgattgcaaggggtcctggactccaccttaaacagcaagacctatgaaacgatccggaaccgtctcactgtggaggaagccacagcatcagtgagtgaaggtgggggactgcagggcatcagcatgaaggacagcgatgaggaagacgaagaagacgattagaccatttggtcctagagtctgctgggacagagtcctgtaatcagtgcatgtccttagtctgttagttaaacccattaggaattttctgtcaactaccatgcccatgagatgtttatcaatacaactgccattttagctatgtggtaccaagattagcaaatgaccttcatatccactgatttcctgatgtccatgtctatatgtttacaagcaatatggagcaccattctttaaatactgttcatggagaatacatagtctaaccactaggcgtgtccctgttatcagcaaagatcaatgatgcttcattcatgtactatgtatgcattggtggtaaatggatgtgagggcaagtacatcaagtacattcactctgtttcacgtatgtggatgccagttaattaaatgagtacgtaaataaattaattaaaacacatagatctgctttgtgtttttatttttattttttgaaaaacaaaaggcaagtctccaacaattaacttttgatgctttctgttcccctaaaaccaaaaaatgaaccccttgtgtcgttgttaacccatcctttcatttactcatataattagccaaaaaaaaaaggatggctacataccaatggattgattctcttaattgccacggcaagggggcgatcctatcatgacttaacatcaagcgcgcagttcaaaactactgtcttctgtcaaagttttctcctcttaaatgttattttgcttttacgtctcaactgtgtatgtaaaaaaaacgaatatttaaattacaaccctagactaaaaatgtgtttataataagatgtggatatttccttcagtagattgtaaccataatttaaattattttgttccacactgttttttatatctgtcatgtacattgcattttgatctgtaactgcacaaccctggggtttgctgcagagctatttctttccatgtaaagtagtggatccatcttgcttttgccttatataaagcctacagttatggaagtgtggaaaactgtggcttctcaataaatattcagatgtcctaagaatatacgtttgggtctgtcttcctctgtctactttgaatgccagaactgaaacacaacaagaagaaataggaaaggggagggaagaggtaatttttgtagagtgttcttgaaactgttggagtgggtcgttttcaaatgctcgtagttctccatgagagactgcctaaaattccgttaattcagactccactaattcagaacccgtgggcatttggacatgttggacagattacacttgcattataggataaataagggtttgctaagcaagtaagtagtgtaaacgagagaaatgtttctcctgtacgaagagaaggccaacaaactgtttttaagcaccactttaacagcagtgtttgcattcaaacaaagtgtgtgccaattatatatgattcttatatatttgttaaagcattttaaaagattccctaagatatggagtagtctacttgctcctcaggccctgtcagcaatataatcacctaggtttgtaagaaattaaacattttgtagccttgtttgctttatttgcatctgtcactaaaccaggctgatctttcctggaagctgactgaggctttagggaaacagctacttttccaataggaccaggtagaacggtcgccagttgtcctctacaaaacaaccactttagacaacatgtcttgctctgcttacttgaggcctgcaggtacaaggcaacagtactttctgcctttgtgggcttacaaaaagaggtcctatttattgagcaactatgctatgccaggcattctgcatgtattacctcatttaaatctcacaaccaccataagaggagagaactattgttatcctcattatagattaggaaattaagttcaaaagggttgcgctaacttgcccaatagttaactctatgcagaagcattaatccagaaattagagaataaaactattaatacaaatggtggggatatgtctttcaggtatgacaaaactttgattgcccagggatagacagttaagtcagaatggcacagccaagattttttaaaacatatttttattatattttgagttgcaaaatgaaatcatatatcttgtaacaattaaaatttttttatcttttttttttttttttgagatggagtctctctctgtcgccaggctagagtgcagtggcgcgatctccactcaccgcaacctccacctcccaggttcaagcgattatcttgcctcagcctcccaagtagctggaactacaggtgtgtgccaccatgcccagctaatttgtgtatttttagtagagacggggtttcactatgttagccagactggtctcaaactcctgaccttgtgatcagcccacatcggccccaaagtgctgagattataggtgtgagccaccgcacccggcctacaattttaaaacatgcaaagtaaagagggaatgtctgtctagtgtgtgaaagttagcaaaagaacgaaaatgttcaggagccctggaggaaggctaagtgaatgggttagataactaaccaaagggcacgatgtaaaagtcatgaggaaaactaagccagaaaagactttgtctccaaaaccaaggttaaatttaaaaattccttcaaaaaaagattccactgccttgcactgaggatcctgtaaaatagtacccccagcaaccctaggaaaggggttatgggtaaggaaatgacatcagaacacatcagaaagcaccgaccatgttatccttgaccactgctggcctcagtttattctgaccacaaatgcaaagtcaagaagacagctttgatgttcctttttgtttctttgggatggtatcttgagtgatcgtcttttttcttttttagttttttattatacatacagaaaagtgcatgaattctaagcctacagctcaatgatttatcctaaagtgaacacactcatggaacaactacctagctgagaaatagaacatactgaagacccccgaggaccctatgtccatgccctttcccaaactctacccactccttacaccccaaaggtaaccaccatctgatttctaatggcatagaataccaacttgcctattttaacctttttgtcattgcaatcacagtacatattctttcgtgtctggattcttttacgctacattacattgttggtgtaattttggttcatttattttcattgctgtatagtagtccaaggtataaatagaccataattgatttatccatataaaaatgttgttttacattttcgactattatgaataatgctgccatgaatttccttgtacatatgttttggtgcaattgctgggtcctggagtaaaggtattttccttttcagaagatgtggccagttttccacagaggatgaacaaagttatgctcacaccagcagcaagttaaagtctccgttgttccacatttttgacaacattaagtgttgtcactctaatttttgccattctggtaagtgctgtggtggtttataattgtagttcactagttaccaaatgaagttgattgcctttgaacatgtgtattggtaatttagctagcctcttttgtgaagtgccagtttaagtctttttaaaacatgcaaagtaaaagagggagcatctgtccagtgtataaaagttagcacaagtaggaaaatgttcaggagccctggaggagagctaagtacattttttatttagatagcctcttttgtgaagtgcctgtttaagtctttttttttcttttttttttttttttaataagtggaaaaatttagagctatttgaaggctgataaggaagagaccacaggaaaaagtgccagttagatgtaggaactatcaaggaaattgtgaacctgataggcgttcactttatgaacaattggtccacaaatacttgagtacatactggtcaggcaggcactgtgctaggaacacctggattctttctattccatttcccttcattagccagagagacctttctaaaggcaagtgtgatcccgttcctcctctaattaaaagcctccaattgttctcctctccttagaatgaaacccaaattccttaaggtggcattcaaggccatgaacaatccaacccttgcctacttctccagcctcttctgttaactctactcctcttattcccagggttcatccacacccaccaccttcaacttcctgctgtgcaccgtagttcttcccacctggggcccacctccgaacaacctcatctcatccatcaaatccccactaaactggatctccccaaggaagcctttccaaacaccaccctcagttcagcatctatttccttagtatatatcctcataacagtatctacttctccttcttagcattcacactactcctgaatgggttatgtacactgttacatgtttcatatatcttttctctacttcaggagggtacaggctataccagcttccccactctgtccccaaggtactcaataaatatatgactaataatgaaggctgaaagtacaaggatggagatgatctgttgctattctcgtagaacttatagtataggtagtatgaatcttccaaagacacaaactaaatattataagactcagaggagggagaaggaaaggaaggcttccttgaggagatgggccttaaagagcccataaagaggattgggaaggacaagaacaagaccatggggaggccaggggatgtgccacttggctggaacatagaaatgggaaactattctcttctctggtggattcccagtgcatatagtaaacactcaacatatacatgttaacttaagacattaatgaatatgcccagtgtgttaagagagcctgcttcgtgggaaggcttaggcaagaggttgggagagattgtcatgggaagagtagattgaagtgtcaaaggaggacatttagttccacttagtttgggtttgttggtctgcatagccaagaactaactactatttttaattttttcaaaacatttaaagaaattttttaagttaaaaaaaatcaaatagaacagaattatatgaaacaaaacgttcaagcctcccccccccaacacccatttccccaaagtagccattgctaacagatgggcatatattcttccaaatatgttcaaatcatatacaagtatattggagattttatatatatataaatgatcccaatatataaatgagaatcatcctgagcctactatttggcaaatcacattttccatttatcagtatagataggatcatttgtacctctgcacatatagactttccatatagaccatatagaccacatatagaccagtactttggtaatgggtgtaatgtatttaaggagattttctggtcaaagaagaaacaggagcaaaataagataaactgaaaatctaggatgaaattaggatggatcaaaacataatggaggaaatgagccatctgtggaagtgacccaaaagactgtttgaaaatgtgtgactaaagaatttctgaaacaccccaaatccaatcccagtctaactgcactatatcacagttatctgtttatgtgtctgtctccctgctagactactgccaactagttgaggtcaggcactgtgtatccatttctgtatgccagtctggtgccttgcatgtagtaggcactcaataaatgttggttgaattgaatgggtgcacatcagcaatatacacctgagtatgatcatgaccaagaaaacataaactaaatttattgcaatatattctgtctataaagaaggaattacaaagaagatggggaatcacgatggctttagaaaatctattgacctcacctgaattttcaatgcaggtatgaacaaccatactgtcataaatttgaatttctataaaaattttaggaaatcaacaaaactacaagagttgtatgactagtgtttaagcacaaaattgaataagttcatttcctttaaattttaaaatttaaaataagtgtgttctctttgtggctaacttagacacataattaacaagtctgaaattaagtcaaatgaggcacaattctgtaattcttggtaaacaaatttttaaaaatcaatattcatcttttattcaaggttgttttgcttcttcatttaaatactaaaattatcatctgttttccttcttatgaaaccatgcatttcatctaaagttgtaaatcagcatttgttgtaactaagcaaaacatgagaaaagggctgacgatggtgcaatctgccagcagagttctctaccctgacagtacattgaaggtcaaagaaaaacactgaacaacaaattaatcacagccaccagctaacggagggataaaatgattacaattaatacatacacacaactacaaattaagaggaatgcaaaggcgacaagcaaaaagtacacaaataaaatttttcttatttcctaagaattgatggtgagatggccaaaagcaattgtaaacatggttcagttggcatatttccctctgtccatcaaaaacaagttggcttgtttcctgggcagtgaatacaattgcaaagaataaacaaggctttgcttaaagcaggaaacatgtgattaaagatagtacaaatttcagagaaagtgtcagaaattttggaacgtgtttaaaagaaaatcaaaggcaacataagaagacaaatactggtggtatttggtgcaatgaaaagtacagtttatgtggaagctatggctaggtttcaaattctaatgtcactacattgtaaacaggaccactgaactatgcacctcactcagtcgcctccaacacctcctggaatagggttttgagcatgaaaaattcctccatagtattttttggttcaattagtctaactttgaataaaatttttaaaataagacatcaagattatagattaaaaattccagggcatatgaagggtactgacatcacaatgtatttggaaaatctgaactcttccgagccctaattaaatgacaattaataaacttcaggttgcatctactctttgtcatcttcaaacttccgtaacaaggctgctatacacacagtcttgggttaatattctcttggagagcacaaggaaaagttggtgctgtcctagggaagaaactttcacaaagtgaactgagggcagaggtggaactagagacttaggagttgatcttgaaacaagcactcattcctctcccagtaaattagagaaagatgatctctgagaataaggagggctagatcttgttattacaaaggatggagctcaaaccactctatttaaaatattgaagtaaagatgaaagcaagagaccacaggatttgtagaccattgggcaacaggtatcacaggagtgaatagaaggaagaggttgtgagcataggttctcataggttctggggtcaggatgaccttgatccagatttcagatgatcagtggtaatcattagccacatgaccttgggaaaattacttcatttccctaggcctcagttatctcatctgtaagatataaatagaatcataccctaggtattacccattgttataagctcatcaggttgtcatcaagattaaatgtatttctatgtgtgaagtgctaaaaaaaaaaaaaaaggcacacatgctaagtgctcaacaaatgttagctaatattttactgttaatttctttctctttttttttttttttcttgagacagagtctcactctgttgcccaggttggagtgcagtggcatgatctcagctcactgcaaactctgcctcccagatttaagtgattctcctgcctcagcctcccaagtacctgtgattacaggtgccctccaccatgcttgtctaattttgtatttttagtagagatggggtttcaccatgttgatcaggctggtctcaaactcctgacctaaagtgatccacctgcctggctcccgaagtgttgggattacaggcgtgagccactgcgcctggcctactgttaatttcttaaggatttaagagcctgccacatgtttcaggctttgaacagatgatagatatggccaagtcactacgcttagaaagctgaattctgctactcaccgttcttattccatttcttcccaaaggaacagcacatgatcagtggtggattgggcagcaatgtgttaagcagtgtcaagaaaggtattcttgctacccacttcattttttagcgtttgcttttatgccttgaaagggaagcatttgttccccttgtctacatttcttcacattctcctttacttgtctttgactatggatctcagtaaataattattaaaggaatgaataaataaatgagtttctttccatgtctccccttcttcatcatcactgctttaatttgtgtttccctagaaatagaccctaagaaaagaattctagtgcaagtggtttacttgggaggtgatccaggaaacactaatagaggaatgggggaaaaagattgagaagcaaggcagccactatgggtaactgaagtttgattgctctgggaaaatctgggagccagggtagaacatacttttcagttattcctcctgaggagtgagagagctggggtatttatactccaactctttttcattattggttgaggacagattgggggagagggcaggcaatgttaattttccagcatttcagacttgcagggcagatgggcaaagcagactctgatcatcacagaaagccctaagacaaataagtacaagaacagcaatggtaagtcaagcccagttgcaatgaagtggtaacagaggtgggcaggacaccaacattatctgctacaatcacccttttgcaacccaggacagagtctgtggtcaatgttggcctaagaacagcaagacagaattagcagttctactgccagaagcattgcctggccaggctggatttggaagactctctagggtggtgaaataaattccagccttcaatacagtggaatacaatggagccaggaaaaagaacaaagtagatctatatgcactggtactgaaaaatgttcaagatatattgctgatatttcattaagttaaaaaaaaatcaagaggcagaccagcatttaaagaactctcccatttgtttaaaaaaaaaataagcaaatctatttatgtgtgtgtattttttttttcaataaatcaaatgaacagttatcattttggcttcccagaatccaaatccatggaaactgaagaggaagggatgttccctctccctgcccctgacaactagaatgtgcctaataaccagatgctctagctcagaatcttgactcttgagagaaggaccaaaaggcatggcagcattgaaggacttttcctgggcctcgggatcactgaggggcatccggagactggtgagtgggcccagcagcagcagcccaagcagaattgccctatggttgcttttggctgtgcctcacatcactgttccattggttcctgatggagcctgtgtcccagccttcagccgattctgggagctactgtgtaacctccttttctgctgtcaagttctactgttgagaactgagagcaatggctgatgtaggaaaaaaatttagaagaaactagtaagagtgcttatctctgggaaaggggatggcaaaattcagatggaaaggagatttatttttcagttcaatttatttttaatgttattgtttgattatttcaaccctgtgcatttacaattctttcaaatttaagacattttaaaagattgcattttaaacagctttgcttttaaaaagtgtcccggtcgggtgcagtggctcatgcctgtaatcccggcactttgggaggctgaggcgggcggatcacagggtcaggagttcaagaccagcctggccaacatagtgaaaccccgtctctactaaaaatacaaaaataaaatagctgagcatggtagcgggcgcctgtaatcccagctactcgggaggctgaggcaggagaatcgcgtgaacccgagaggcggaggttgcagtgagccgagatcgtgccactgcactccagcctgggtgacagagactccgtctcaaaaaagaaaaaaaaaaagtgttccaataaaggtggtacccggacaagaaaaatgtagaattaaagtgtagtcctagcaacagacacaggatggaaggttaagtatcaccctctaacctctgctcaggtcctcttacaaagaagagcttcttaacctgaagagtttggctaggactcaagaggttcgtgagcttaaatgggggtggagataggaggcagcaacctacagtagcatttgtagtatttgtgactctgtgaccaatggaaatcagatattttcctatcacattacagttgttatgatttctgagtgataagtgcttctaaattaccttaattattagatctgccactagatcttgtttcatgcattaggaaagacgcataccaaagagatatctgcgctcccttgtttattgtagcattattcacaaaaactaacgtatggaatccaccttagtgcccagcaatagataaatggataaagaaaattggtgtctatataaatggaagactacttagcctttgaaaaaaaggaaattctgtcatttgcaacagcatggatgaactcagaggatattatgctaaatgaaataagccaggcacagaaagacaaatactgtgtgatctcacttatgtgtggaatctaaaaaagtcaaattcatggaagcagagagtagagcaatggttaccaggaacaaggggtaggggatgcagacagatgttagtcaaagggtacagagtttcagttaggcaacatgaataagtttaaaatctaatttaaaaaaaaaaagaggggctgggcacggtggctcacgcctataatcccagcactttgggaggctgaggcaggcggatcacctgaggtcaggagttcgagaccagtctcaacatggagaaaccccacctctactaaaa

SEQ ID NO: 3264 - DNA, 4842 bp, Homo sapiens
agcgagaaggagaaggaagagttggagcggctgcagaaagaggaggaggagaggaagaagaggctgcagctgtatgtgttcgtgatgcgctgcatcgcctacccctttaatgccaagcagcccaccgacatggctcgccggcagcagaagatcagcaaacagcagctgcagacagtcaaggaccggtttcaggctttcctcaatggggaaacccagatcatggctgacgaagccttcatgaacgctgtgcagagttactatgaggtgttcctgaagagcgaccgtgtggcccgcatggttcagagtggaggctgttccgccaacgactcccgggaggtcttcaagaagcacattgagaagagagtgcgcagcctgcctgagattgacggcctcagcaaggagactgtgctgagctcctggatggccaaatttgatgccatctaccgtggagaagaggacccgcggaagcagcaggcccggatgacagccagcgcagcctccgagctgattctgagcaaggagcaactctatgagatgttccagaacattcttgggatcaagaagttcgaacatcagctcctttacaatgcctgccagctggacaatccagatgagcaagcagcccagatcagacgagagctggatggacgtctacaaatggcagaccaaatagccagggaacgcaaatttcccaagtttgtatccaaagaaatggaaaacatgtacattgaggagctgaagtcatctgtcaacctgctcatggccaacttggagagcatgccggtatccaaaggcggggagttcaagctccagaaactcaaacgcagccacaatgcttccatcatcgacatgggcgaggagagtgagaaccagctctccaagtcagatgtcgtgctgtctttctcattggaggtggtaattatggaagtccaaggcctcaaatctttggctccaaatcgcatcgtatattgcacaatggaggtggaaggaggagagaaactacagactgatcaggccgaggcttctaaaccaacctggggcacccagggtgacttctccacaacccatgcactgccagctgtgaaggtgaagctgttcacagagagcacaggcgtcctggcgttggaggacaaggagcttgggcgggttattctccatcccaccccgaacagccccaaacagtcagagtggcacaaaatgacagtctccaaaaactgccccgaccaagatctcaaaatcaaacttgctgtccgaatggataagcctcaaaacatgaagcattctgggtatttatgggccatcggtaagaatgtctggaagagatggaagaaaaggttttttgtattggtgcaggtcagtcagtacacgtttgccatgtgcagttatcgggagaagaaagcggagcctcaggaacttctacaattggatggctacactgtggattacaccgacccccagccaggtttggagggtggccgagccttcttcaatgctgtcaaggagggagacaccgtgatatttgccagtgacgatgaacaagaccgcatcctgtgggtccaggccatgtatcgggccacggggcagtcacacaagcctgtgcccccgacccaagtccagaaactcaacgccaagggaggaaatgtacctcagctggatgcccctatctctcaattttacgcagatagagctcaaaaacatggcatggatgaatttatctcttccaacccctgtaactttgaccacgcttccctctttgagatggtacaacgccttactttggatcacagacttaatgattcctattcttgcctggcaaacgagtattgcgcccgaaatggagtccgggggtgtcaccgacatctctgctacctcagagacttgcttgaacgggcagaaaatggcgccatgatcgaccccacccttcttcactacagctttgccttctgtgcatcccatgtccatgggaacagtcaacaaatgcatgtgtaccttagtgggctgccaccaaatacagaccctgaagggagcaaaactccctccccacctgaaccagaagctaaaaaagataccaaaaaggaatccaaaaaaagaaaagattccaaaacccaggcaaatcaagagctgaaaaggcctgatggaattggaactgtgactgttgaagaaaaggaacgttttgaagaaatcaaagagaggctccgagttctgctagaaaatcagattacacattttaggtattgctttccatttggtcgacctgaaggtgctttgaaagctactctctcactcttggaaagggttttgatgaaagatattgttaccccagtgccacaagaggaggtaaaaacagttatccgtaaatgtctggaacaggctgcgttagtcaactattctcggctctcagagtatgccaaaatcgaagggaaaaagagagaaatgtatgagcatcctgtcttctgcttggcctcccaagtgatggatttaaccattcaaaatgtaggccggttaatcactcctgccaaaaagcttgaagatacaatacgtcttgctgaactagtcattgaagttcttcagcaaaatgaggagcaccacgcagaggcctttgcgtggtggtcagatttaatggtggagcatgcggagacgttcctgtcactctttgcagtagacatggatgcagccttagaggtgcaacctccagacacatgggacagttttccactatttcagctgctgaatgattttctccgtactgactataatttgtgcaatggaaaatttcacaaacacctgcaagacctgtttgccccacttgttgttagatatgtggatctgatggagtcctcaattgcacaatccattcacaggggctttgagcgggagtcatgggaaccagtcaataatgggtcaggcacctcagaagatctgttttggaaacttgacgcccttcagaccttcattcgggacctgcactggcctgaagaagagtttggaaagcacctggaacaacggctgaagttgatggcaagtgacatgatcgaatcttgtgtcaaaagaaccaggattgcatttgaagttaagctgcaaaaaaccagtcgatcaacagattttcgagtcccacagtcaatatgcaccatgtttaatgttatggttgatgccaaagctcaatcaacaaaactttgcagcatggaaatgggccaagagcatcaataccattcaaaaatagacgaactaattgaagaaactgttaaagaaatgataacactcttggttgcaaagttcgttactatcttggaaggagtgctggcaaaattatccagatatgacgaagggactttgttttcttcttttctgtcatttaccgtgaaggcagcttccaaatatgtggatgtacctaaacccgggatggacgtggccgacgcctacgtgactttcgtccgccattctcaggatgtcctgcgtgataaggtcaatgaggagatgtacatagaaaggttatttgatcaatggtacaacagctccatgaacgtgatctgcacctggttgacggaccggatggacttacagcttcatatttatcagttgaaaacactaattaggatggtaaagaaaacctacagagatttccgattgcaaggggtcctggactccaccttaaacagcaagacctatgaaacgatccggaaccgtctcactgtggaggaagccacagcatcagtgagtgaaggtgggggactgcagggcatcagcatgaaggacagcgatgaggaagacgaagaagacgattagaccatttggtcctagagtctgctgggacagagtcctgtaatcagtgcatgtccttagtctgttagttaaacccattaggaattttctgtcaactaccatgcccatgagatgtttatcaatacaactgccattttagctatgtggtaccaagattagcaaatgaccttcatatccactgatttcctgatgtccatgtctatatgtttacaagcaatatggagcaccattctttaaatactgttcatggagaatacatagtctaaccactaggcgtgtccctgttatcagcaaagatcaatgatgcttcattcatgtactatgtatgcattggtggtaaatggatgtgagggcaagtacatcaagtacattcactctgtttcacgtatgtggatgccagttaattaaatgagtacgtaaataaattaattaaaacacatagatctgctttgtgtttttatttttattttttgaaaaacaaaaggcaagtctccaacaattaacttttgatgctttctgttcccctaaaaccaaaaaatgaaccccttgtgtcgttgttaacccatcctttcatttactcatataattagccaaaaaaaaaaggatggctacataccaatggattgattctcttaattgccacggcaagggggcgatcctatcatgacttaacatcaagcgcgcagttcaaaactactgtcttctgtcaaagttttctcctcttaaatgttattttgcttttacgtctcaactgtgtatgtaaaaaaaacgaatatttaaattacaaccctagactaaaaatgtgtttataataagatgtggatatttccttcagtagattgtaaccataatttaaattattttgttccacactgttttttatatctgtcatgtacattgcattttgatctgtaactgcacaaccctggggtttgctgcagagctatttctttccatgtaaagtagtggatccatcttgcttttgccttatataaagcctacagttatggaagtgtggaaaactgtggcttctcaataaatattcagatgtcctaagaatat

SEQ ID NO: 3265 - protein, 1228 aa, Homo sapiens
MRCIAYPFNAKQPTDMARRQQKISKQQLQTVKDRFQAFLNGETQIMADEAFMNAVQSYYEVFLKSDRVARMVQSGGCSANDSREVFKKHIEKRVRSLPEIDGLSKETVLSSWMAKFDAIYRGEEDPRKQQARMTASAASELILSKEQLYEMFQNILGIKKFEHQLLYNACQLDNPDEQAAQIRRELDGRLQMADQIARERKFPKFVSKEMENMYIEELKSSVNLLMANLESMPVSKGGEFKLQKLKRSHNASIIDMGEESENQLSKSDVVLSFSLEVVIMEVQGLKSLAPNRIVYCTMEVEGGEKLQTDQAEASKPTWGTQGDFSTTHALPAVKVKLFTESTGVLALEDKELGRVILHPTPNSPKQSEWHKMTVSKNCPDQDLKIKLAVRMDKPQNMKHSGYLWAIGKNVWKRWKKRFFVLVQVSQYTFAMCSYREKKAEPQELLQLDGYTVDYTDPQPGLEGGRAFFNAVKEGDTVIFASDDEQDRILWVQAMYRATGQSHKPVPPTQVQKLNAKGGNVPQLDAPISQFYADRAQKHGMDEFISSNPCNFDHASLFEMVQRLTLDHRLNDSYSCLANEYCARNGVRGCHRHLCYLRDLLERAENGAMIDPTLLHYSFAFCASHVHGNSQQMHVYLSGLPPNTDPEGSKTPSPPEPEAKKDTKKESKKRKDSKTQANQELKRPDGIGTVTVEEKERFEEIKERLRVLLENQITHFRYCFPFGRPEGALKATLSLLERVLMKDIVTPVPQEEVKTVIRKCLEQAALVNYSRLSEYAKIEGKKREMYEHPVFCLASQVMDLTIQNVGRLITPAKKLEDTIRLAELVIEVLQQNEEHHAEAFAWWSDLMVEHAETFLSLFAVDMDAALEVQPPDTWDSFPLFQLLNDFLRTDYNLCNGKFHKHLQDLFAPLVVRYVDLMESSIAQSIHRGFERESWEPVNNGSGTSEDLFWKLDALQTFIRDLHWPEEEFGKHLEQRLKLMASDMIESCVKRTRIAFEVKLQKTSRSTDFRVPQSICTMFNVMVDAKAQSTKLCSMEMGQEHQYHSKIDELIEETVKEMITLLVAKFVTIGVLAKLSRYDEGTLFSSFLSFTVKAASKYVDVPKPGMDVADAYVTFVRHSQDVLRDKVNEEMYIERLFDQWYNSSMNVICTWLTDRMDLQLHIYQLKTLIRMVKKYDFRLQGVLDSTLNSKTYETIRNRLTVEEATASVSEGGGLQGISMKDSDEEDEEDD

SEQ ID NO: 3266 - DNA, 5068 bp, Homo sapiens
agcgagaaggagaaggaagagttggagcggctgcagaaagaggaggaggagaggaagaagaggctgcagctgtatgtgttcgtgatgcgctgcatcgcctacccctttaatgccaagcagcccaccgacatggctcgccggcagcagaagatcagcaaacagcagctgcagacagtcaaggaccggtttcaggctttcctcaatggggaaacccagatcatggctgacgaagccttcatgaacgctgtgcagagttactatgaggtgttcctgaagagcgaccgtgtggcccgcatggttcagagtggaggctgttccgccaacgactcccgggaggtcttcaagaagcacattgagaagagagtgcgcagcctgcctgagattgacggcctcagcaaggagactgtgctgagctcctggatggccaaatttgatgccatctaccgtggagaagaggacccgcggaagcagcaggcccggatgacagccagcgcagcctccgagctgattctgagcaaggagcaactctatgagatgttccagaacattcttgggatcaagaagttcgaacatcagctcctttacaatgcctgccagctggacaatccagatgagcaagcagcccagatcagacgagagctggatggacgtctacaaatggcagaccaaatagccagggaacgcaaatttcccaagtttgtatccaaagaaatggaaaacatgtacattgaggagctgaagtcatctgtcaacctgctcatggccaacttggagagcatgccggtatccaaaggcggggagttcaagctccagaaactcaaacgcagccacaatgcttccatcatcgacatgggcgaggagagtgagaaccagctctccaagtcagatgtcgtgctgtctttctcattggaggcaatcagctacactatgaggaattgcatcttcgtgctagactggtcccagcatgactggtacaaacctaacagaagccatcagatacctgttggttttctctgtagcttctcatttgtgtattttcctctgggcgatgctgccaggggccttgccaataacctccattatgtggaattctcttttcaggtggtaattatggaagtccaaggcctcaaatctttggctccaaatcgcatcgtatattgcacaatggaggtggaaggaggagagaaactacagactgatcaggccgaggcttctaaaccaacctggggcacccagggtgacttctccacaacccatgcactgccagctgtgaaggtgaagctgttcacagagagcacaggcgtcctggcgttggaggacaaggagcttgggcgggttattctccatcccaccccgaacagccccaaacagtcagagtggcacaaaatgacagtctccaaaaactgccccgaccaagatctcaaaatcaaacttgctgtccgaatggataagcctcaaaacatgaagcattctgggtatttatgggccatcggtaagaatgtctggaagagatggaagaaaaggttttttgtattggtgcaggtcagtcagtacacgtttgccatgtgcagttatcgggagaagaaagcggagcctcaggaacttctacaattggatggctacactgtggattacaccgacccccagccaggtttggagggtggccgagccttcttcaatgctgtcaaggagggagacaccgtgatatttgccagtgacgatgaacaagaccgcatcctgtgggtccaggccatgtatcgggccacggggcagtcacacaagcctgtgcccccgacccaagtccagaaactcaacgccaagggaggaaatgtacctcagctggatgcccctatctctcaattttacgcagatagagctcaaaaacatggcatggatgaatttatctcttccaacccctgtaactttgaccacgcttccctctttgagatggtacaacgccttactttggatcacagacttaatgattcctattcttgcctggcaaggctggttcagtcctggccaggtgtttgtactagacgagtattgcgcccgaaatggagtccgggggtgtcaccgacatctctgctacctcagagacttgcttgaacgggcagaaaatggcgccatgatcgaccccacccttcttcactacagctttgccttctgtgcatcccatgtccatgggaacaggcctgatggaattggaactgtgactgttgaagaaaaggaacgttttgaagaaatcaaagagaggctccgagttctgctagaaaatcagattacacattttaggtattgctttccatttggtcgacctgaaggtgctttgaaagctactctctcactcttggaaagggttttgatgaaagatattgttaccccagtgccacaagaggaggtaaaaacagttatccgtaaatgtctggaacaggctgcgttagtcaactattctcggctctcagagtatgccaaaatcgaagcttcatatgcaaatttgaagctggagcactgcttttttctaatatatattataataatggtgataataataaaatggctttatgaaaatgtaggccggttaatcactcctgccaaaaagcttgaagatacaatacgtcttgctgaactagtcattgaagttcttcagcaaaatgaggagcaccacgcagaggcctttgcgtggtggtcagatttaatggtggagcatgcggagacgttcctgtcactctttgcagtagacatggatgcagccttagaggtgcaacctccagacacatgggacagttttccactatttcagctgctgaatgattttctccgtactgactataatttgtgcaatggaaaatttcacaaacacctgcaagacctgtttgccccacttgttgttagatatgtggatctgatggagtcctcaattgcacaatccattcacaggggctttgagcgggagtcatgggaaccagtcaagagtttaaccagtaacctacccaatgtgaacctacccaatgtgaaccttcccaaagtaccaaatctaccagttaacatccctctaggcatcccacaaatgcctactttttcggcaccgtcatggatggctgctatatatgatgcggataatgggtcaggcacctcagaagatctgttttggaaacttgacgcccttcagaccttcattcgggacctgcactggcctgaagaagagtttggaaagcacctggaacaacggctgaagttgatggcaagtgacatgatcgaatcttgtgtcaaaagaaccaggattgcatttgaagttaagctgcaaaaaaccagtcgatcaacagattttcgagtcccacagtcaatatgcaccatgtttaatgttatggttgatgccaaagctcaatcaacaaaactttgcagcatggaaatgggccaagagcatcaataccattcaaaaatagacgaactaattgaagaaactgttaaagaaatgataacactcttggttgcaaagttcgttactatcttggaaggagtgctggcaaaattatccagatatgacgaagggactttgttttcttcttttctgtcatttaccgtgaaggcagcttccaaatatgtggatgtacctaaacccgggatggacgtggccgacgcctacgtgactttcgtccgccattctcaggatgtcctgcgtgataaggtcaatgaggagatgtacatagaaaggttatttgatcaatggtacaacagctccatgaacgtgatctgcacctggttgacggaccggatggacttacagcttcatatttatcagttgaaaacactaattaggatggtaaagaaaacctacagagatttccgattgcaaggggtcctggactccaccttaaacagcaagacctatgaaacgatccggaaccgtctcactgtggaggaagccacagcatcagtgagtgaaggtgggggactgcagggcatcagcatgaaggacagcgatgaggaagacgaagaagacgattagaccatttggtcctagagtctgctgggacagagtcctgtaatcagtgcatgtccttagtctgttagttaaacccattaggaattttctgtcaactaccatgcccatgagatgtttatcaatacaactgccattttagctatgtggtaccaagattagcaaatgaccttcatatccactgatttcctgatgtccatgtctatatgtttacaagcaatatggagcaccattctttaaatactgttcatggagaatacatagtctaaccactaggcgtgtccctgttatcagcaaagatcaatgatgcttcattcatgtactatgtatgcattggtggtaaatggatgtgagggcaagtacatcaagtacattcactctgtttcacgtatgtggatgccagttaattaaatgagtacgtaaataaattaattaaaacacatagatctgctttgtgtttttatttttattttttgaaaaacaaaaggcaagtctccaacaattaacttttgatgctttctgttcccctaaaaccaaaaaatgaaccccttgtgtcgttgttaacccatcctttcatttactcatataattagccaaaaaaaaaaggatggctacataccaatggattgattctcttaattgccacggcaagggggcgatcctatcatgacttaacatcaagcgcgcagttcaaaactactgtcttctgtcaaagttttctcctcttaaatgttattttgcttttacgtctcaactgtgtatgtaaaaaaaacgaatatttaaattacaaccctagactaaaaatgtgtttataataagatgtggatatttccttcagtagattgtaaccataatttaaattattttgttccacactgttttttatatctgtcatgtacattgcattttgatctgtaactgcacaaccctggggtttgctgcagagctatttctttccatgtaaagtagtggatccatcttgcttttgccttatataaagcctacagttatggaagtgtggaaaactgtggcttctcaataaatattcagatgtcctaagaatat

SEQ ID NO: 3267 - protein, 758 aa, Homo sapiens
MNKTASCGSRPCIGPRGSHTSLCPRPKSRNSTPREEMYLSWMPLSLNFTQIELKNMAWMNLSLPTPVTLTTLPSLRWYNALLWITDLMIPILAWQGWFSPGQVFVLDEYCARNGVRGCHRHLCYLRDLLERAENGAMIDPTLLHYSFAFCASHVHGNRPDGIGTVTVEEKERFEEIKERLRVLLENQITHFRYCFPFGRPEGALKATLSLLERVLMKDIVTPVPQEEVKTVIRKCLEQAALVNYSRLSEYAKIEASYANLKLEHCFFLIYIIIMVIIIKWLYENVGRLITPAKKLEDTIRLAELVIEVLQQNEEHHAEAFAWWSDLMVEHAETFLSLFAVDMDAALEVQPPDTWDSFPLFQLLNDFLRTDYNLCNGKFHKHLQDLFAPLVVRYVDLMESSIAQSIHRGFERESWEPVKSLTSNLPNVNLPNVNLPKVPNLPVNIPLGIPQMPTFSAPSWMAAIYDADNGSGTSEDLFWKLDALQTFIRDLHWPEEEFGKHLEQRLKLMASDMIESCVKRTRIAFEVKLQKTSRSTDFRVPQSICTMFNVMVDAKAQSTKLCSMEMGQEHQYHSKIDELIEETVKEMITLLVAKFVTIGVLAKLSRYDEGTLFSSFLSFTVKAASKYVDVPKPGMDVADAYVTFVRHSQDVLRDKVNEEMYIERLFDQWYNSSMNVICTWLTDRMDLQLHIYQLKTLIRMVKKYDFRLQGVLDSTLNSKTYETIRNRLTVEEATASVSEGGGLQGISMKDSDEEDEEDD

SEQ ID NO: 3268 - DNA, 4816 bp, Homo sapiens
agcgagaaggagaaggaagagttggagcggctgcagaaagaggaggaggagaggaagaagaggctgcagctgtatgtgttcgtgatgcgctgcatcgcctacccctttaatgccaagcagcccaccgacatggctcgccggcagcagaagatcagcaaacagcagctgcagacagtcaaggaccggtttcaggctttcctcaatggggaaacccagatcatggctgacgaagccttcatgaacgctgtgcagagttactatgaggtgttcctgaagagcgaccgtgtggcccgcatggttcagagtggaggctgttccgccaacgactcccgggaggtcttcaagaagcacattgagaagagagtgcgcagcctgcctgagattgacggcctcagcaaggagactgtgctgagctcctggatggccaaatttgatgccatctaccgtggagaagaggacccgcggaagcagcaggcccggatgacagccagcgcagcctccgagctgattctgagcaaggagcaactctatgagatgttccagaacattcttgggatcaagaagttcgaacatcagctcctttacaatgcctgccagctggacaatccagatgagcaagcagcccagatcagacgagagctggatggacgtctacaaatggcagaccaaatagccagggaacgcaaatttcccaagtttgtatccaaagaaatggaaaacatgtacattgaggagctgaagtcatctgtcaacctgctcatggccaacttggagagcatgccggtatccaaaggcggggagttcaagctccagaaactcaaacgcagccacaatgcttccatcatcgacatgggcgaggagagtgagaaccagctctccaagtcagatgtcgtgctgtctttctcattggaggtggtaattatggaagtccaaggcctcaaatctttggctccaaatcgcatcgtatattgcacaatggaggtggaaggaggagagaaactacagactgatcaggccgaggcttctaaaccaacctggggcacccagggtgacttctccacaacccatgcactgccagctgtgaaggtgaagctgttcacagagagcacaggcgtcctggcgttggaggacaaggagcttgggcgggttattctccatcccaccccgaacagccccaaacagtcagagtggcacaaaatgacagtctccaaaaactgccccgaccaagatctcaaaatcaaacttgctgtccgaatggataagcctcaaaacatgaagcattctgggtatttatgggccatcggtaagaatgtctggaagagatggaagaaaaggttttttgtattggtgcaggtcagtcagtacacgtttgccatgtgcagttatcgggagaagaaagcggagcctcaggaacttctacaattggatggctacactgtggattacaccgacccccagccaggtttggagggtggccgagccttcttcaatgctgtcaaggagggagacaccgtgatatttgccagtgacgatgaacaagaccgcatcctgtgggtccaggccatgtatcgggccacggggcagtcacacaagcctgtgcccccgacccaagtccagaaactcaacgccaagggaggaaatgtacctcagctggatgcccctatctctcaattttacgcagatagagctcaaaaacatggcatggatgaatttatctcttccaacccctgtaactttgaccacgcttccctctttgagatggtacaacgccttactttggatcacagacttaatgattcctattcttgcctggcaaggctggttcagtcctggccaggtgtttgtactagacgagtattgcgcccgaaatggagtccgggggtgtcaccgacatctctgctacctcagagacttgcttgaacgggcagaaaatggcgccatgatcgaccccacccttcttcactacagctttgccttctgtgcatcccatgtccatgggaacaggcctgatggaattggaactgtgactgttgaagaaaaggaacgttttgaagaaatcaaagagaggctccgagttctgctagaaaatcagattacacattttaggtattgctttccatttggtcgacctgaaggtgctttgaaagctactctctcactcttggaaagggttttgatgaaagatattgttaccccagtgccacaagaggaggtaaaaacagttatccgtaaatgtctggaacaggctgcgttagtcaactattctcggctctcagagtatgccaaaatcgaagaaaatgtaggccggttaatcactcctgccaaaaagcttgaagatacaatacgtcttgctgaactagtcattgaagttcttcagcaaaatgaggagcaccacgcagagccacatgttgataaaggagaagcctttgcgtggtggtcagatttaatggtggagcatgcggagacgttcctgtcactctttgcagtagacatggatgcagccttagaggtgcaacctccagacacatgggacagttttccactatttcagctgctgaatgattttctccgtactgactataatttgtgcaatggaaaatttcacaaacacctgcaagacctgtttgccccacttgttgttagatatgtggatctgatggagtcctcaattgcacaatccattcacaggggctttgagcgggagtcatgggaaccagtcaagagtttaaccagtaacctacccaatgtgaacctacccaatgtgaaccttcccaaagtaccaaatctaccagttaacatccctctaggcatcccacaaatgcctactttttcggcaccgtcatggatggctgctatatatgatgcggataatgggtcaggcacctcagaagatctgttttggaaacttgacgcccttcagaccttcattcgggacctgcactggcctgaagaagagtttggaaagcacctggaacaacggctgaagttgatggcaagtgacatgatcgaatcttgtgtcaaaagaaccaggattgcatttgaagttaagctgcaaaaaaccagtcgatcaacagattttcgagtcccacagtcaatatgcaccatgtttaatgttatggttgatgccaaagctcaatcaacaaaactttgcagcatggaaatgggccaagagcatcaataccattcaaaaatagacgaactaattgaagaaactgttaaagaaatgataacactcttggttgcaaagttcgttactatcttggaaggagtgctggcaaaattatccagatatgacgaagggactttgttttcttcttttctgtcatttaccgtgaaggcagcttccaaatatgtggatgtacctaaacccgggatggacgtggccgacgcctacgtgactttcgtccgccattctcaggatgtcctgcgtgataaggtcaatgaggagatgtacatagaaaggttatttgatcaatggtacaacagctccatgaacgtgatctgcacctggttgacggaccggatggacttacagcttcatatttatcagttgaaaacactaattaggatggtaaagaaaacctacagagatttccgattgcaaggggtcctggactccaccttaaacagcaagacctatgaaacgatccggaaccgtctcactgtggaggaagccacagcatcagtgagtgaaggtgggggactgcagggcatcagcatgaaggacagcgatgaggaagacgaagaagacgattagaccatttggtcctagagtctgctgggacagagtcctgtaatcagtgcatgtccttagtctgttagttaaacccattaggaattttctgtcaactaccatgcccatgagatgtttatcaatacaactgccattttagctatgtggtaccaagattagcaaatgaccttcatatccactgatttcctgatgtccatgtctatatgtttacaagcaatatggagcaccattctttaaatactgttcatggagaatacatagtctaaccactaggcgtgtccctgttatcagcaaagatcaatgatgcttcattcatgtactatgtatgcattggtggtaaatggatgtgagggcaagtacatcaagtacattcactctgtttcacgtatgtggatgccagttaattaaatgagtacgtaaataaattaattaaaacacatagatctgctttgtgtttttatttttattttttgaaaaacaaaaggcaagtctccaacaattaacttttgatgctttctgttcccctaaaaccaaaaaatgaaccccttgtgtcgttgttaacccatcctttcatttactcatataattagccaaaaaaaaaaggatggctacataccaatggattgattctcttaattgccacggcaagggggcgatcctatcatgacttaacatcaagcgcgcagttcaaaactactgtcttctgtcaaagttttctcctcttaaatgttattttgcttttacgtctcaactgtgtatgtaaaaaaaacgaatatttaaattacaaccctagactaaaaatgtgtttataataagatgtggatatttccttcagtagattgtaaccataatttaaattattttgttccacactgttttttatatctgtcatgtacattgcattttgatctgtaactgcacaaccctggggtttgctgcagagctatttctttccatgtaaagtagtggatccatcttgcttttgccttatataaagcctacagttatggaagtgtggaaaactgtggcttctcaataaatattcagatgtcctaagaatat

SEQ ID NO: 3269 - protein, 737 aa, Homo sapiens
MNKTASCGSRPCIGPRGSHTSLCPRPKSRNSTPREEMYLSWMPLSLNFTQIELKNMAWMNLSLPTPVTLTTLPSLRWYNALLWITDLMIPILAWQGWFSPGQVFVLDEYCARNGVRGCHRHLCYLRDLLERAENGAMIDPTLLHYSFAFCASHVHGNRPDGIGTVTVEEKERFEEIKERLRVLLENQITHFRYCFPFGRPEGALKATLSLLERVLMKDIVTPVPQEEVKTVIRKCLEQAALVNYSRLSEYAKIEENVGRLITPAKKLEDTIRLAELVIEVLQQNEEHHAEPHVDKGEAFAWWSDLMVEHAETFLSLFAVDMDAALEVQPPDTWDSFPLFQLLNDFLRTDYNLCNGKFHKHLQDLFAPLVVRYVDLMESSIAQSIHRGFERESWEPVKSLTSNLPNVNLPNVNLPKVPNLPVNIPLGIPQMPTFSAPSWMAAIYDADNGSGTSEDLFWKLDALQTFIRDLHWPEEEFGKHLEQRLKLMASDMIESCVKRTRIAFEVKLQKTSRSTDFRVPQSICTMFNVMVDAKAQSTKLCSMEMGQEHQYHSKIDELIEETVKEMITLLVAKFVTIGVLAKLSRYDEGTLFSSFLSFTVKAASKYVDVPKPGMDVADAYVTFVRHSQDVLRDKVNEEMYIERLFDQWYNSSMNVICTWLTDRMDLQLHIYQLKTLIRMVKKYDFRLQGVLDSTLNSKTYETIRNRLTVEEATASVSEGGGLQGISMKDSDEEDEEDD

SEQ ID NO: 3270 - DNA, 4648 bp, Homo sapiens
agcgagaaggagaaggaagagttggagcggctgcagaaagaggaggaggagaggaagaagaggctgcagctgtatgtgttcgtgatgcgctgcatcgcctacccctttaatgccaagcagcccaccgacatggctcgccggcagcagaagatcagcaaacagcagctgcagacagtcaaggaccggtttcaggctttcctcaatggggaaacccagatcatggctgacgaagccttcatgaacgctgtgcagagttactatgaggtgttcctgaagagcgaccgtgtggcccgcatggttcagagtggaggctgttccgccaacgactcccgggaggtcttcaagaagcacattgagaagagagtgcgcagcctgcctgagattgacggcctcagcaaggagactgtgctgagctcctggatggccaaatttgatgccatctaccgtggagaagaggacccgcggaagcagcaggcccggatgacagccagcgcagcctccgagctgattctgagcaaggagcaactctatgagatgttccagaacattcttgggatcaagaagttcgaacatcagctcctttacaatgcctgccagctggacaatccagatgagcaagcagcccagatcagacgagagctggatggacgtctacaaatggcagaccaaatagccagggaacgcaaatttcccaagtttgtatccaaagaaatggaaaacatgtacattgaggagctgaagtcatctgtcaacctgctcatggccaacttggagagcatgccggtatccaaaggcggggagttcaagctccagaaactcaaacgcagccacaatgcttccatcatcgacatgggcgaggagagtgagaaccagctctccaagtcagatgtcgtgctgtctttctcattggaggtggtaattatggaagtccaaggcctcaaatctttggctccaaatcgcatcgtatattgcacaatggaggtggaaggaggagagaaactacagactgatcaggccgaggcttctaaaccaacctggggcacccagggtgacttctccacaacccatgcactgccagctgtgaaggtgaagctgttcacagagagcacaggcgtcctggcgttggaggacaaggagcttgggcgggttattctccatcccaccccgaacagccccaaacagtcagagtggcacaaaatgacagtctccaaaaactgccccgaccaagatctcaaaatcaaacttgctgtccgaatggataagcctcaaaacatgaagcattctgggtatttatgggccatcggtaagaatgtctggaagagatggaagaaaaggttttttgtattggtgcaggtcagtcagtacacgtttgccatgtgcagttatcgggagaagaaagcggagcctcaggaacttctacaattggatggctacactgtggattacaccgacccccagccaggtttggagggtggccgagccttcttcaatgctgtcaaggagggagacaccgtgatatttgccagtgacgatgaacaagaccgcatcctgtgggtccaggccatgtatcgggccacggggcagtcacacaagcctgtgcccccgacccaagtccagaaactcaacgccaagggaggaaatgtacctcagctggatgcccctatctctcaattttacgcagatagagctcaaaaacatggcatggatgaatttatctcttccaacccctgtaactttgaccacgcttccctctttgagatggtacaacgccttactttggatcacagacttaatgattcctattcttgcctggcaaggctggttcagtcctggccaggtgtttgtactagacgagtattgcgcccgaaatggagtccgggggtgtcaccgacatctctgctacctcagagacttgcttgaacgggcagaaaatggcgccatgatcgaccccacccttcttcactacagctttgccttctgtgcatcccatgtccatgggaacaggcctgatggaattggaactgtgactgttgaagaaaaggaacgttttgaagaaatcaaagagaggctccgagttctgctagaaaatcagattacacattttaggtattgctttccatttggtcgacctgaaggtgctttgaaagctactctctcactcttggaaagggttttgatgaaagatattgttaccccagtgccacaagaggaggtaaaaacagttatccgtaaatgtctggaacaggctgcgttagtcaactattctcggctctcagagtatgccaaaatcgaagaaaatgtaggccggttaatcactcctgccaaaaagcttgaagatacaatacgtcttgctgaactagtcattgaagttcttcagcaaaatgaggagcaccacgcagaggcctttgcgtggtggtcagatttaatggtggagcatgcggagacgttcctgtcactctttgcagtagacatggatgcagccttagaggtgcaacctccagacacatgggacagttttccactatttcagctgctgaatgattttctccgtactgactataatttgtgcaatggaaaatttcacaaacacctgcaagacctgtttgccccacttgttgttagatatgtggatctgatggagtcctcaattgcacaatccattcacaggggctttgagcgggagtcatgggaaccagtcaataatgggtcaggcacctcagaagatctgttttggaaacttgacgcccttcagaccttcattcgggacctgcactggcctgaagaagagtttggaaagcacctggaacaacggctgaagttgatggcaagtgacatgatcgaatcttgtgtcaaaagaaccaggattgcatttgaagttaagctgcaaaaaaccagtcgatcaacagattttcgagtcccacagtcaatatgcaccatgtttaatgttatggttgatgccaaagctcaatcaacaaaactttgcagcatggaaatgggccaagagcatcaataccattcaaaaatagacgaactaattgaagaaactgttaaagaaatgataacactcttggttgcaaagttcgttactatcttggaaggagtgctggcaaaattatccagatatgacgaagggactttgttttcttcttttctgtcatttaccgtgaaggcagcttccaaatatgtggatgtacctaaacccgggatggacgtggccgacgcctacgtgactttcgtccgccattctcaggatgtcctgcgtgataaggtcaatgaggagatgtacatagaaaggttatttgatcaatggtacaacagctccatgaacgtgatctgcacctggttgacggaccggatggacttacagcttcatatttatcagttgaaaacactaattaggatggtaaagaaaacctacagagatttccgattgcaaggggtcctggactccaccttaaacagcaagacctatgaaacgatccggaaccgtctcactgtggaggaagccacagcatcagtgagtgaaggtgggggactgcagggcatcagcatgaaggacagcgatgaggaagacgaagaagacgattagaccatttggtcctagagtctgctgggacagagtcctgtaatcagtgcatgtccttagtctgttagttaaacccattaggaattttctgtcaactaccatgcccatgagatgtttatcaatacaactgccattttagctatgtggtaccaagattagcaaatgaccttcatatccactgatttcctgatgtccatgtctatatgtttacaagcaatatggagcaccattctttaaatactgttcatggagaatacatagtctaaccactaggcgtgtccctgttatcagcaaagatcaatgatgcttcattcatgtactatgtatgcattggtggtaaatggatgtgagggcaagtacatcaagtacattcactctgtttcacgtatgtggatgccagttaattaaatgagtacgtaaataaattaattaaaacacatagatctgctttgtgtttttatttttattttttgaaaaacaaaaggcaagtctccaacaattaacttttgatgctttctgttcccctaaaaccaaaaaatgaaccccttgtgtcgttgttaacccatcctttcatttactcatataattagccaaaaaaaaaaggatggctacataccaatggattgattctcttaattgccacggcaagggggcgatcctatcatgacttaacatcaagcgcgcagttcaaaactactgtcttctgtcaaagttttctcctcttaaatgttattttgcttttacgtctcaactgtgtatgtaaaaaaaacgaatatttaaattacaaccctagactaaaaatgtgtttataataagatgtggatatttccttcagtagattgtaaccataatttaaattattttgttccacactgttttttatatctgtcatgtacattgcattttgatctgtaactgcacaaccctggggtttgctgcagagctatttctttccatgtaaagtagtggatccatcttgcttttgccttatataaagcctacagttatggaagtgtggaaaactgtggcttctcaataaatattcagatgtcctaagaatat

SEQ ID NO: 3271 - protein, 681 aa, Homo sapiens
MNKTASCGSRPCIGPRGSHTSLCPRPKSRNSTPREEMYLSWMPLSLNFTQIELKNMAWMNLSLPTPVTLTTLPSLRWYNALLWITDLMIPILAWQGWFSPGQVFVLDEYCARNGVRGCHRHLCYLRDLLERAENGAMIDPTLLHYSFAFCASHVHGNRPDGIGTVTVEEKERFEEIKERLRVLLENQITHFRYCFPFGRPEGALKATLSLLERVLMKDIVTPVPQEEVKTVIRKCLEQAALVNYSRLSEYAKIEENVGRLITPAKKLEDTIRLAELVIEVLQQNEEHHAEAFAWWSDLMVEHAETFLSLFAVDMDAALEVQPPDTWDSFPLFQLLNDFLRTDYNLCNGKFHKHLQDLFAPLVVRYVDLMESSIAQSIHRGFERESWEPVNNGSGTSEDLFWKLDALQTFIRDLHWPEEEFGKHLEQRLKLMASDMIESCVKRTRIAFEVKLQKTSRSTDFRVPQSICTMFNVMVDAKAQSTKLCSMEMGQEHQYHSKIDELIEETVKEMITLLVAKFVTIGVLAKLSRYDEGTLFSSFLSFTVKAASKYVDVPKPGMDVADAYVTFVRHSQDVLRDKVNEEMYIERLFDQWYNSSMNVICTWLTDRMDLQLHIYQLKTLIRMVKKYDFRLQGVLDSTLNSKTYETIRNRLTVEEATASVSEGGGLQGISMKDSDEEDEEDD

SEQ ID NO: 3272 - DNA, 4864 bp, Homo sapiens
agcgagaaggagaaggaagagttggagcggctgcagaaagaggaggaggagaggaagaagaggctgcagctgtatgtgttcgtgatgcgctgcatcgcctacccctttaatgccaagcagcccaccgacatggctcgccggcagcagaagatcagcaaacagcagctgcagacagtcaaggaccggtttcaggctttcctcaatggggaaacccagatcatggctgacgaagccttcatgaacgctgtgcagagttactatgaggtgttcctgaagagcgaccgtgtggcccgcatggttcagagtggaggctgttccgccaacgactcccgggaggtcttcaagaagcacattgagaagagagtgcgcagcctgcctgagattgacggcctcagcaaggagactgtgctgagctcctggatggccaaatttgatgccatctaccgtggagaagaggacccgcggaagcagcaggcccggatgacagccagcgcagcctccgagctgattctgagcaaggagcaactctatgagatgttccagaacattcttgggatcaagaagttcgaacatcagctcctttacaatgcctgccagctggacaatccagatgagcaagcagcccagatcagacgagagctggatggacgtctacaaatggcagaccaaatagccagggaacgcaaatttcccaagtttgtatccaaagaaatggaaaacatgtacattgaggagctgaagtcatctgtcaacctgctcatggccaacttggagagcatgccggtatccaaaggcggggagttcaagctccagaaactcaaacgcagccacaatgcttccatcatcgacatgggcgaggagagtgagaaccagctctccaagtcagatgtcgtgctgtctttctcattggaggtggtaattatggaagtccaaggcctcaaatctttggctccaaatcgcatcgtatattgcacaatggaggtggaaggaggagagaaactacagactgatcaggccgaggcttctaaaccaacctggggcacccagggtgacttctccacaacccatgcactgccagctgtgaaggtgaagctgttcacagagagcacaggcgtcctggcgttggaggacaaggagcttgggcgggttattctccatcccaccccgaacagccccaaacagtcagagtggcacaaaatgacagtctccaaaaactgccccgaccaagatctcaaaatcaaacttgctgtccgaatggataagcctcaaaacatgaagcattctgggtatttatgggccatcggtaagaatgtctggaagagatggaagaaaaggttttttgtattggtgcaggtcagtcagtacacgtttgccatgtgcagttatcgggagaagaaagcggagcctcaggaacttctacaattggatggctacactgtggattacaccgacccccagccaggtttggagggtggccgagccttcttcaatgctgtcaaggagggagacaccgtgatatttgccagtgacgatgaacaagaccgcatcctgtgggtccaggccatgtatcgggccacggggcagtcacacaagcctgtgcccccgacccaagtccagaaactcaacgccaagggaggaaatgtacctcagctggatgcccctatctctcaattttacgcagatagagctcaaaaacatggcatggatgaatttatctcttccaacccctgtaactttgaccacgcttccctctttgagatggtacaacgccttactttggatcacagacttaatgattcctattcttgcctggcaaggctggttcagtcctggccaggtgtttgtactagacgagtattgcgcccgaaatggagtccgggggtgtcaccgacatctctgctacctcagagacttgcttgaacgggcagaaaatggcgccatgatcgaccccacccttcttcactacagctttgccttctgtgcatcccatgtccatgggaacaggcctgatggaattggaactgtgactgttgaagaaaaggaacgttttgaagaaatcaaagagaggctccgagttctgctagaaaatcagattacacattttaggtattgctttccatttggtcgacctgaaggtgctttgaaagctactctctcactcttggaaagggttttgatgaaagatattgttaccccagtgccacaagaggaggtaaaaacagttatccgtaaatgtctggaacaggctgcgttagtcaactattctcggctctcagagtatgccaaaatcgaagggaaaaagagagaaatgtatgagcatcctgtcttctgcttggcctcccaagtgatggatttaaccattcaaaatgtaggccggttaatcactcctgccaaaaagcttgaagatacaatacgtcttgctgaactagtcattgaagttcttcagcaaaatgaggagcaccacgcagaggcctttgcgtggtggtcagatttaatggtggagcatgcggagacgttcctgtcactctttgcagtagacatggatgcagccttagaggtgcaacctccagacacatgggacagttttccactatttcagctgctgaatgattttctccgtactgactataatttgtgcaatggaaaatttcacaaacacctgcaagacctgtttgccccacttgttgttagatatgtggatctgatggagtcctcaattgcacaatccattcacaggggctttgagcgggagtcatgggaaccagtcaagagtttaaccagtaacctacccaatgtgaacctacccaatgtgaaccttcccaaagtaccaaatctaccagttaacatccctctaggcatcccacaaatgcctactttttcggcaccgtcatggatggctgctatatatgatgcggataatgggtcaggcacctcagaagatctgttttggaaacttgacgcccttcagaccttcattcgggacctgcactggcctgaagaagagtttggaaagcacctggaacaacggctgaagttgatggcaagtgacatgatcgaatcttgtgtcaaaagaaccaggattgcatttgaagttaagctgcaaaaaaccagtcgatcaacagattttcgagtcccacagtcaatatgcaccatgtttaatgttatggttgatgccaaagctcaatcaacaaaactttgcagcatggaaatgggccaagagcatcaataccattcaaaaatagacgaactaattgaagaaactgttaaagaaatgataacactcttggttgcaaagttcgttactatcttggaaggagtgctggcaaaattatccagatatgacgaagggactttgttttcttcttttctgtcatttaccgtgaaggcagcttccaaatatgtggatgtacctaaacccgggatggacgtggccgacgcctacgtgactttcgtccgccattctcaggatgtcctgcgtgataaggtcaatgaggagatgtacatagaaaggttatttgatcaatggtacaacagctccatgaacgtgatctgcacctggttgacggaccggatggacttacagcttcatatttatcagttgaaaacactaattaggatggtaaagaaaacctacagagatttccgattgcaaggggtcctggactccaccttaaacagcaagacctatgaaacgatccggaaccgtctcactgtggaggaagccacagcatcagtgagtgaaggtgggggactgcagggcatcagcatgaaggacagcgatgaggaagacgaagaagacgattagaccatttggtcctagagtctgctgggacagagtcctgtaatcagtgcatgtccttagtctgttagttaaacccattaggaattttctgtcaactaccatgcccatgagatgtttatcaatacaactgccattttagctatgtggtaccaagattagcaaatgaccttcatatccactgatttcctgatgtccatgtctatatgtttacaagcaatatggagcaccattctttaaatactgttcatggagaatacatagtctaaccactaggcgtgtccctgttatcagcaaagatcaatgatgcttcattcatgtactatgtatgcattggtggtaaatggatgtgagggcaagtacatcaagtacattcactctgtttcacgtatgtggatgccagttaattaaatgagtacgtaaataaattaattaaaacacatagatctgctttgtgtttttatttttattttttgaaaaacaaaaggcaagtctccaacaattaacttttgatgctttctgttcccctaaaaccaaaaaatgaaccccttgtgtcgttgttaacccatcctttcatttactcatataattagccaaaaaaaaaaggatggctacataccaatggattgattctcttaattgccacggcaagggggcgatcctatcatgacttaacatcaagcgcgcagttcaaaactactgtcttctgtcaaagttttctcctcttaaatgttattttgcttttacgtctcaactgtgtatgtaaaaaaaacgaatatttaaattacaaccctagactaaaaatgtgtttataataagatgtggatatttccttcagtagattgtaaccataatttaaattattttgttccacactgttttttatatctgtcatgtacattgcattttgatctgtaactgcacaaccctggggtttgctgcagagctatttctttccatgtaaagtagtggatccatcttgcttttgccttatataaagcctacagttatggaagtgtggaaaactgtggcttctcaataaatattcagatgtcctaagaatat

SEQ ID NO: 3273 - protein, 753 aa, Homo sapiens
MNKTASCGSRPCIGPRGSHTSLCPRPKSRNSTPREEMYLSWMPLSLNFTQIELKNMAWMNLSLPTPVTLTTLPSLRWYNALLWITDLMIPILAWQGWFSPGQVFVLDEYCARNGVRGCHRHLCYLRDLLERAENGAMIDPTLLHYSFAFCASHVHGNRPDGIGTVTVEEKERFEEIKERLRVLLENQITHFRYCFPFGRPEGALKATLSLLERVLMKDIVTPVPQEEVKTVIRKCLEQAALVNYSRLSEYAKIEGKKREMYEHPVFCLASQVMDLTIQNVGRLITPAKKLEDTIRLAELVIEVLQQNEEHHAEAFAWWSDLMVEHAETFLSLFAVDMDAALEVQPPDTWDSFPLFQLLNDFLRTDYNLCNGKFHKHLQDLFAPLVVRYVDLMESSIAQSIHRGFERESWEPVKSLTSNLPNVNLPNVNLPKVPNLPVNIPLGIPQMPTFSAPSWMAAIYDADNGSGTSEDLFWKLDALQTFIRDLHWPEEEFGKHLEQRLKLMASDMIESCVKRTRIAFEVKLQKTSRSTDFRVPQSICTMFNVMVDAKAQSTKLCSMEMGQEHQYHSKIDELIEETVKEMITLLVAKFVTIGVLAKLSRYDEGTLFSSFLSFTVKAASKYVDVPKPGMDVADAYVTFVRHSQDVLRDKVNEEMYIERLFDQWYNSSMNVICTWLTDRMDLQLHIYQLKTLIRMVKKYDFRLQGVLDSTLNSKTYETIRNRLTVEEATASVSEGGGLQGISMKDSDEEDEEDD

SEQ ID NO: 3274 - DNA, 302455 bp, Mus musculus
  misc_feature (1)...(302455): n = A, C, G, or T/U
gagttggtagggcagctaaatgaagagatcctgattgggtagctcacagtgtggtgaggagatggtggtaacaggatggaaactcagagagaagggggttgggtgggacaatgagaagcaagttttccaaagagccagaaagatgaattcatagtctgggcccacctagcatcccaacagaaaatagttcacaccaaggatctgggacagctcaacacggataaccagagggcaaggattactgggcatcactctataaagtgagctgcctgtcacatatcacaatgggttactaattctgtggatacttctgttgcatggacgttggagtgagaaggtaggtgggaggaaaaagccaaacaagaaggtctggaaaagcaagggagacttccagaaaaatgctagtcttgaatggagtccatgttttaatgggttattgagagtatatcttaagaacagagaacagtatgagggatgagaagcccttaggccagcgtggtccatcccgttctagcctctgccagaaccttaccttgtcggataggcactgtacatccaaagtcaacaaaacagtcagcccagtcataaacaggggagagattaaaggcacttaacacactcggcagaggggatctgccctttataaggagtacccagaaggtggtgctcagaaccgtggacagtttccagggttaagcttaaaaacatagggcttagcatccaaatgcgtgctatggagatttaagaaatgtgattaggaaagtggtcagcttacaagtaggcagaatcagcaaggtggtgtcattagcatcccccactggtaccgagtccatttatcagagtctcctgtgaagtgggatgttcatctatatctggtccatcagtggaagggaataatcccgggtcagatgaactagagaaggtacattgagacttgcagtcatgacgatgatctgaagaaggtgaaggcagaatccatagggggaaagcaaagaagtgtgctgatgaggaagaagagaaccaggaaaggaagtctttacattcctaaggggatgtttgggaggaagaatcatgtacgatacaattaggaaagactagcagatggtaaagagagaataaaaccttgggaaatacagcggtccctatggaatggatgccacatcatcagacgtttttaattccattttttcatacttaagtcataactggaaacttctgttgagacttttttattgcgttatagagaaacaagggcaatgtgattaaaaggcaaagcttcccctcttagggaagggcgcgcggatgctgaaccgaaggcttcccttccgagtgacatttttatgtcacagttttaataaacaataaaaaaaaggaagaagagtggggagacagttacatttcatcttcttcactcaggaaaaggagagactgcttcccctttaaaggaacagaaaaggttggatatgaaaatggcaaactgggagtaaaacaatgaccaaaggagatttgataccccaaatggacagcactaggtacataccaggaagaaagggctcacggcaggcagtgttactggaaatcccatgaaatagcaatgggtatatttggcatgagtggcatgaaattcctgggcttttcttcagcttgatactatgagtaagaaaaccaacaaatatggttttggaatcctattggtgaaaggaaatgcagaattttttaatcaaatcgtttattatcaccgtatgtgtgcgtatatccctatgtgcacatgcgtgggagtcagaagacaacctctctcagtcagttccctcctcccacctgtgggtcccagggattaaacttaggtcctaagcttggcagtaactgggttacctcctgagccacttgctggacctcagtctgtgtttaaggaggggcagcaatggaaggagggaatacattaaaccaagaacttggacaggaactttctacttagacttttcatttcaagaggagattgactctatatttatcatgaactgtgtttgtaaaagtccctggtttggacgacaaacgtcattagttgtatgaaagacatcaattcttcataacatgaacacaagactaagaaggaaggctacctctcactttcccagtctcccattttgtatctagtgccttcctgatctgttttgaccaggtggcaaacttctctgtaattcaccaagtaggaacataggatcatgaaccggggttaaaaggatctcagctggtttaatggactaaaaaaaattagaggttagagacttacatacaaagatttatttacttttgatttggggcattttacatcaaggaggatgaagtcatcacaattttcaacagcagtgtagttatcgacggcagacaagaatggacggtctgtggtggaaacttaggggatgtaacagttctcgtcgggattctctattaattggcatctctgcacgtcttcattacagtaataatgaactttcataaatattcattcagttttaccaaaaatacaccaagagcctccagaaccatcaaggaggagctaggtgctgcttagcaaagtatcacagatgggtagctttgttgtgttgtagctctttgcaaactgtgagtccatacaaaagacagcatccatttctaggtcttggggaagcaagcagtctattgcatttaattctttacaatacacaaacatggatgaaagcagagcattgtcccccaaatcctgtgatggatggtgctggcaagcccgatggcctgacttctgtccttacctgtgttatctgtgatcccaggtctccttctatgggactgtgggacaggagggagatgagagaattcactcagaagcctgtgtatcaactcttgtggagcacatagcttggcacacacaagaaaaatctgactcaaggaagtaggagagaattgattcccaaaagttgtcttctgaactccacacatgtgctatggcatatgtgcacatatgaacacacacacacacacacacacacacacacacacacacacacacacacaaataaataaataaataaataaataaataaataaataaataaataaataaatttaaaatcttgtagttgttagcatgcctctaatgtccttgttcccttttgttacctgtcaccctttgtgccataaaaataatctatgctcctatccccttaccccaaaaaccagtcacataagaccatgtaggagagaagacatagggcgggaagccagtggaaggcatgggatcttagagcccgagatctgcaaaggtgcatgatgatgctgggtgcaatccattccactctgtacagcacagacagacttgtggggaatctcaaagtggaggcaggtctttcgaattctctactgcatggtaagtttacactgtgtttataaacacacacactcacacacacacacacacacacacacacacacacacacacacacacactataatatacatatagtggggtacatgctcacccagaaacctaaagaaaataatcctcaaaacacatttgaatttgcccagtgagattgcagacattttgagttctttgaaaataggatacaagatagaagaaggggaaaatccatccatagcctgttcattctgtcaccacactctgtcacaataaaaggacagctgaacaaatttaaaaattaatggctagaatagctggtcttaatgcgctcacattccttctttgctgtgcatagtttttaacttctaactttattctctttcttaagtgtagttcctgttaatgttatagggtttgttctaattatctcctggtttcaagtgtcactattcctgttcatgtgacctgcagtgttagccagatatgctggcagttcaagaatctggttactatgtggaccccagaaatccccttctcttcatgtcaataaaggcttgcatataaaaacatggagatataaaataaatttcatgttctatgaagtagatggaattcattaaattaatcttaagtttcagaaatatttatccaaaggtgtcattatctagatacataatgcaaaatttgttcacaatatatttttgtaagataaaacattttgtctttttagaaaatatgattgtttcctcattccactatctttctgtgatatatttctaattactgtaatacgttttagcatgtgtcagtaagtatgctgtacaacaactatcagcaccatttaaataaaagattcagtttctaccaaatgtctcttccttcacagactctgtaaggtgaatgtccattttttttttttagcagtttttcacttgtccacaacctaaaagatcctttgtccactcctttaggattgtcagatgaaaccatctggtttgtctaatctgctgtaatctattcactcgagctgatgccccaccttttaagtaggcttttaaagaagctgtgctggttatctgcaatgatcatgctatcgtagcccgctagacaacttgtagactcaagaaagactcatttccccttctgttatttacatcaacatagattgacaaagacctgaaagcaccaagaatctgagatgacacagacagacctgtagccttaattggttttgtccctgacaccactgagttcattagtttgtaatgaataaatgtgtatgatgcattttaaagtattatctttctttgatatagctcaccaagaaacaggaaagtgcttaggaacactcatctgacatttgtgaaagacataaagatccagattttcggacaggaaaacattgtcaagtaaatactgcccagtgtgggaaaaatgaaagttgaataaatcattcacagtggcgaattaattgattgtaattctgcctttggtgcctatctctcatggaaagtcctaaatgctttgcagagtcaacccttactccccagtttgtagattaggaagcaaggctgggagtggctattagtgtggaaaacaaatatcaggtcgcttatgggggattccctgtgccagtaacattgtctctagtaagccaggggactgggatccaagcactttctgctaagaacatcacctatctgcatacatcactgacatttttcactcagtgacttaaaatctatttagatgttccagtgataatctactgattaacctctgattgtaattgcaatgcatatgtatatatgcacacactgtatatgtgtatatatacatgcatatatatatataaaatatagcacattattttataaacaaatttttgatggatgctttgtctctgagtgtgtttgtgtgtgtgtgtgtgtgtgtgtgtgcctgtgtgcgagcctctgtgtatgtgtggtatgacttttaaagatctttgctaaatgttcttcattaaaagaaagctttaagtaaatatgagcatattactcatgcaactaccatactagatctgaacaaatttaaactgttaaaaaaatactttggatcagttattaaagtaatctggcaacgttctatagcactgcagtacagggagtgaggtcctgcctaaggatgctcctataacattctaagtactgatatctttctaactgatttagaggccagattgcaacatggacactgtccttgaaaactaataaaggagatccatcctttgtaacttttaagttttaaattgaaggtttatttgtactgtcacgttatgggtttttctgtaattaattcctttgaggtcagatttcatggacacagaactcctcataaagtaaccggcccttcaccagtatctttgctgtcaggattaatggttgaggaaaaggctaatctgtttcaagtaagagtctcagttccaggcattgtttgtttcatttatttgaaaatttccaaatatcttagaagtagatgctatggagttgatgtaagggggggggagtaagacattaaaccaattatgaatacatcagaaattgaaattttcattatgtatatggcttaagtacttgacggaaaaccccggtgcagagtattccttactttaaagtgtatgctatgcttctgagtagattgaacagtgtacttaggcttacatagttttttaatgcttattcatgagatgtgacatagatcactccatggagaggacaaatagatggatgacagtgttcaactgttgaatgaatgatgttttgactgtggctgaatttcaacttggaagaatggaaatgatacactttaaagttgcaaggtaaatagctaagtttagaatggtcaactgccctcgaaatacattttattaaggaagaaaaaaatatttacttttcaggcatgtttagctatttgcaggtgataattatgtttttgagctggcaaaacaaacaagacgtagctcaggtttccttgcttagcaactgcactgtcttcatcacaagcatttgggtgctgggtttgatatccgtttatagaaaccacggagaaccatcccgagcctgtgcaacagtgctaataaaaaccaagggctcacaagttcacagaactgatcaattcgtggacaggattgatggtatgggatgctgaacccagtgcttggtcggccagatttggtaacatttgtcccttcaaaaggggaaaggaattcgatttgttgtctcaggctttgagaactcttgacgagatctcagaaaatgcctatctggcctttagtaaaaacccttctttgtgttccttttaacattctctctctgttgcctgaaattacatccaaatagtcacaaagtggatgcttttgtttagagatgatggctacatgagtggatacatgcctccttatgggcttactccccggccccacccccagtcattcagtatcaaaatgaaacactttaaagaattgtgctggtgacattttccttacacatattatggactaatttctcttagatttgaataaagattaattttactcttgctttggaggggaagctcttatttcctccttaaaaataccatgtagcaccatcccaaactgggatggcattgctggaggcatagctcattcttttttgctcagtggaggaaaaggagagaaatcctggcattggccagccagggaacaattgcagattgacacaaagtagagtatttccagttagaacagagcttatctacaagcaacttgagcaacctaggctgcactttcatatcatgttagcagcctttcctgttcgaataaaaccaggtttaaatgccatcagttcctcagccagcgagtacccttcagaactttggaccacccatgcctaacactatactatctgggagacatatggccactctgaaagggggggggggcactgtaaaaccttggggttggcttatcttttcctttctgattctgaatgcttcaacatttgcacaaagtcctgaacaccaatgttcgaacagattctgcaagtaaacttgtatgctttatgacttgcagtcattcaaagttgtcattggactgtaattgattttattttaggaatcatcgaatgtgtagtataggctctcagccacagtgaaaagaattggaaaaatactgtatgtacagtattcattttaggaccaaagcagtttaatagtgaaattgggaggaaaggacaacttccccaatgctttgatatcttcggatagcctttgaatagttgtattctatttccacagaatggagtcttagaaaagtctgggttaagaccgttagcatgtattacactcggttcattttgtgtaattagctgtgttgtgaatctcttaattttaatgacttgacaagcgtgtccaatcaaataaatagtgacaaataaaataaataaaacgtcttcctgcttcatctgaggaaagagggagcaaaggacaagtttcttgagttggaatgaagcaggtgagaagctgcaagccacacgtgtccagagcaagcacacaattcccagcaaccatcaagacattcagtagcgtttaaaaactattttcttatccagattcttaaatactcattttcttacctcctgctcattcttaaaaacaaaacaaaatcagaaacaaaaagaaaaacaaagaaaaggcgttatttctatgccaactacagagcgttatgtaaagtactgaaccagagccgttttgtttcaatcacgttttgacattcttcatcaaccactttctctaacgagggaaagaaaaaaaaagtctaaacaacttgcctttaataaagattccaaatagagagttggcaggtctgctgttgcttcacaaaaagattccccccgactgggcgactgaagcagtgctaaaaaataaaagtacaacaataccaaaaccaaaaaccaaaaccaacaacaacaaaaaagtcctttctgcccccgctgagaaaataaactgtttccactttttgtatccattctaccagaagggggaccttttccactttgagatgctcctcggctttaatttctggagaggaagaaaaaaaaaaaaaaaaaaaaaaagcgagcagaagagccctgagatccgcgaagcagcttctaataacattaggcggcggcgcgggtgtgtgcgcgagccgtcggcgcgcaggcgggagggcaggcgggcgcgaggggcggcggcaggagcgggcggggcgcgnnnnnnnnnnnnnnnnnnnnnnnnnnnnnnnnnnnnnnnnnnnnnnnnnnnnnnnnnnnnnnnnnnnnnnnnnnnnnnnnnnnnnnnnnnnnnnnnnnnnnnnnnnnnnnnnnnnnnnnnnnnnnnnnnnnnnnnnnnnnnnnnnnnnnnnnnnnnnnnnnnnnnnnnnnnnnnnnnnnnnnnnnnnnnnnnnnnnnnnnnnnnnnnnnnnnnnnnnnnnnnnnnnnnnnnnnnnnnnnnnnnnnnnnnnnnnnnnnnnnnnnnnnnnnnnnnnnnnnnnnnnnnnnnnnnnnnnnnnnnnnnnnnnnnnnnnnnnnnnnnnnnnnnnnnnnnnnnnnnnnnnnnnnnnnnnnnnnnnnnnnnnnnnnnnnnnnnnnnnnnnnnnnnnnnnnnnnnnnnnnnnnnnnnnnnnnnnnnnnnnnnnnnnnnnnnnnnnnnnnnnnnnnnnnnnnnnnnnnnnnnnnnnnnnnnnnnnnnnnnnnnnnnnnnnnnnnnnnnnnnnnnnnnnnnnnnnnnnnnnnnnnnnnnnnnnnnnnnnnnnnnnnnnnnnnnnnnnnnnnnnnngtgtgggtctcccccccccccaaaaaaaaaggagggggaagggaggaaaaagtatatatatatttttaccccctttgcttattttcgttgtccattcgcatctgcttttggatggtgggagatttttctttcggagatcttttcgtttgccaggcacgattgattttcacccccttggtcccccaaactacaaaagagaaagactcgctttgtaaacaaatcagtgatattggaggttgtttcttttggggggtattcttgttgataagaaaaagtgcttgaaacaaatcaccccggcttttctttttattagtttcccccccccccctattcgtattaactatgtgaatttttgctgaggtggaactagtaacggatttttgcttttcgctgtatctgacccttcttcaaacattgtcttgtaattttttttttaacaaaaagcttccccgcttccctcccccccccttttttttctttttttctttttcttccctctctcgcttttttttcttttggaggttgggggtggggggcgaaggctgggaaagtttggtgcaagccacggtaccgagcggggagcccggggtagccgcgagccccgcgcgcgagcgcgagcaggagccggagcgaggagcggagcgcggagcgagggcgcgagggaggccgagcggagggcgcgaggcgccgcggcgcgaggggcgcgcggccacgaggaagtgtagttttttacagggctgaattgaaacaacttcagctgtttgcttttaggatgtctcgccgcaagcaagcgaaaccgagatccctcaaaggtaaggaggacccccccgccttccccccccatccgtgagtgtcactgtgggtagcggagcgagggctgcgtggccgcgagtcgtgtgcgcgcgtgagtgtgagtgtgagtgcgggtgcgcgcgcgctcccctcccctactagcccccaggtggagtgaggacgaagtgtctgagtgtgtatgtttgtgtgttggggggtgggtggggggtaaagccgggaggaggatccccaaatggggcggcggtagaaagtgggtgagaaaagacagcatcaaaaccaaaaccaaaaaatattaatttcaaaaaaaggagaagaaaagagaaagaaacgaaattacccgaagaggggctggagaaaaaaaaaaatcttgttggagatctccgtctgggctgaaagaaaaagtttctggggtgtgttttcttaaagaataaatatgcagaaactcatgcggcagttgtattttttnnnnnnnnnnnnnnnnnnnncggcagttgtatttttcttgctttggaagaagaagaagaaaataaaaacctatggacaggagcgaggagtccttgcgtattaaaaacgtggcccggggctggggtgcgtacacaacagccaccaaagtctccgggtccgcgcccagctcgttcgggttctgcaggtcttgcctagcttctgccggtctggcggccgacgtaaacaactgggcccggtgcacttgggctgcgggacccaggctggatcaccacggtaccccttctagatttgcccggaaagttgaccgcccttgtccctgctcctccctccttccccttagggtatcagggaaggggtgcctctctgtgtagtccccgtagcagaggaagtttgcgggtgtgtgttgtgtggagggaattggggtgcactagttggctgcggcggcggggttggggggcggggggcactgaagttatcgatctggtggctgtgttggaatgtggcgagcagagtcacgtggcggccactacctcctcctccttcaccttcccctgccttctccggggtaaatcaaggagccgagaggtccggcgctctgaggcccagagccgaggcgcgcgaggaccggagaaggtgcgagcaggcagggcagtggaccgggagaggccaaaggggcgacagctggaagcagccgaggcctctgcgaccccggtggcgaaggacaaagggcggcttgtgctcccgccggagcccgcagggtcccgccgaggtccgcgccccgccctctggtccccggcagtgcagcatcctcttcctcctctgctgccgggtgttggtggtggctccgggtggctagggttcttgccaccggctcatagaactccgcaatcagcaaagggggatgatgggggacagaatcgtgcgccccgagccctggccccctggccaatgagtatttatgaactcgattacaggaacccttaccgcacacacaaagccctttcttcagggaaaggacagcgtagggggagggcctcacacactggaatccttgctttcttcttcttgttcttcttcttgttcttgttcttcttctttttcttcttctcttctttttcttgaagtgcacaacttttactttaaaaacgaggcgaatcactgacaagtgtcttcacacagtttgggggcctgttttgtatttacatgggacatacattgtctagaaaacctagacgcagagccagaaaaattcccaagtctggatggcgaataaatgatcgcaggggcatgcacgggcgtcagggtaactgtggaccactgttgctccggggaaacttgccaggagtctccatttctttaaagtaacggtggggaacgaagtgccaggctgacctcttcctgctctctgggaaaggagaactttgcgatttgaataggatagcaacatgcagtgccaacctctggttgaagggtttcaaaaagcgtctaaaagcttgtgaaggaattaggaagccttttattttcaaaagtttattaaagtttgtagatttggtcattttgctaactcaaagcttctaactgttcttgttcacctgcttctggaatgaagtcacagtgaaagttttgttgatggtgaatgcatgtgtttccccagcttctaaggaggatttcttttgcatgcatgaaagccattgagcgaagctgtactttctgggaaatgttggttaagttaaactgtaaaatacctagacagggacctgtgtagtttttgggctagtaagggaggaaagaccagtaagcagaagacgtttttattcttttgttttattggtatgttgcaaaaaaccggatccaatatctccttcactaagacacagcctctgggcttcagttgccaagtgctaaaataatatctacattaaatcaaagagtgtgtgtgtgtgtgtgtgtgtgtgtgtgtgtgtgtagcacagcagtgttttccgtcagctctgcttggacgcctcccagaagaggcactggcctcaggtgggctggctaggcttttggggcgagaagctcaagactggaataaaaatagcacagtcctcgctgacgatcagtcttgtttttcttcagggtgtgcatttgcctggaaaataacatatttgtatgaagctgtgtcagatgagggactgtgatatgactagtgtctggtagagctagactgccattccggatggttcctgttaagtaactgctcctttcttcctgatcctgggtcccctctgtcttcctggaaggatgcctttatttttcaaagtgtgttttaagagtgttccgagtccattctgttgttcagaaggtcacgcttgaatccttgaaaagccagcaagcatttttttttttttttaatgacagatcagctggtatttgtaacagtaagcaatgggcaatcgtttgttataagcaatgctggagagatggtgtagtagtgtagtagtgaattgaacgtcctcacataggaagagctgattggtaattttaccatcatgaaagataggttctgattttaccatcagaaacatgtagattttgtgataaccaacatgaaaaagatatgtattaaagaccatgaaaaaaactgtaaggccttctaaaaaccacaaagttctgcattcagtttctaatgtgtctgttatttctttaacaaacagagttttaagagatagttctgatatggctgtctcttatgatatcatttcaaacttgtgccccaggagagtcatttccattaggctggtaaaaaacattaaaacaaaatagtggttagtctggattcttatttctatctagatcctcaaaatgtgctttcccaggaaatttctcttaccagatgcatttattttaagtaattcttataatttggggactttgggtagataatcatgcctacttaaaaattacgcatttttaatgtcaaattttgggggtcgattgtctagttagcccgcctcctcagtctggtttccgtttctaagagccttgagaaggcaagccttgctggagttacctactccgtgtaatctccagtcagactgcgtacattcaggtacttgtttctctagacaacatctgacattggaacatgcaacttctttacccttctcgacgctcaaagcctgtctgccacatagaaaccccgaagacctcactctctgttaatactgcatatctttagagtgatccttctgactaatgacaaagggttaaagccagtatttaaaggaatgaatggccagacaatttaatgagtccctcccttctatattatttagatatttgtcttcatccctgagaattgacagtggtaagactacctcactgaaaatagtttactgtcagcttatttttagggccagcaaatcagttgtatcaaattggccaattgtgacctatttctatatttcttactggctctttattctatttctttcggcacttgtttgatggaactttctcagccattttatctgataatattttttttttaaagttgactccagaaagctcagttagaaggaaaaagtggtctgctgcataaaggtgtgagatactcagtgagagccaagttataaagctggaaaggagagaggggagcgcttaggcatttaaatggccaagttaaacaggagacacagccaggctatctggaccctcaggtgttcataaactcataccggggacctccagagagggatgggggaggcaggaagaatgtgagcccccagtgtctactttaacttgctgtgcccgatgctgaccctttgtaacttggcacactctgaacttagaacactttagatataccttttccccaccagctccttttgtaacttataaatggattcttaaaaggaggaattctttctttagaaatataatgaagtaacaaagtctcagctcacaatgtaaagaagaaatagaaattagggaggttgaatgaaaagacaatggattttaagtcccgagcctttggaaagtcagaattttgctgtttgctctagtgcaaacactgtaaacattttagatattaaaaagtcactacagggagttttcttggtcctcaaatttaatagaagtattaaaccctacagtgtttcatgtgcttgccttttcaaagtacatatatgtatatatatgtgtatgtacacatacacatatatatgcatatactaattatatatatggattaatagaaaggtgagatataagatataacaataacaaaaaatgtttccagtatctttcatgtccttgctttcttagaaaaaacaatcttttttttccagcagtgattcagtttaggtttggaaatgatgctatagaaaagaaacaaaggctgaccctggattttgtgtgagaagcctaaaaggaaatagaatattttgcttttaattataagcaaaatggcttttttttcctgaaaactgattttctgatatgttagctatgactcttgttgataattagatcttaacttacgttagtttcaagaaaaattaaggcacacatatgtgtatatttatggatacacattagatagccaaatcaatattcctttttttgtaaggaattttgtaatttgatttgtaaaggcaaagtattaattgcatggcatgcagaaatttatgcttcgatgtttttggatttgcgtacaaaaagagaggcgggggcaatggttagaaacagagctgaggtttctcctgccactcagacaccctgtgacaattgtccttctatttatctgtcagtcagtgactctttctccctccaccacctctaaattatactgactagatgttgaagtcattaaattgattatagtccaatcagcagacaatccgaaataaacaaaaacagcaattacagttggcagggatcccgagagtcaaagttccagagctgctggtccagcagacctctttcagagctcggtccgcacctttccatttctggcagcccttcctcaaaggaactgcagcagacttctgatggtctactcagtcctctaaacaaaaacatctgtctgaagagtgagcaagagcacacctttggcctttattcacctggcccaaaaagggtaaagaaaatggggtactgaacataaaagcatacatgtaaaatggaattacaaagggagttgagattagctgctctttatgaagcaagctgttaattttcctcttttggttgttgccggaagattcccagatcttactgacagcaggagtgcctgacatggtgacagaagtttccaaccttgtttttccttttaacttatttggaggaggccaagagctgaaggcccattttgaaaagatgtctgtagcatcctttctcctttctttcgaaaggagctttgttgcggaggcttggctactctgatacagtctgcaggtttctcagttaggttttgccacaaactgaaacattatcctcactcctgtctgaatgcttattttgaagtaagagcttgccacaagaagagaggtttggggagtggaggagagcaggcctactgagatcagcataagagtttctggaaggatccatccttcctcttactctgcttcattaattcacctggctggttcccatggctgacttaataccatccgttttcttaccaatgacttcctatctttgcctaaatggatttggtgttaagtttggtagttatttttaagagaggagacagcaagatttgtgccatttgtaccatgtttagcagccctctggcttcttaaaaatgtaaatgctctcatgcaatggtatgctaaagaatgcttttgaattgtgtgaggttttgatacaaaggcagctgctcaaaatcaaccttcttgcgtgttttctcagaggtgcttattctttttctccatcgatgcctggtgtgctgtcaacggttgaagttagttctttgggtgtgtgtgggtgtgtgggtatgtgcaagggtgtgtgtgtgcctgggtatatgtgactctctaatctcatttcaattaaacatgaagtatgttgctgtggttttatatgggaattcaatggtgccctggtcagaatcacgtctaccttgcctgttgtaattgcctattttaaatttgtcttgctacaatgctgtcataaagcaattaaaacttaaagttaacattagttaatttaaacagctccgttataacattaatcaaacagggtaaggagagcttttacagggtttaaataattatgcaactcttggaataaaagcctgacatgagataaatgttggaaaactaagaatcttggtctttttttttttttttcaaatacttttaatttcaggcagcatgggcctttgcatgcatcacattgcacctccagtaattacagcagtttagtaattattagagatgaaagaaatcgagtaagatgtgaattctttaaaacttcagcagcttcagtccttgcacggctaatgatcaagcagcagtcatcctgccacctggggaccctatcacagctacggcaccaggctgatcttggtggtatcattatgatggtagaacacaccacagttagcatttctcctctggatgtctgcgaggaaaggtttgtaatttgggcattaacaacacaaaaagtcagaatcaaatatgccttccaagtaactatgttttctaggaagattattttttgaagatgaatgtatacattcacaaattatttttcatactctatgtactttaacaagatagtaaatactttgaaaattcctgagaagaaaaatatgtagtcattctcatttgttcatgcatatatatatatatacatatatatatatatacacatacatatatataacttaaatatatattaaacttcatatatatacatatacatatacatatacatatacatatacatatacatatacatatacatatacatatacatatacatatataggcatgggttaaatttgcatctagttttcaaatgaagataatttggtttagaatacatttactatttatgttagcttaaggtgttccaaactaaagacagacaaggaatcaccatttccatagtagtgcaggttggttggttggttggtttgtttatttgttttaaattacattgtggtattgcttatgatttttttttcaagtatgaaaccaaatggttttagacatttagttagcacaatatactgcagaacatacagacacatggtatgcacactcaccagcagactttgatgtctatatgccatacatttcccatatgttaatcacttcttaaaggacaaaattaaactttccccaattaaatttggtatcattttaaggaatgtaaaagcacttatcttttgggttcataacactgtttttataacctctttattattgccatttggtcttgttattagtctactaaggatatatcagtatggacatttatttacctggtagggacaaagttcccctctattgctgactggcttatatgttaatacacacgtcattgtacaaacctgtcctgagctggtctccatggatgaactagaaattgacctgtcatactgttcaatgcccactattaaaaagaaaaaaacggttacagtgacctaaactttgttatctgtagagaaatttcccaaactttctgacatatttagtgttcttgtccttcacaacagaacttcatgagatccagtgagagcacgtgaataagattaaatattatttcagtattgctaaggatttagcttgttgtagttttaactggttttgagcagcacaatcagtactttactcttttgcttatttttataccttagaagagggaaagggcatcaacatttcaaaaatgccattccaccaagtgctaatgaagtccaaacatggctattgctcggaaggctggcaccatcttgggatagttggcttttgtagggagtctgcattacctgtcagtaccggtgtttccagggagtatctgaggctacagtagtggacatcaggtaagaagcaagaaggtctgtaggcccaaagggaggcacatcagtgcttggagagagccaaggacaaaacaagctgtctcgggcatcatgttgccacttggatagtagtttaccaaggagacgtggtgagctctgattggctgtgcatattttaggatgttgccatgttagatagtagtttaccaaggagaactgctcacagtagtgagctctgattggctgtgtgtgttttagagggaggccacttacaatctctcttaggatttggattttaggcttgagacttgagagggcttattctcatcattttactgctcagctccccccccccccctcctaacttgtgcctagactttggtcccaggttccacccttagctctgaggatccatgtgccatcaagacaagcattatcttgctcttgtgagccctccagtcatggaaactgaacgagactttagataccttttccatggcttttaaattgttggaaggagattctgtaaatgagaaccttacattggtgtgctcatgttttctgtctgttgcacaatggaagcagttgatgaaatgatgctcaaagtgtttgatgtcatgtgtttggcgagctttcctttataagagtgaaacattttgtttttccttacactcaaatggtaaatatgagcacttaggtcaaagacattaaatacatagaactttcccacctccatttggcttgattaaactgtcgttcctttcctcctcctgaaactcccagagagtagttttgaaaactaattgtgcaacagtgaaactaattatgttttgaaaaaatttgaagaattcctaatgttaattcatatattgattggaggatcatagagaatgtgtgaggtgcaggcattaaaacctagttgtactaaatgcttgacatctctgctatccagaattgagacaaaaccagccataaggagtttgctatattgcatattcagcacagaatcctgggagaaactcagcaagttggtactgaaaagtgttcttgcacaaatttgatgagcttcccaagagatacaggtaaatgatctgagaggagagtttctcaaaccgtgctgcgtaagtgtatgacaattcaaaggtgatcacattgggtgtcctggtggctttcctagccagagatgtgagtggcagactgggcggaattggaccaaagatcaaggcaatgagagtgaagtcagttttgcccctttcagcaccactgagatcatttacagtggaatggtagcattatggcaaattctaatcttcaaaataaagtcatcataagataataacaccactttacagctcctgttacatgtaaccagttttcaccgtgctgatctgcatgttaagaagccagtgctgggctctgggtggccgctcagggagaacccttctctacctgacacctgcaccaagttctggatcagcttcccctgagcccaggtcacttcctcccttaccactcagctgtgggttcagagaaactctgcagctacttctggctctaacattttagaattctcacattaagaaatcatggttctagctgggcggtggtggcgcacgcctttaatcccagcacttgggaggcagaggcagggggatctcttgagttcgaggccagcctggtctacacagtgagttccaggacagcctggaacagagaaaccctgtttcaaaacatgccctcccacccacccccctccaaaaaaaaagaagtaaaagaaatcatggttcttacaagtggataaatgagccatgccaacaaagtgagcatcctttgggtggtgggcttattagcagtgtatctgaagcaaaaccagactagctggaatgtcctcacagaggctagaccgtctggatttttgctgaatccccattttgggactgatggaagaagggaagcaagtggatataatgaatcattctcggggtctttatcagaaatcctgcccccttggagcctgcacatcccacagagcagtttgaagcttctgagtcagagaggaccctttgcccagtcaactcccagggctttggagatttttcctaatgagcctagtagccaatcctgttacggacttgacattgtgtgtgtggtcactctctagtgacctgagtgtcaggtgtactgtagttgatttattttggtgtgtgtgtgtgtgtgtgtgtgtgtgtgtgtgtgtgtgtgtgtgtgtgtaggtgtagatatatgtgccatggcaggcatgtggaggccagaaaacaacttgtgtgagttgattctcccttctaccatgtgggtcctaggaactaaactcaggtcttcaggcttagtggctgtcaccctttacactagagtcaagttgccatccctcaagcatattttggattgagctaagtttccccccaagtattagcaacatatgggcccaaatcagaagtatggttctttaagaatagctttggaattgggttcgacttacttgtagaagttacctataattcatccttgctcattggtacaaatacatctgtgatttctatacagcccccggtcccagacctttaataatatttgaggtttcttcttgaaccctctataggcacaggttgtggtttttcatactaggtttgtgtactaataaagacttgtatatcactttcacttctgacatccctgtgctggttctgagctggtgtttaaagatacctttttgtgcagtgccctttaaaccttgcagggcatagaccaccccagattgtccatcaccctttggaaagcaagcatgccatgatcaaattattggtgatgaacatattagcagatgtctccattcatttgcttatgatatttttgcacatttgttatgtctcgggatgccaggagttggagatgcggatcagatagctctgtcttcaatatgatgggcagtgaaagcacattgtatatgagagggaggctttccccatcaaggttctggatgcaggcacatttattctgtaccacatgggttgtatgatcctagggtggctagacatgcagcctaacacatttgtgcgtgacattgcattatttgtccaaagcctggatgttcttcacagtggtagcactttcaagccaaacgtgaggctctataagtttcagtttgaaaaatattgaacatgatcatgcattctgcaggatttctcattgggccccagataggcactaggtatatcgaaagtggtggaaagggctgtacccagctgggtctatacttctagtcagtgaagatgttaggcaattcctttgcaccctgcagggttgattctagacagtattagtttcacaatgacaatgtattttcaagtcacacttgcaaggggcatgcttttggtattattggcacatgactcacgtggacatgttttatttgggggcccagtttttctcttctaagtaagctatctgtactggtgtccactgagctaggtctgcttgctcttcaggcatctgggtttattctaactttataatgcttcctaacccttggaaggagttacagagacaaagtttggagctgagatgaaaggatggaccatgtagagactgccatatccagggatccaccccataatcagcatccaaatgctgacaccattgcatacactagcaagattttatcgaaaggacccagatgtagctgtctcttgtgagactatgccggggcctagcaaacacagaagtggatgctcacagtcagctaatggatggatcacagggctcccaatggaggagctagagaaagtagccaaggagctaaagggatctgcaaccctataggtggaacaacattatgaactaaccagtaccccggagctcttgactctagctgcatatgtatcaaaagatggcctagttggccatcactggaaagagaggcccattggacacacaaactttatatgccccagtacaggggaacgccagggccaaaaagggggagtgggtgggtaggggagtgggggtaggtgggtatggggggacttttggtatagcattggaaatgtaaatgagctaaatacctaataaaaaatggaaaaaaaataatgcttcctaaataaaggacaagttccttttggcattagaagacaagttaacatctgtcctctctgatgggtcaaatgctagtgtaggaagacagcagtcatcagtggtgccgctgacaggctttcaacattctcttcacagttcccagatcagctagcttggtggttgtcactgtggggacagtgctcaccagtggtcagctttgacttcagagagaatggtaagaaactgcagaaggttatacaaacaaggcttccctaagagcactttattgctttgtcagttccccccttcttttctctcctttattttgttgtccttttgagacagggtctcctggcatagccagacgtcctttgaacttcttctgtagcccccaccttgacagagcaaagattacaagtttgtgtcaccaagctctgctccactcctcttctgcttttcaacttacgtgtccattgtttcaacctgagatagtcttatgcggaaagagagagagagagagagagagagagagagagagagagagagagagagagagagagagagagagaagagagagagagagagagaatgaatgagggagcgagggggcgggagagagaggaagagagagtgtttaagagagagagggagagagagaaagagagaggaagaaagagggagagaggaagagagaggaagagaggaagaaaggaagggagagaaggagagagggagggagggagtgagggagagagagaaagagagagaatctctatgaagatatgtttattactccaagacccactaccatctcaatagttatctaagtcaggttggaatgagatgtatagcttccagggacaggctaaccaggctaataacataatactccttccaactgctcttaaaatatgtgtttcacaggaatctagagaggacaaagtacttaggcagctatctgctctccccccgccccccgcctttccaagccataagtgctttaagtatatgcatggttcacttagtgctgctgtaacatagacccaatgctgggtggctcatagagcacagaggcttactcagctcaggtagagtccagcatagtaatggatggtaccccgtcttttgctgtgctatggcatggtggtggagaaacagaaaaataactggctataggtgaaggcaaggatcactttatgacaggttactcttgtgaataataatctgctctaggagactaacatcactctctttccataatggtcttcagctgcttacaggtcgcacaatctcatgttcaagtgtctagctcacgagactgtggagacaaactgtcaaccctagcatctcactctaaccctagcatctcactctaaccctagcatctcactctaaccctagcatctcactctaaccctagcatctcactctaaccctagcatctcactctaaccctagcatctcactctaaccctagcatctcactctaaccctagcatctcactctaaccctagcatctcactctaaccctagcatctcactctaaccctagcatctcactctaaccctagcatctcactctaaccctagcatctcactataaccctagcatctcactcctaacactagcagctctctctaaccctagcagctccctctaactctagcagctccctctaaccctagcatctcactctaaccctagcatctcactcctaacactagcatctcactctaaccctagcagctccctctaaccctagcatctcactctaaccctagcatctcactctaaccctagtatctcactgtaaccctagcagcccactcctaacactagcagctccctctaactctagcagctccctctaaccctagcagctcgatcctgaccatagctaccaccctgcttatcacccccttggcctgctcctctttattctttaacacccctgccgtatgacagattgctgagcagtagctcctcctacatccctgaccatcaggatgtttctactcagttatttgttggtttagcttatcacatacaggtgatgcctcatttaatgccatgttttcttgctgacacacatgattaaaaacacacagtatgttcttgaaaactgaagtgctagttacagagaatgaatatatttaaatttttgtcagggctaataccagtggtgttattagccatatggctggagagtagctgtgattctgtcctttgtttttactaacaggacttgtggacaaactgctgctcgggacactttgattaaaggtgctgtagctaggaggtggctgggccatcttctgtatttatttttctgacagttgtccttttctttcctgggttctttcatcgtcccatttgaaaaggcctttcttatcactaagatggttagtccggagactgttagaaatagtcctcctcctttgtcttctgacttggcgcttagtggtttgtgttttgccatgtaggagcgagaaagcttttgttcttgttgtgattacctattcggtttgtttattttctgttttgcattatatttatgctattgcatgttaccattgtcctttttcccctcattaattaatttatgtattcacatcacaacctggtcacagcccctccctcctctcctcacagtcccaccctcacaccccctcccccacttccccatcccatttacctcagagaaggggaggctcccaagagtaccgacccacctggtacatcaagtcatatcagggctgagctcatctcccactgaggccagacaaggcaggcaacagagtaaggacaccccaccctactctaatcgttaggggacccacatgaagaccaagctgcacatctgctacatctgtgtagggggcttaggtccagaccatgcatgctctttggttggtgcttcagtctctgtgggaccccatgggcccaggttagtttactctgtatgtctttcgattgtctccctcaccatgcctcttctacaagactccctaagctccacctattgtttggttatgggtttctggatctatttccatcagctgctggatgaagcctctcagaagacagtcatgctatgctcctgtctgcaagcatagcagagtatcattaacagtgccaggggttggttctctcctatgaggtgggtctcaggttggaccagtctttggttggtggtgcttgaacttttagactgtttcaatggtaccttttctgtctaagatagatagtgtttgtgttgtttccccctaatccattcaaggtttggtcaaagattggccactactctttaaatagaaagatcagcctggacatagcctcagaaaggagttagctgaatgtagggatggcttcatccatcacttctgtcatcgatgagttcattcttaggcattttcttagacccagagtggcttctgtggcttccagatgcagccctgtgtagagtgaaggttgcagagagctcgggactgcttgccatgcgatctggctggctaggctcagcctcaaccatgtagtctggctggctaggctcagcttcagctttttgtttattttcaatcttcttttgtggcaggctttatggacgtttctctctcctgagccattttcctgcttcagtacactgcctttagttcccacgtttgttcagtgaccagccttcctgtctcctttaattcctgaaagtcactgccagccagatacatcctcatgcagagcagtgacttgctcgcctctctggctgtccctttggtcctcagagacccttcctgttggtggctactggctgaccttggcattcatttgtctaggaatacactttggtgcacactgtcttcccttgctctttgtattaaaaaactgccctaaagttgactttccctacaaactctaacactttaatgtttccaatcagacgactttcaagtatccatttatctttcttttgtcaattttaatgctaaatgcaggcagggaaggagaaatagaaatccgagagggtgattccctgaggactgggggaggccactttgacagtgatgagtggaataccctccagtgacagagagtgacagaggacatcccatggtggaatcactttaaaattttgaaaatactttataaagagtgtagttacgttttctttttaaaggtcagctaggagggggctgtcttcttaggaacgagacctgtaacactgtgcaagggtgtgagagaggatgctgatggtgagactttggaataggggcaggatgctctgggacccatcagaattgaaatattatcttctcagtaaaaccatgagtctgtgacaggtcaggcagggacaactttagtttgattttcattgtagaaatttccttccaggatcctacacattctggtgaaggaactatgactttccacagctctagatcctccttttccccctcttccttttctccacctccttcttctcccactcctcctcttctgaactcctctctctatgttagaggatctcattagaccaggttggttagcctcagtcagtaagtgacgaagggttcactagaactcctgcctcttgcctctacctcccaagtgctgtccttacaggcgtgtgtaccactccctgctcctctatcatcctcatctcctcctcctcttcctcttcttccatttatgtatggagactacttatgttcctagtgtggttggaggtatagggtgttctagacctagagttaaggatggttgtgagctaccatgcaagaatggtacttgggttcttttgcaagaacaacaagcactctgaagtgctgagtcatctttctgagttctatttctattcttacaagccacagccatgagtatcatctctttcgtttgttttagcttctcaatgccttagcttctatccatcacacacatgtcacagtgaagtgatataaaggactgtacacttagaacccaagattgaatcccactcacagaagtgtgggaagcctcagttttcctgtcggtaaaaatggtaggcaggagcttagactagctgcatcagtaaaccaacatgagctgtttaagaggtgcctgggctctgccaacaatctgctggctctcatggtattttctagctgatgctcactgaaggagtgacctctgatgctttgggttggttttgtttgttttgttttcttttgtttctactgtacaatcttttggggatgaggtgacacacttttatggctgctagctgtaaaaggaaatatttccccttctggagaaatatgagagacttaacatttgcattatccatagtaggaggtgaccacaaagctggaagagcccatgctcattacaactttcctaatgtcttactgggcacctgtttgtttgtagagttgttacccttaagtgaatcctcagttggatgtcattgtggccttgtcataggtgaggaaaaggagactcattcctggcatattcatttattaggcctgaagctgcaaaaggtaggcttcctcatttgaaatgcagtaccattcagaggcttggagaatatgttccagatcatcactgtggtgagacctcaggagacctggtgcctgccagaggccaagaagccttagaggggtggtggggggcaggaggggaagctatgaagtgtgtgtgtgtgtgtgtatgtgtgtgtgtgtgtgtgtgtgtgtgtgtgtgtgtgagtgagtgagttcaggggccagctgaggtcagcaaagggcatcagaccctctagagcagagttactcatagttgtgagctgctctacatgggtgctaggacctgaacttgggtcttctgtaggaatggcagatgctcttaaccactaaggcacttctctagctcctcagaggcacactgctgatggtttcccatgaagaccagccagcttgctagggtggagattcagcttgatttgcaggaacaaacgacggtggctgggccacagccttattactcttctaagacaaaaaaggagacaacgttagacggcagctcagtgacaagaagagaccccaggctccatttcctgctatcacaaagaaaaaggcagacagcaaccatgacaccacacctcaaaaaccccagaaaagaagatgtgaaagtcatgatatatgtgtatagaatgttatcatgaaatccatcattttacatactaacaaaatgaagaaggcacagaaatgcagaacacccttgctctcttgccttttgctcccctgcgccccctctctccccattcccttctgccttctctccacatggtcatggttggtttctgcttctctactctcttcctctctctgccattctctgcctctactactctcttaactcccctaccaatgccctaagtaaattctattctataattaaaaaaaaaatggaaggagtgaaggagagaagaaaaagcaatgctggtccttctggttatcttttgaggaacttctatatgtaaacacatacacacatattctaactaaagtagatgttggaaaatcaataaattaaaaacatgtcagcatttaccaacaatttttacccccatgtgatcaacttacttgcttttactttgttcatatttagaaattatatgactaaaaattattttgtctaatttacttatataaaaatattttatttttaggtgtgtgtgtgtgtgtgtgtgtgtgtgtgtgtgtgtgtgtgtgaatgcatgcaggtacctctggaggtcaccctcttcagatccccagagctcatttgaggtggttgtgagctacccatcagggtgctgggaaccaaacttaagacttcagtaagagcagtgcatgtccttacatgctaagccatatgctcattgttttgaaatggagtctcatgtctctggaggctggtttcaaatacactgtgtagcccaggttaggctggaatttcggatccccttgcctccaccttccaagtgctaggattataggtatacattatcagaccctgctgcaaaatgcatttatgtctcatgcatactgtaaaaacatttaatgtatgatcacaatctcctggtaagcccagattgagacagcataaatgggatcatgtttccataaacaactattaatttatagtagctaagataatggcacccacattctccttggttctgtctgggcagctctgtaaattgtgtattgattatgcaaatggacctagtgtctttattactgctctgcagatatgtgcagatggaatgaacatttggtaagactgtcaattttataggaaaaactgcattttacaggttttttttggggggggggagaaattgcattaaaactaacctacaatttattagtaaattcaagaaattatttgtgttctaggaaatcagaagtagagttaaaaagtttaaagggtgctgtttaatttcctttgtttccagctcctcaaggaaggtgccgcagaaatgataccagatcaataataatctatttttgtagtttatttttggtcgtgtggcttttcttgttttgcatcaggctaaaggaaccttagacattgtggattggttccatttttacattcattaatctaactagacgaagacaaaatggcctaattttttcatcccacgaaacatcagttttcttatcaatgacattggtttgtaagtcataaaccacaaccccgggttttattcccatccttttttgcatacacatataccttattttatagtttttttcccttttcttcttttgttgagtcattgtctcaccaaaacatttgttcagattcctcttatttttctaaacagatcacttacaaatgaggagtcgctacttgtgtgttaggttggaaaggaaaaaaatagctgttttctatttgcctaagaataactttccacactattaattaattaatttagtcagtgtatgtgtgtgtgtttatgtgtgtgcatgtgtgtgtatgtgtgtgtgtgtgtatgtgtgcatgtgcatgaatgcaaatgtgtgtgggccagccatcctcagtgctgggattacagatgtgtgacgccattcctggatggttctggggaccaaactcaggtcttatgctgcttgcaagacaggcatctgaccaactaagccacctgcccatccctactgcttcgcttcccactgtggacccagcttaacctaatactgaaggtcagaatgctacattgacactctctacacaaattcatttgtccttgcctttcaggagtagcactgcattttagaggaggaacatccaatgttccaaaataaaacaaagaaataagaaaaggttaggagtaaagagaactgggtgataatgctgggttggtttttgtggatggatttggagctcagctttttctcaactggcaaaggaaaggactgccctggtgtactagtactgttacattgccgaggccagtgttgcttgtttaaagcactcctttcctaagctggtggtgcagtaatccttgagatagtgtaaatatcgtgctctgaaagatggacgtttcactgacagtctgcagtgggcaagatatcggaaccattggtagaaagtaccatatgttcactgggaactttctgtcctggattctcattggatggatgtagcactgtcctgtaggtgagactctgtgaaaaaatggataccgtgaagctcttcctccagatccttgtgtctaaagtctagcttctaaacagattccattcatgaatgtggctgttttaagacacatcatttagtccacatactcaaggattacacacacatactttccaaccacttatttccctccacactgaattttcagacttttaaaactattttgctgtagagaagtttgtactatgatacctggctgttgaaaatatctctttgtgggggctggtgagatggctcagtgggtaagagcacccgactgttcttccgaaggtccagagttcaaatcccagcaaccacatggtggctcacaaccatccgtaacaagatctgactccctcttctggtgtgtctgaagacagctacagtgtagttacatataataataaaataaatctttaaaaaaaaaagaaagaaaatatctctttgtaatgtttttcttctgtaaaatggaagagccttcctttaagatgggaatgttgtctggtctctggtttggtttgatttgtgtctaatgtgtccgggctgagtgaaagatactagatggtaggagtggagtggagtctggtgagaaggagtgttcaaacaaaggcaaaagcaaagtgtctccaaaagaaagcaaatataaaaatacccaaacaaacaggctaaagcaacccgatgctaaccacaaaagaaagcaggaaagtaccctaaggcagcctcacttcagatcgagaggatgtaaaactttctcctttcgcaatcagccaggcttttccttgtgaggcctcacagacctgagctttttctaccaccattgcctgtcgtctggcttgcctgtcgtctggctcgcttctatgcttgtgatgactcttggtcacgtcttgcgtgttcttctgcaggttctaggcattcttgtgaggaacatttcacatggtccttcgccattttctcttctcagggaatgtgagtttggatcgtttatggaggttttttgaaagttcaaatatcgtagccctgttcaccaccctagggacaggggtgtatatcacattgttctagtttgtttatatgtcttttgtatagaggtttattttattgtattgtcttttatttcatttttcttcagacagggtcttcttctctatcaacggctagcttctaattcctcaggtaggaaaggatggcttttagttcctgaacctctcgccttggcactcttggtgttggatgccaccagctaggtttatggggtgctatagctcggaccagggtttcctacatggtagggaaaaactaccaactgagcccatgccctgctcgtgtgcatggttttattttatcgggaaggatcatgaacccgagtataggatcatctatttaaatgaacctctaatgatatttaaaaagaaaagagaataagggagatccaatacctatttttgtttccagttaaactttatatttcctctatttgcccttatatatgtttgaaataaaatgaaaaagtaaaaatttgtctcaccaaagacttctgaggtcctgaaatatcttgtccctggttaagaagttgtctggtgtgcccctgcaccccccccccccccacgttggctttctgtctggctctggtgtttattttcgagcatttagatatataggacaatgatctcaagataaatagctgggtaagtcagacccgtttaggtggacgagcccttagcctgactctgcctgctctcttggctctccaggcaggccaggaatttaagcacttgcctcttactgaccactgtcctctcccaccaaccatctagcgcccgtttcctttctgctccagacttgggacttggtttgggctctccctcttcccttgtttatgttgtaacagtcacagcagttccctgcttcctgacatgctctttgccagcacatcctctctgtgaccagtgcagcatctgaactggacccatctcacctgcagcttagaaatcccgcactcacttctggcaccaaggttagcatgcaaacctcatgatgtctgtagtcctgtccccagctaccctccagcttgctgggctccaccactgccctggtttgcctggtggagaagcacttgggttttcttgaaggcagcatgttgcttttggcatctgtgtccttggtttgggaactggagttctacttgtattccttgtttttttgtttttgtttttgtttttgtttttgttttttgtttttttttccctaacaagctgctctgtgcctacttagccacatcttaacctccttctgacctcaccgagcttttggtttttctctctacctctatgagtttgctatgttcaccacgccatgacatgggaaaaatgttttcaatggcagacttgggtaaatggaccaaggggtccaaggccctaggaaacatttgtagcttctagccacctcagcctgttcctgtccattctagatgctaaaagagaggcactaccaaacctttgaaactgctcctgacctaccactttggaaatgagggtagattacaagctctgtcgaggtgctcaggaaatatttgcttgctgaagttgtgacaaggcaggcatagagactcatcctgaaatagttgagcttgaagtagggcgatgcttgtaacttctcttatttaaatgctggacccttgacattgcttacctctgttaagtcttttgactaaataacagacaacagaatggagccagggaatttagagagggcttctgattgggatcggagcttcccagttgttacaagctttgcatgcatgtgtgcttttaaaacttcttccaaggcttaccccaccccgcaacttagcatcctgaacaaagatggtcacatgtcctggatggaatgaggagataaactcacgtctgaccagtttgtcttcatagggatgcttctgtgatgctcctctttggtcttctgggagcctgacagacttgagaagagtcaattaacaccgcagaaattccaaatatccaagcgatttgttgtaatgcagagggaattctttctatctgaagggatttgtagacaaaagggataagcagatgaaagtggttccccctttcttctagaaagcagtttcatgactagaaacatgtaattcagagaatagagaaggtagaaagtaaacatggaaaagagagtcatccattttgggtcaggggacaaggtcttgctatatgtatctcaggctgattgccaacttgtgaccctcctgcctttgcccatctagtactgaggttacgtttctgcatcatatcactaggctgaagaaattctatgcttttaaagatttattttattttgaataatgtgtatgtgtgagtctgtatgtgtgtgtgtgcacgcgtgtgtgagtgtaggagcctgcagaggtcagaagaatatctcagatcccttagggctggaatcatgagctgctagttgtgtgtgctggtatctgagctctggtcccctgtgagagcagtgcatgctctttaccagtgctctatctccagccccaagagcgcagtcccaaccttgaccattcgaggatagccatgcggtacatggaatttcttgtctcttgtctctgcgatggtggaggcagggtagaggccacaccttcaggatacttgagattagatctccccaccccatccttccatccccccatccccattacttctattttgtttaccttgatttgacagactagaagtgagacagctgccagcaggcgattgtgtgactgacgcctggctgcccagtctggcttgctgcactctttcattaaggcttcctagccactgtgttaacagtgtacaagttagtttccccaaatctgttttcatcttaggggatttcaagttaaaatgaatatctagagttcagaaatcacaaaataatgttcccgccttttagtttttgaccaccaagaaggtttgctgcctctggttaaggaacactaacttatagtgagcatggtttgaaagacaactttttgacagagtttgttttaaacagatgttctccgatcttctcctcagacgtctaaatatgtcaacagagatgactcgttattgtgcacttcatttcatttatgtattaatttatgtatatttgctttttttcaatttttattagctattttcttcatttacatttcaaatgctatcctgaaagtcccctataccctccccctgccctgctcccctacccacccactcccacttcttggccctggtgttcccctgtattgaggcatataaagtttgcaaaccaaagggcctctcttcccaatgatggccgactaggccatcttctgctacatatgcagctagagacatgagctctgggggtactggttagttcatattgttgttccacctatagggttgcagaccccttcagctccttggttactttctctagttctccattggggaccctgtgttccatctaatagatgactgtgagcatccacttctgtattttccaggcactggcataatagtctcatacgagacagctatatcagggtcctttcagcaaaatcttgctggcatatgcaatagtgtctgcgtttggtggctgattttgggatggatccctgggtggggtagtctctggatggtccatcctttcatctcagctccaaacttttacgtgtatttgtgtgtgcttgtgtctgtacacatctatgatcatctatataaacaaaggtaggtgtgcgtgtcaagtacatggatggagtcagaggacaacctcaggtggcaatcctcaactttgaccttgttagaaacagcatattttggttgtatttttattgacacctgcagcttgctagccccaagtgcttctgatatctttccacatctgtcctgacctctgtttccccacgggagtgtgttactgttacagttgttttcgaccagcgactggcttttcaatgggttctggggatttgaactcagatcttcttgctttcaccacaatgcttttacccactaatctatctccccaacccacatataaactttaaatacaaaataaggttgtgaattatcacttagcacaagtagtgatttgtggaaaatatgagtacaaattatgtttatatgaattattaattaagacatgggattttaatgctgagtctttgtagaaaatatccttccttccttttttacattaaaaaattacattacatcatttagtgtgacattttatgcgtgtggtcgagtgttttcatgcgtgtgtgtttgtgtatgtgtgtgtggtgtgtgtgtttgtgtgtgtgcatgtgagtgcatgtgcccatgcccatggaatcttttgtgccatagcatatatccatcatattggccccagggatcaaactcaggtcatcaggtttagtgacaagggcctttacctgctgaggcatctctgatcccttttttttttaaagatttatttacttattatatgtaagtacactgtagctgtcatcagatactccagaagagggagtcagatctcgttacggatggttggagccaccatgtggttgctgggatttgaactctggaccttggaggagcagttgggtgctcttacccactgagccatctcaccagccccctgatccctttttaaatactttgcaatggagcaaacccttacgtctttactctccagctttactgtagtattaggagcaacatttttggggggaagatttagtttttaatgcctttaactaattaagttctccatggttatggtcatgacaatgaaatctatattatctggaattcatagagataatcatattttagatatcaaatcaaccctgattaccaacttacttaaatactacattcccacaaacaaattgaactcattgtgttggttaagattgagcagttcacaccatcgtttcatttggtgaggagctagctatgcccaagtggacgagtattaggaagtggtctagtttgaagtctgtgcccatgcacacgtgcaaggtttgggcttaatttatgtttcaccagtctctgtggctaagtggtcttcctgcttttgtatttacagcatcactagaatcttgtgtttttgccactctcataaaaaccaagtctgctttttaaggtagggcttcatgcatggaattaaccagggaaagcctcgtttatatctcctgcaaggaggaccagggcctgctctctctctccctgccagaagtttttatagtaatactttgtatctcggctctggctcttaccattaaatgtgctttttatagagtagcaagttataaatgtagtgcagctacggcatattaatcttactgcagagatttaatgaggcagttgttttgcgatggacactattgggagaggagagcgacagagttttacttcatcaccgagctgcagaaatattccttgcctggtaataattataaccacatgatctcttcatttttctttcttttgctggtgcttttccatgcaaaagtggcttggaaggaggtccatttctgggcagcagaatggctcggaaattgggctgttttcttagtagtttgacattttagctttgatcaggcatggaatccttgttgcaaagagagaaatatgtaagatggtgtcaagcattcagatagtccctgccaggccactgagatggcttttaggtattcattacttttacttgacttttatataggttataaaaaagtaaatgtggtgaaacctcatttttacatggacagaatagaatttctgctggttggccttaagctgatcccacacttgaaattaattgaagtccatacctttattgcctccaacacttttaagccagggcaatttttcattttccccaaagttgtaattttattaaaccaagttgaagcaataacagtccttgagaagaagaggaaggaaagaactacctgccagagaccataatgagaggaaaatcatgcctctttcaaatcctcatttgtaggtaatgttaacaaaactggaaacagaatgccaccatttattgtagtaataacagttgtgcctctgttccaaaagtgaacctttagttcagatcagaacactataaatccagggtcccacagcccccttcgaaaggatgacctggaatgttgggttagcaagtgagatcctttgtgatggaggccacatgttggggtagcatcatttggggtagcgggagagagaggcgcctgaggtacagtgtgctttgcagtggccctttagggggcatgatgggggctattttaaaatcctgccctgtgagagggtttataggcaacaatgtggttggaagaacaaatgtccctcaggcagcagggctgggggcagggcgacacttacaggcatgggtcttgtgtttataaccccttagactgaagtcaggggtttgaatgactagcagagtaatacaattattttttatgattggatctcaaaggactttataaaaactccatcactgaggccatgtgcaattactgaagtgtagccacctgtgggaaagaaaatggttgacaaggcaagctttcaagatgcttcacacacccactggcatcaggaccagggacccctcacacaaataaacacatcttttcaatggccaagaaagaattcctggagcaagtggaggctgggggaaaaatgtctcatcacaaagaaagagactgagaatctagtactccctacacggaggcctcataggctataatcgaacccgcctcccagagggtcccacttaagtgttgacctaaaaacaaatccgccagttggctggagcatgcatcctaaagttgcagcacaagtgaataagcttgactgacttcagtccccaaagggttttatctgtgaacccagaagtgcaggcaaaacatttttattagtcttaaaatgaccctcactctaataaccagccacagcgatggaagcgcaggccggagctcctcctcagctctgaagagcagaaactctgtgcattcatatttggttagtatctttgatatcagatttttgtagaatactcacaatactgaataataaggaaagagacgtatcctttctctctgcatattacttaaagtattcagtctctttacttacaaacaaacaggcctgtgagtctgctgcctagcatctaaataaccacattaacattcagaccctaacacccacatttccctgaatgctgtcagttttttcagaaactgaaactcaggctaaacaaggacgaatattcagcatgtgcatcctgcccctagcaagcatttactggcgtggggtcactttttcgaagtgggacagttatttccttttctgaattgccctctgggttggcagccttttccttcttggctttggtctgtgagagctctctggaccattaccaacgtgttgagtctgtaactccagatggaacatttgaaggcaggaaacgccagtgaggtgggtcataacgtgtcagtcttagagaatgtaggtatgtggacgctttttagatttggaggcaactggtcccttcccatttacaaaataccaagaaggggccctttccctccttctttaaggcattctctgccccctcttcccattattaaataataagaggcactcacctggagatggtgctgggctgcacagagagtgaggcgagagagaaaggtccagttatatttttccccagagaggatctgtggaaacctcagtcaatatattgagatgggtagtgtggtaggtgttgacataaccatatttcagatatcaaatcaatcctgattaccaacttacttaaatactacattccccaaaacaaacaaacaaatgaacgaaccaacactaaatggcctactgtttggggcacttgcctctttcatgacccagtgagattacctatacattgaaattaaagtcgactttggtttttccaaatcatttgaaggatagtgatgctgttacattaatttcagattcagaggaaggctttgaacaatggccagacagaaagggacacgcagtgggcttcctcagagagtgtgacctgcaagttagcaggcagcccacagtagaggcatctgtgaactttccaagaaagatttggcaaatgcagatcttgtagattcttggctgtagaatttcaactattcaatgaaatatcacatatcatgtatttaaataatccggtatagtacagtcattaaaagtaacagagtcatatcgaaaatgtgactttaggtaataaatttgttaggtaccttgatacaacccatttgtaactgacatggattagacaagatcttaagataggaactctgacctggggctatggccccgtgggtaggctgctggcctagcatgtatgaagccgtggattctatcccacaccacacaaaacaggccgaggggttcctgcctcttagcctagcactgtggctatgaaggtagagagaacagaagttccaggttatcctcagctacatagtgaatttaaggatagccaacactttatctaaagacaaaacattgaaagtatggtgtatatctgattgtggaggacttttctacagttagaagttaatatcccccaaattaagctttgatgattctgatttcttctaatgtagctcccgttcctcctccccttcctgcatgcctgacatccatttccttctcttattcctctcccctttatcatttctacaggaacaaaggcattagtgtatgagggaggtcttcctcttctttgccacccatccatccatccacccatccacccacccatccacccacccaaacccacctctctctctctctctctctctctctctgtgtatgtgtgtgtatgtgtgcctgtgtgtgtgtgtgtgtgtgtgcgtgtgtgtgtgtgtgtatgtgcatgtgtgtgcgtgtgtgtgtgtgtgtgtatgtgtgtgtgtgtgtatgtgtgtgtgtgtatgtgcgtgtgtgtgtgtgtgtgcgtgtgtgcgtgtgtgtatgtgtgtgtgtgcatgtgtgtgtgcatgtgtgtatgtatgtgcgtgtgtgtgtgtgtgtgtgtgtgtgtttctagttctggtgatggttggtttctctatagtgaaccaaagtgacagcatataagcatatataatcaatatatggaagttttcagtacatacagtatctgtgccttgctccttatctgtcctgccatttggtgatcattcttatgatacagataggactatttatggtttgtacaatgtgcagctttgccatcctgataatgtcactttagattgttgactcgattgtaattataatttttgttcgtatctatggggttttttttctgtataatttggaaatccaaaaaacagaacaacatgtttttgatggcctttgtgcttggaaggacgcttgactgggtggcggagcttgctttgctctcactacatcacagataatagagtaactgtgcattttgaccagtttataagcagaggtcaatttcttgcctatggtaattagcttggctgactctgggcttttgtatggtctgttaatttcccatgaaagaatatatttagcagaaagaggttcattcttagaagtagtttctttttcctttgcattgaagactgtttatttttaaagtgatttatctttctcttttaatgaaaaacttctaaaaggcagtttaaaaacacaaagtgaagtttaagcatggtttgtttgaaggggcggtgtgtgacaaggcctatacagttgggagaaagcctctgctaataataccaatggacgcttctgatcctgtgtattacattcggagactgagccctctgttgcagcttccagggaaataccgcttctggttttggtagcaagaagatgaaatgcgactttacgagaacccatttttaaagctcatacttacagtctcaattttctttcagaccccaactgtaaacttgaagacaagattgaagatggggaggcagtagactgcaagaagaggccagaagacggggaggagttggaggaggacgctgtgcacagctgtgacagctgcctccaggtgtttgagtcactgagcgacatcacagagcacaagatccatcagtgccagctgacaggtaaacagtgccaatgctgtccccactccccatgctgttctactgatgattttttttctttcagtttgtccttttgtgtggtttctgcctctaattattttgctctgtacagttaagaccctaggaaagctgaacagggatgtggagacatagtgaggccatctatgaatatgttgtgctgggttcttagccagctggagatgtagactgttttcagggtggttggctggacaatcctgactaggtgtatttttctaaaaattcctgaatggttgtctcgggcagcctcagtgttgaagttctttagagtatgtattaggtatgcgtgtgtctatatgaatgcatatacttccatatatacacttatttatatatacacatatttatatatgaatacatgcatataattttgcttactttttttctgaaatgttgggaatacagtgggatattagatgactaaaataaaacaagaactcttttaagtagttttctaagtttgctaacatctattaacttattttagtttaaatatcatctcttcagacaaaccttctctggatcctgctctaagtcagatgccctttcatattcttttgaatgaccacactttaggctccagcatttcttttgttgttactcttctgggctatcgtttcattgttgctataataaaacactgtgaccaaaggcaactcaggggggaaagagttcattccattgcacagcttatagtctatcaagcagggaagttgggaacctggaggcaggaactgatggagacgtcatcaaagagtagagtgctgcttaccaacttgttctctgtggcttgcacagtctttattcctattgcacccaggactacctgctcaggagcagtaccatccacagtgagctgggcagtctcatcaatcatgaatcaagaaaatgcctaacacagtagcttactggccaattcctacagagaccttttctcaatgaacactccccggtttccagatgctgctactttgtgtcaaactgacataaaaactagtcaggaccagtagcaagtgaggacttcacatagatggctgccactgcgttatttacctaacccttactacttaatacctgagcactgcagttctcaccaagggggttcatttcctgcctccatcattagactttgggcttatgaagggttagagctgtgcctccacccttgcattggctgagcccagcacagtgttgggatattacttagctactcactaaggctgccatgatactttgctttgctgtttgctagaagaggaaaatgtaacactcttccgaaacacagcatgttcagtgtaatgactgaataaaactggaacttgtagaatatattcctcctcagaatatagttatctttgatatgcatggatttggtgtctctcaattctaccacctgttcatcaaaagtatttgaaaaacattttgttcacaggtagactctattctttctttttcttgtccttgttccctatatgataagaacaacggctcacctagcacttatattataaagctagtaatagagacaacttagagtatacaggatgatgtgtgtgggggtgcgattcttctatgccatctgcaagggacacctgtgaattgtggtatcctctagggaactatggttgatccctcttggttacggagggtgagcagataccaggcagggatgtactctgtgtgttggttggcttggctatacgaccatggaccacagaatgtcttgctcactgttgtctacgtcatctttcactcactgaaaccgccacagcctctgtactgtgtgggcagacatttccttctctgtctctctctctcttcccagcacagtctttctttcactaaggatggtcaggggatgtatttggtagacaagttgctctcccactgttttcctagaatatttatatttgtgtaagattttaatgggtgtttcattttaacaaggtttcctgagcagattattgtggcagagttgggtggaatccaggaaaacagaattcgttattaaagtgcaccgtggctggtctcttcaaggggagagaactgtgaacaactttattaagctgtgtggtctctcttgtaggaaaggccccctttttaggatcatttgtcccctactctcttctttgacatgaacctgacatggcctgaacctcacagagatctccctgcctctatctcccagatgttgggattagaggcatgtggttagaatgatgtgtactgaccgttttcctatttttataactttgtaagattttagagtaacttttattgtagtattatttcgaatgtatagaaagcttacgaggaatttgtagacctcagtattagttaattggctatgaggtgcctatattctatattatttgtcttctcctttcttctcttgcttgtcttgcattgcttaccatgattttcttactatttgagtagtctcaaaatattgaacccctagaatgcagcttctgtatttctaggggaccactacatttttccgaccaatgtgtagttactagattcaagaaagtgaaaaattgtttaaaaacaaattaatgctcatcttattatctctgatatctgatctataatccaaaattatttcaatattgttattgataaccttctctgttttgcctaatcctgaatacagcttcatgtataactagaatgcagcttctgtatttctaggggaccactacatttttccgaccaatgtgtagttactagattcaagaaagtgaaaaattgtttaaaaacaaattaatgctcatcttattatctctgatatctgatctataatccaaaattatttcaatattgttattgataaccttctctgttttgcctaatcctgaatacagcttcatgtataacttgtaattgtcaagactcttgtgcctgttctaatcaggaatttttctccaccttcctttgtattttgggggagggcacttttatagagtacctgacacactttgtaggatatccatctgagtgggtttgattgcttcctcgtggtcacgtccaggttctgtgcttgtggcaatgccactagtctgatgtcaccccctctttactattgcaccctggtcgtaaatagcattagttcattccagtgatggtgacgttaacaccgaagacttgctttccatggtgtctaccaatcttgttcgttgtaacttactgtgaacttttatttacagtgcagggacacgtcattgtaagatgctgtcctagctctacgtcacagaacttcagtcactgttggtctccattgatgtgccagagtccttgttacctggctcagtagtatttcttttcttaataattcatttatttgtatcatcattgatttttagattactttactcagtgattcattgttcattgtatgtatgtatatatgtatgtatgtatgtactaactgtctgtatatcatctggtcatctattgatccatcatctatttgtctgtcttcatgtccatacatttactaatcatctgtctgtttgtccatccattcatccatctatctccatccatccatccatcatctaactatctttgcatgttgagaattacaaggccatatgctggataggttcttactaccgagctacatctccagctctctgtcaacttttcagtgtaattactgttctagatttagccaatgagaataattttcaactatatccttaagtgtcggtttaatatgtttgtcattatcggaggacctgctttatttctgggacaagcaaaacttctggatcaccagggcatggtagcgcacgcctttaatcccagcactcgggaggcagaggcaggaggatttctgagttcgaggccagcctggtctacaaagtgagttccaggacagccagtgctatacagagaaaccctgtctcaaaaaaaaccaaaaaccaaaaaaccaaaacaaaacaaaaaacaaaaaaacccaaacctctggatcatgttcttttcttgtctagtcatgtcctgcgatctttttttcttgtctagtcctgtcctgcggtctttttggtgattattaccattttttttggttttggttgggtagtgtgatatctgggttaattttaggaagtagggtgtttagaagtcaagacttgacaactgtgtgctcagtgctatatcttactgtctatagagctttccgctgactgaaccagtacgtgtacaaatatgctaatatgatttgtaatatacacataacaagacctgtaacctactcccacagaagtgagcacacccatttgtattttccttggagtctaacaaaaatgatatttccaattcaacctaaggtctcaggcacaccccttcctttcttctgtctctgttggtcactgtcttctgcgatgataaaaacctgcctgctgccatcctcagtgaactgagtcatttgcttgagcctagaatacaccttaagtaatcccacattagctgactcatataactgtgataagcatgtcaaccgatttcaacttaatatcttctgcagttggtaagtatcttttaatgcagtctttgcatagaatacaattaacatgtgagtgtgcattgtgacttcttggcagaatgcactgtatcttttccacatgcagattttctctgactttctctgacgttacagtctgttcttccctgtcttcctcctcagtctccaccagaagtacccaggtcaggagttctttaaccatagacgcattcagcctgctataaatgggagtgtacactgtagtcactgtgaactcttctctgcatctccgtctttggtgtctgtgtcacgggaactgtctggagaggtttgaaagtctgtggtttttgtgtgtcgcctttgagggtgttccgttgtgtgcctgagctgcactgtgtatcccctcgttttgttgccggatactatgattgctttctctgttctttgttattctgaactaggctggagtgaacatctgcctttctttgggttaatctgcttgggttgctggcaggagtggaggggctgggtattgaggaggttgaggagggaagatgcctgtttgtagagacatgttcaagctggttcccaagatgttttgtttgtttgtactcctggcagcagttcctggcagcagtgggcgacttccggtgaccatccgtccaggccagtgttcacactcccatcttctgaattctgtctttcttttgggtatgaattgaccttccttgtggatgtgcttacagttgccagtttatgtgcaccaagttgactttgtctaatggctcttttccttagaacacagatttttgggaaaatccaggatcttgctatggctggcccataacttactatgtagaccaggctggcctcagactctctgcctcctgagtgctgagattcaaggccagttccaccaactccacctgagagtcctactacacacagacaattagtaagacactgttcttatgtggaaagctggtgcgttagatgaggctttcgctcatgtagaatagtgcttatgcgagcacagccttggatgtgcactgaccagtgtgaacagagccagtgagcaagctcctctaaggtgagaagttgctgtccatcctgcttcgggattcattcattcattcattcattcattcattcactcaaccattcattcctttgtttaattcttcattcctgtggtatttagaatcatatcagggttccatgctgtacttttgactagtttgtggattcttcattcttctaccttctccaccctttcaactccctattactggataggagagaaaaaaagatagagaggaaagggggcgacattatcattagactacttcttgccgacttggggtgtcgggttctttggggcaagtttgatctttgctgtcaggatattgagtttcttcttcttacccctttgtgcactgctacttgacaaactgcaaaggacagcgtccaaccaacactgggccatctggttgttcctgcctgggctctagcatttatatcctctgaaacgtcctctaaattctaaagtcacatactagcaaaaactatcaacagctggcaaaatcacgcccctgctagatagagcacgagacaaatcatactcagctgctgttgacagtgtgaagcagccatgtatccccacagctaggatttaaactaaaacacatcctttgtggttttgtttttgttttttgtcttttaagaaacccaaatcctcacaacaccatgtttggcaaaccttccaccactgagctattacacacaccccccatcctaaagttactttaaaagttaaacattgaaagccagcactgcattctccttactgagcatgcgcttcctatggagtgcctggctgacacttacccttatttcagcttcacggaccagagagaaagcaatcactcctgtctgactttaatggtatctgcagaacatggtatggtgtaggacagctaatatttatgggttaaatactgatttttttcctttaaaagtaatcaaaatttggtctctcttgatctaaggctttgagaaagctgcagtctggcctatgctcacatagctcaacattttaattaaaggtcaaagaacaaaagtgacttactgaatgaatcatgtcagaaaaggacaaatctaatgggttttgtttctgtgtacaaaaaaaaaggaacaaataaaactgaagaagaaaagagtgattgatggttctgatgatgatactggtggtgatgatgatggtgagtgtgtgtatgccagtttttctcaacctgtgggtcgagacccctttgggaggtccaaagtccacttacttcacatggggtggcctaagactgttggaaagcatagatattttcactgtgatttttaacagcaacaaaattatgttagtaaattgttatgaagtagcaatgaaaataattttatggttgggggtcaccacaacataaggaactgtattaaagggtcccagcactaggaaggttgagaaccactggtgtgtgcatttgtattggtgggtgggactatgtttagggatgtaaagccagagagggaagagcagaaatcacaataaccacattagatgaaggtgtgtgagttgaaatttgccttagctggaggaagccgtccagtctgctcaggagaagattaaagacaggaacaattttaattaaaagggtgatgttgtgccttttggtggaagttaggagacggtgctcctgagttatcttccagctgctgtagtcaactctagaaaccacctgtttttaaaacagtggtggcacacgcctttaatcccagcacttgggaggcagaggcaggtggatttctgagttcaaggccagcctggtctacaaagtgagttccagaacagccaggactacacaagaaaccctgtctgaaaaaaccaaactaaaccaaactaaaccaaaccaaaccaaccaaacaaacaaacatccctgtggatagaccaagctgatgtagcaaagtggtattagtgtttcttcttttctctctggtccacgtttaccttcacttttttgtttcattggtttggtttttagctttatctgccctgtttgtacatttgttaccttgcctctggttcttgtccattctcagactcctgatttccttttctatacccacccctttcctattttgtgcctctcatcggctcttaaggagtctccagtcattctgtgatgcgtgtggactcatcccgttaatcttgttgcctttctttagctgcttgcccctgcccaggtagactgcaacctggaggtatttccacaaatcatttgtgtgaagaaagagtgactctgagtggtgtgttccaggactcaaatatagagtagaattagggaaaaaaataaaagtagccacatgtctcctggatttataaaacagaacacaggtgcctgatggtctgaggcctgggggggggggtgtcacacaaccccaaggttgctgggttgttctgctgtacgacagccatagaaatcctaccttggctctttcgttctcttgactacaagatttcttggtaacttcacatctatttctttggtgacttttgtctccaaaaatgatgcagattttttggccagtctgccccagtgaacacaggttaccctataccaacaaacttcagtcctggaggagctagcctgagccaagctgttccaggtgatgagatagcagagtggccttgactggtgcaggaaacaacgcagggatggaggaaggcacgaatgtgcatcagggactctggattttaggaatgttttggaatgtcaacactgtttctaagtagcagatttgatctagagtttgaccaaacagcccaaacatagccaggggcgagtggcacctgtgcagatgaggtttttcttctttgtctcgtggtactgttatttttttttttcttttccagtctgtaatccagcatgtataagtaaattacatagcatccttgcttgaaggaagagggacaaaggtgaagacaaattcaaaccccactcttcagctggagccatagacggcagccacctgcctggccctagcctcgctgtgtattcctggaggctgggacgggaggagacccagccctccagtgctgttgagactgatgcagaagatagattatcaaaatatatgtttacagaaggaaaagcacagagaacctttcattgtactaatccacaaaccctatcatttcttgccagttccctcagggggcggggagggctgcgagccagaggagtctcatcacaggactcaacaaagctttaatagcagggtgctgtggcgaaggctgagattacgggactttattatgcttacaaaacagagtaggactcagcactgtaaatcatcaagcctaagctacacttcacgggctaaatgtgtaaagtgcacttggtaatacggctgctcctccttctgagtcctttctctcttgtcttctgctaatttgcaaactcgaactgtctgctgagtgctctttcacatcattaatgtggattgcttggatgcagatgcagaaaatgccaagtagatggtgtcagctcttcactgaccggcgcccgccatgctgtttggtagtccgctgagtagaaacccacaggacaggaaggttatgtgtttgtgagaagatatatttgcaaatcagattcctaaagctctagccagagctgttatttttttcaagtttttgataaattaatacatgattactgtatttacagcatttccacctccttcctgttccagctcttttcatgccctctttcaaattcattatctcttttcttaccaccaccaccaccaccaccaccaccaccaccaccactaccaccaccatcatcatcatcatcattgtgtgtggatgcaatctattgattccgtttgttgttgttgcttgtaggtgtgtgtgcttaaggatgacctctagggattgtaaacataccaggggtttatcccttgtgaagactaattatccctctctcaggagtcattacctgccctgccctccctccctccctccctccctccctccctnnnnnnnnnnnnnnnnnnnntccctcccctccctccctccctctttcctcccttcttcccttcctccttctcttgctgtttatttttttttttttctgaactcgggctatactggtctcaggtaagtgtcatactgctgagctgtgtctccagtacacacggttgttgttattgttaatcttgagataggctctccctaaattttttactattataaccaaggttggattccaacttgagatcctcctgcctcagccttctggtagctggcgttgcaggtgtgagctgcatgtggatcagctgtttttaagcacatagtgttcctgaattggtgtaggctttgagaatgcactgagtacatgagtgactggtgtgtaaagcagcatgatggcttgattttattttcaaagtgaggctttctaggatctttgcacagtttttgagaacctaaaaccttcagcagattcatggaactttgtgataactatttgttttgttttatccagagagaatcttttaaagtgaaaatgtgtcaaaggtatctgtctacagccttggtaaactaaacactaggtggtccctctcctgactccagttctgctggcaggacgatgaagggaagcgtgactttgtgttaaaactgcatttagaactcatttttgccatttttctcagaaagttgtaagtggaagtaaactgcagaatcaatgtgctgtttaaaaaatttagttcatggtagttgaatatgaggcattgtatgttttatttgcatatttccatattaaactcaatattaattcattatgtctttattaattatttaatgatatctatactagttagaccaaaggtagtataagttttatttttaaattcccttttcttagatgaattgtggcatcctacctaaaatctttccaaactggtagcctagccacatattgtcccaaaagcctggttgaggacagtgtgcagtgcctcgtggatagatttttgtttctttctttttaaaaaaaaattatttattttatatatgtgagtacactgtagctgtcttcagacacaccagaagaggacatcagatcccattatagatggttgtgagccactgtgtggttgctgggaattgaactcaggacctctggaagagcagtcagtgctcttaactgctgggccatctttccagcgccaataggtttcttacatggcccttcagtgtgtgcatatcatcgtggagactgtgccctttagacctttttggacaaaagtatgcattttcatgtgcttttactgatgtctccccgccccccacccctgcccccacacgcacagatggacaaatgcacagaagtagaaatggagaaatgatgtaaggatgagataagcatggtttttctatgactttgcaattttagactcccagactgctttctcgttgttctggttcattaactttgcccttagacctgaggagacacacctcacaagctagtgaagagaaacgaccacttgtcctggctgtgttattctctgtagtgggtgtagcctgggccttgtctgacttcccagttattttgtcagtgttgttcggctggtcttttacctgcctggatgaaatcatctccttctccctccttgttcacacagtagctagctgataaagcttctttctgccaggagtgctgggcagcactggccatgttcttgtagattacctatgtttggccatcaatatcttgcagttcttttcacagcacttttgaagtcagttgtgaaaatctgagacctaaattaaattaaaattaaataggatgctccctgtatctctttctctggagagatccgactgtacccttatgagaagaggcacacaggggacagaacatgaagccttccactgagtggactcaaccttaccttgctttcaggaggatttgttctaggataactttttaaagttttattaacttctgtgggtggcgtgtgtttgcccatatggataatctcagcttgaatttccttcaccttggttttgagacagggtctctcattggtttgaaagtaaacatttagactaggctggctggccagctgtctccagggatctctgcttccccaggactgggctcacatggtggatcagggctcctggatcttttttttacagggcttctttggatggtactcagggcttgtgtagagggcactctacccactgaaccacctcctccgtccctgaagtggcggattatgaacagtgtcttctctgatggaagctaactgttcagaccacgagctctactgtggagcaaagtaccctctgtgtgctgcagaatggttctccttgttatcacatactccacagtatgagaacaactccagaacctctgctgctgtccagtttagagaaagtgcttcagccagccatgttattctcatctaccagggcggtgactaagtcagctatgaatttatgaaagagtaacccataattggttagcaagtaaactcctttctccaattttggggagtctgttcgctttttaccttctgtaaacacttgctatgtcagcattggtgtcctttgctatggcagattaaaagtaagtatgttgttgtttgtaattgtgtgttggcggtgtggctcttaccacagtacacatggctgttataggacagtttggaatggttgattatctcctatcactatgtatgtcttggggtttgaattcaggtcgccccattccctgacaagagtctttatccgctcatccatcctgctggccctttttgtttatatatttggttttttaagagcagttttaagaagtagaagttccgtatctgctgctctcatgttaacatgcttgcgatgttttgtccttaaggctcttagaatggtttctataatgaaatgtataatggtttctataaggagccaggacaatgaattatgttttcttactgtagctgatgatacattgcatgtgttagctttattaaaatcaaatagctcacgtgctgagagggcagcttagaaaaccaccctgtcctgcatttctgtgtcatctcttgctcggtgttcatattctcagcctgcttttcctaagttgtgcatcacaggacagctgtgtgtaagcaggatgctcctgcaggctagattcactgaatggaaaatgaacggtgcatccgcttagctctaacaagaaaacctaagtggactctgccattagatggaactgtatttacattaatatgttctttgattaatttgagtatttaaaatggtacttaagagtgttacagtttcagaaaaaaatgcatgaacccatgtgttcaaaagtcttacctttgaacatctgctaaaacacggtggttttataaaatgactttcccttcattgtataatcgagagtgaacattatgatctaatctctgtataattgggaatgaatatctagtgatctaattgtctggtttcaggattcatttgccccaaacttgtaaataaaatgtcaagaacacaaaccatgggagaatatcttgaagaacttctagcctgttcttgatttccattgctagtgattaaagctgtcagcatgtccctatggatatatgtaaaaattgtaaaccaagagctctatttgggacataaaagctgtggggtcttttgtggggaagatgaattaaaagagacccacaatttccaagtcctttgcagtcatgccgcccactgtgtccacaaggacggggccatgtgcacagaacggctctctttccatgtcgccctcctaggtgtgaaatctacactatacaacgagacggtaaaaatttcacatttttgcctgagcacacttgcttctgttttaaaggtcattctccttaagttgctggtaactgacatctctttatcttttagactatgagttgccaaagaatctataaaaagtagatgctttccacgtcctgctctttgtgctaagcccccctgaggagcctgacctcagggactggcccaggtgtcacagaggtcagggacctcttaataggtcttggaggcaaaagcaggaatccttctcccctgcgccccagggcttggtttctttaaacttcaaggagttggactgggagcctccttctctccttcagctgtaccttcaggggaaattgatcgattagaagtgattattccaccaactctgaacccttcccctccctctttgttccaagtggagcctctcgaagtttaaagggatcgcgcctcctgggtaaacagtaggatgaatgtaggtagattactgagcagaactctttgaacacacattagagctgctaaaaaatatattcctaacagtagggactatctgaaagcaaaaggggtgaggaaacatttgtttctgtataattataaggtaattatgtgggatatttttgggcacacgattagctgttagaacgtagaatcacagtagcagctcaagccaggaaaataaccggatcagcacaaggaatggacaaacagcagactgagggtggtgactaagcccctaccaggactgatagcagccatgaaggactgggtgtgtccatatcatctgtaggcactgcgggggtctagccactgatggcttgcattgtcttctaactctttgtttaacaacaacaaacttatatgcatgtattgccttgcatgtgcgggtactttggatcgtaatgcattaaacatatctacatgaagtttttggttttttttaatatagttctttgactctatcctctgctcctcaaactgtctttgttccgctcctttgttgactaaagagagctgtggtcaaggatggccaggctgctgagctcccacagcttcgagtcttacatggatgcgtagtagacagagaaagatgcgtgctagggccaggtcccagtgaattctccatttgattcttgagagatgcccattttaaagtcagattttctaaatgaaatttcaattgatctggagacacatctactttcctgcctgtttctctaggtgatggaggctggctagttcattgtgtgtggtccctcgcgtgtagaggatactgggatgaagagtggttcatctgggtggggcgatgagtacaaaagcagcaaatcagagcaaggtcacctgccagctcctgcctccccatcactctcaaaaaaggagatggtttatagacaaacttatccttgttcggatgatttgaaacaacaacacatgccttgagaaaaaaaatctaccatgcattcgtacacaaagctgtattttttggttgtatcaataaaacattttccacttaatttatgaattatttaaagtgtgtatttttattactcagactgcctttaaacttaactttctatagtctaatttatgaaaatgttccccattgtaattaactgatcgggctggcagtctcctgagcgtgcttttgtaatgtgtttgaaatctgtcaaagctatcatatacctacttcttctacttaattttattttctatgaaaagtattttcttttttaccaatgttttatagttactatcaaaaagccatatctgctggctatacaaattggtttaatatttcatatttgatattttatattatcatattttcaaagagaaatctttaaagtgttctatacaagtgaacatttgaatatatttacttagtacccttcctgttcagacatttttttctcgctgtagctgagcactctgaccagcccttcctgttctgatgtttttctctcttagtttttcttccatttgttaaggttttttgtcagggcacagaccttaggccagtggttctcagccttcctaatgctaagaaccttcaatacagtttctcatgctgtggtgaccccaaccataacattatttttgctgctactgttatgaatcataatgtaaatatctgccacacaggatatctgatgggtgacccctgtgaaagggttgtttgaccctcaaaggggtcttgactcacaggttgagaaccactgactttagtccattgcttccatccttcattttgtctctctatggaagtacccctctgtactagacaaagttcagttctctgagcacatgcccttctctccatcaccttttggagccagtgcgtcttccagagctgttgtcatcacgctgctgtttgtcctgagactgccgatatcagacccattactctgtctcctgacttccaccactctcctttccttctgtaagcaaactgcctgccctttgtagcccccccttgtccatcagaaaaaaagaaagcaaagaactgttatctccaccttcccttctgtgagtgatcacacacaggtagagctcaagttgattactaacagcgagagtgaacattttcttcttgtgaccaatgcccatggataaaaatgttcgtacatgaattagatgttatagcagggtttcactaaaagctgtcaagtgcccacttctccatggaaacacctgcaccaccagcagcatgcctgcccaaagtcctctgtgcatttagcagaatttcagtgcaggacatttatcaagatcctgttatttgactcttttagcttggatcatgattttgccattgtaaaggtccaggaaaaaccacaagaaggtggtaaaaaaatgaagaagtgatgcttagtgggaagttttaggtaaatggggctgtgctctggtggggattgtaaagtcagagttctgtcctgcttttttttttttttttcctggtgacaggctggaatgttttgctttgatgggttccctttgccattgtcatctgacaccttgctgagaactttaaaagtacttggtctaccaaggcagggtctaggatccttctagttagagtaatgaaaaaactatggcacacaatgacatagcctacactgtgacagggtaggctcttagaatatagggcccaggacctttgggaagaatggtgtagggaaaggagaccaggaacagtctggagtctggagcttcagggctggcttcggggagcacatggtgtctttgcagatgaacaagatatagtaaggtaaactctgtgtgtgtgtgtgtgtgtgtgtgtctgtctgtctgtctctgtctctctgtgtgtgtctatgtgtctctgtgtctgtctgtctatctgcctctgtctgtgtgtgtctctgtgtctctgtgtctgtctgtgtctgtctgtctgtctctgtttctctctgtgtctatgtgagtgtatgtctctgtctctgtctgtctgtctgtctctctctgtgtctatgtgtctctgtgtctgtatctctctgtctgtctctgtctctgtctgtctgtctctctctgtgtctatgtgtctctgtgtctgtatgtctctgtctgtctgtctctgtctctgtctgtctgtctgtctctctctgtgtttatgtgtctctgtgtctgtatgtctctgtctgtctgtctctgtctctgtctgtctgtctgtctctctctgtgtctatgtgtctctgtgtctgtatgtctctgtctgtctgtctctgtctctctatgtctctgtctctctctgcctgtctgactttgtatctgtgtatgtgtgtgtgtgtaagggttgttgaggcagagctagacaagttctttccgacagaagagaaaagtagagcagtagaagtgaaagccgaggatcgcctgggcagcttcggttggatccaagacgggatcgttgagagttcatgtgtttcagctatctgttgctgtgtaacagactcagagtttctgcagatgacgatgttgggagcaggatgtcttggaaattattactaggagttacttaggaaactggactgaggtactgatcaggcttggagggtttctgtttagctcagtcgtagagctgctgactggagacctgacagaggcctcggcatctgaacctctgtggaggagagcacataccatagtaaggggctttccacaaagaacgtaatgaggaagagaatgagaaaggagaggtggtggtggcgaggaagactagaggaggaggtcaggtggaagagaagagggaggaggaagaggcaaggggtggagagaggaagaagagaagaggagaaacacaaggaggatgaggaataggaggaactgggggaggaagaagaggcgaaggaagagggaggggagaaggaagggaagcagtgtggagcatccacatgccttcctgggtatcttcctactctggtaactaacgtatggtatgaacccagggctgatatgaaagagaatcacacaggtttaagatggaggcggtaggggtcattggggctatactgtgggctcttgactgcaatgaactaggaagagaagttggatcttatgacaaaaagccaagctgagaccttccatgtgagtctgtcctctgcatttcaagcatccattatgtatgcatagtcatggggagacaagttagcaggggctctctgtttactggtactgtgaagtcaaggcagggattgtcctacattctaggaagatttgatgacaatattaagcttagagatgggtggatgtttgataattactgttttgagcaacaagtagctggggcaggttatgtgtacaaagatgaacgtgtgttcccattggtctagactgcacagagcagggtagactggagaactagagcaggcattctagataggaagctcttgcaatttgcgggcgggagggtggggccaagtccaagcataggtgaggaagaccacacaataactaggaggcaagactgctcaggtgtactgattggttggtggtgggcatgggaacaaggtaggaatggtttcagagccctacactcctagagggactccagtatggagcagttgacaccaacaccaaaatgagaatggaaagcagcttttcaagctagggtggtggcagtcatttttgccctgtgaaatttgagactctcctgcctagaacttgggtgtgtccttaggccagaagcaaaggtggttagcagactcctctctcctcctcttcttgaatcacggtttagctttcccttcactgttttctttcccacaataactctacgtgtgtaactctttctgatgcagttttacaatcattaacttaattttcgcatacatacatacgcacatacttacatacatacatggatggattatgcaattatatgtacggtcacgtttatgtgtgtgggcacaattgtgcgtgtggcacagtggtgccagggcccaaggttggcactgagtgttttcctcagtcactgcccactgtgtatgttgaggcatctggctggacctggtgcttccctttccagcgtctccagggactgtggttctgtgtcccttatgatggggttgcagggggcccccacaccaccatggtctgcagtgtgttctggggacctgaactctcatcctcacgcttcggtggcacctcccagttcatgttgttttgttatgcaaaatgtttgttcaggttgataagtacctgagaattctgttctgaagagaaggctcctgtcgctagggtgatttcagcaaatggacaggagcaccccacgtctctgcaaagggcatgcacaaaggagggagctggctagtgctcttgtctttccagagatggggatttcaacaaccaggcttactgcctcaccgaaacccagcaaattgattcttcactcccagaggattagcacagcgctctccccacacccctccttgtctcccctcccctccccggtcttcctctccctctcctttttcactaatgtccatctctatgggaaatcttattaaggaatcattagttttggccagaaactgccgcccccttctcctccccactaaggagagagagagagagagagagagagagagagagagagagagagagagagagagagagagaagaaagaattacaaggcagaattaattttactgttcattgcttggaatctgtgaccaccttgtgaatcttgacacaccacttttatggctgattttcagactgccgttttcccatcctctttctttgtattattttcattaaaaattccattagctaaaaaaaaaaaatcaatgtaatcattttggtagtaattaattcttagcagtcttctaaaggagaaacgaaggaataaaactagaaagtgttaaaataagtagaaagtcgtgagttctctcaagggccccttagaaatgggggtgtggatggtggagggggacattctggcaatcggtcaaggacggtggccaagccagtactgactgtcacccgagctgcatggctagaagctttcttctaaagcctgcgtatcttgaaggaaggtctgcaatgaagcactgataaaaccaccctttcccagagggccaccactccctctgtgagttttactgaagtggtgggagcatcagtctgctatagcatttggcacctgaagggggctgatgaacatcctgtgtattattgatattattaaacttgatcatggttctgtgagagaagtcatgggagtcagattccagatttgaaaatattcccgaagagtttgaaaagagaaagtgtgagcttagtatttagtgttgtaccttaaaacgtcccctttaactcagaagtactcccatgtagagcacttgcctggcttgccccaggctccaggttcagccctcagtactgccaataaataactcagaggggctgaagcatcctagatactgcaggaaggggcaaggaattctactgggttctctgtgtgccaccttgggaagatctgtgtattcgactttatcagaacagagaataccatgtttgggggaagaagaagaagaaaccctgcttctttctgttatggaaaaagtgctgaccctgcagtttcattctctataacccaaccccgcctggcattcacctttcaggtgcactctgtgtattgagcatgtgatcatgcgcagtgggcaccactgaaaacttctgccctcatattttacttactgactgccatagatttctccccacgcagacttctagagtgactttaaaaggtctctctccagttttatgaattagctcaaaaattagagcacattaattttcatttagtggagtttaaaatattcatatctcatgtttagcagacaagcctaagtgtcttgaagttggtctggctgcagtggaggtgccagggagcaatggtttggaaaaccacctgcgcttggtgtatttgtgttttctagggaataggtcggaacaaaatgtgtttgtgcatcaaatgttcagagacggtaggctgtttttgtggtgcgcctggcttattgaagcaacatatttaatggggatgtggtagcttgctttgctgagcaccatgaggggggcaaaggaaatgtgtcacgaactctactccaaggatcgaactgtgcactaggagaacaaaacactcttgtctgaaattctaatgttaaatgtggcagtgtgttattaaaaggcagaatcattaaaaggggcaagtggtgcgtgtgttcaggagaggtcttctggaagaggtcagaggtgagagctgcccagaggggtcattaagaagtgaatgggcagggaggggctgtgtgtggcaaagctagatagggcaatccagggcggtaattgctgatgtttaaaaagactccaacttcaaatcctgatgtctcatacagacaacagtttcataagctgtagcattctgtcacagcaagttgcacactcagagcattcaggaattccagcagggcagagtgcataggaaaagtgctgtaggtatacacaaagcaacctccataaagccaactgctggccggccagcaagattaacaaaacaggctttacctgcggtcctctgatgagagagcagcttgcagagtccgagagagtttatgcacagctgttaaaagtgtgttaggctgcttcggcagcatttgagagcagccagagacacctccacaacatctttaagatggaacaggcagtgcggactctcacgcaaatgtctttacacaccagaagtatggttagccagtctccaagagacaacacctatggcagcactgattacggaaatacttttgttgaaatgtcctggagatacttgagatacttctcaaggcttaattttcatttaactttcactcttattatgccgtgagcctttggtgcccatggaatgtaaattttctctagtgatggaagaaatcactggcattgcttttaatagcttaatgaaaagtcttgttgcttcttaaatttatattttcttggtgattgacaataggtcaatattttctctactttttaataagaagattaagaaatcaaacacttgcttgagtcctcccaacaacctcattctatattgggtctagaaccagtgggtgtagtattagtcttatgtttagtgaggtggtaatcttggtacagggtgaatggctacatttcccatcagccatacagtgtgaaaatccagttatcccaggtggaagttcccacttaacaagtagacccagtcagtaggcacagatgtcttctgttgtttgacaggaagatcctctttctcaccttctctgccccatctaaaagtctgtggggactttggtcttcagatggtggcactattttgggaaactaggagatggggcttagtggagtgaggtgggtcataggtgaatctttgagatgctgtcctatcctaggccttgacttgatttctttctctctttctatttctccaccaacattcttgataacttgatgtatcaagtacaggaggcaaagcagccatgggctgaactgtctgagatcgactcatcatggaattgactccttttacattgttctgttagtgtattgtctcagaagccatggctgatggacagaaacagaagaagataaagtcataggtgaaatagtattctctaacagaaagtccaagataaccatagcctacttgacaatgacgtttctttatgtcacttgggtgagaagtacagtggtaaataattgagagtgggcttgggagccctgggggagccctgggggtcttcagagaccaaggctttattccctggtgctccattatctaggacatgactggcattttcaagtaggaaaacatggctgctagagtttgtatcccatgtccagcttggattcagaagagagaggaagagaagagttagctgtgcctcctgggacagcttctcctgagagagcctgcccctgaattccacagtcacctctcactgacctcctattggaaaggatgggtgtggtttgagctacacatctggcgatttcacacacagttgctgtatttgattttttttattttacattattttataatattttatattcctagagataatgtctcttccaaggtcatgtataatttaaagaatgtgctaaaatgtaagagcttttaaattcccaatgtggatggacctctttctctggctgataacttacatgctttaattatttaggaaaaagcacatcacatttttccagtgaagaggctgcagtcaaaggcagagctaggggcgaggactattttgttggcctttgtcgttgttattgttttgagcacacagtactcctagagagaaaataaggaaacacgcctttatcgcagctgaaatgcttgataaagccaagtcaggcatgttatggatatatgaccccagggagtgttttctgaaccagggtacaacattggaaattctctgttcccagccaacctcaacactttctgatagatccttaggaactctatttcccatgaagactgattgtccttgtgtatgggggtaaattaggtgaaagacatgtcacttctgtaccttctgtatgtgatgttcatctaagcactgttagctttccattgtcagcagggggacagacacaccaatagggtgcaaccaaggtagaaaccgatgcctgacgtctgaagcttcattactaagcataccatggacttcaaagtactgtccctttagcccaatccccttcgtctttatggacctgcccagaatcacttgtgataaaattaaaggggttacgagagaatgccattttttcagttgttagtaaagtacacagggctagaatggaatgttccagaacgaaagcttagagttgggagaccctgtgtactcacctgattgagagcttctttttcatagaaaagaaaactggggaaatgacttgtctgtaaggtgcctgctgtgcaaggatgagggactgagtcttggtccccaggacccacacggaaggttgagcatgatcatgtgagtccctgttatcctagtgattcgggcaggagacaggtggatccctgaagctcactggctagccagtgcagtcaaactggtgagctttaggctcaggtaggaaccctgtttcaaaaactaaatctagagagccattgatgcaagacactgcagatgtacgtgtgcactgtatacctatgcctccacccccatccctgcctatctaaacaacagtaatatgtacacatatgtgtggacacccttctcctgaaaagaagaaacaaacttgagaatgatggtctgccaggacttagacattgggcttctgtctccaagtccagtgttggtttggcccagaggtttagggttccatgaacagttgtcgacaccacaagctcttacccacaagaatagtctgggtagaggacttgctaagaattgacacttgttccggagtttcctagctacacatctgcaagaggacaaactctaggaaactcttctccttttccccctaccacctaatttgaatatttccaccattaccaaggttctcccttgatgctttggaaccactgggagagaaccttactgatatttcagaaggactgtagaccactggatgcctgcacctgcaacagggtgctattttgtttcagtccagtggataggccatgaggctggtcaccattttgccattagagtaggctttctgggcctctgggtatacctgctgatctcagcaaggaaaagtctctccctaccttattgtggagggtgttacccaaagacacgaggttggcttcttgtattctgtgccctgagtggacagaaaggagggcactgtggttcttctcagcttctttagtggccacaccacacagtacccatgtcgtcttgtgtcctcatcagctgttctgctcaactggacacttcagatctctctaaccctgtgtgaagccttttccagattttaataaacctctaatgtgtcccccgtgtatatcctcggaactccataaaactgggaacagatatgatggaagaaaaagcaaattccggctgccagtagctcgtgcttgctaattggaaaagttatgggtgctttcaaaataaaagcaagtttatagatatcctttatagaatagctgttacattgttagagaattaaaatgtatgtcatcgcaacaatcatccaccgttatgttagcaaagctctggagaagcataaatgtttctcaacattgcttgatgcttgcaaattattaatatgtacacgtctgtgggcgggaaggaatttgacggaagaaccaaagggggaaaggaggagcagaaaggcttgaatgtggatatgggaatatacgcctctttcgacagcatcctggaaaacagtgatttgcacatctgtgtgaagaacctttagtatttgtaatgtaatttaaaagttatagtggcttctttacagttgctttggtgatattgctttggctttgctgaaacactgaaaagttactggttatatttagaaggctgtaaagaaacaccaaagtgagctttctgttttgcttctgcactgttcggtcaaaatgcacattttaaatagcaactcctgtaacattgccatctcatgcatgcatgtgtgtgtgtgtgcatgcatgtgtgtgtacattctgttacattgtcatcttgtgtgtgtacatgtatgtgtgtgtgtttgtgtgtggacagaggggggagagagagagagagagagagagagagagttagtttcagctacttattttacactgtcatctcctgtgtgtgtgtgtgcccattatgttttgtattgttgcaacaaagtacaatgaatgacttcaagggttgttctacccatattctaaatcaattatgaatcttaactatctatctgtataaacctatatagactttttcttatcattattccataaataacatagcataactatttgcatatcacttaccttatatttgtttgacaggtattgtgtagatgatttacagtacgtaaagaagtgtgtaggtcggataccatatgggacttgagcatctactgaaatttgtacccaaggggattcctagaactaactccccatagatgctgagctatgactacatgacagaaactgttgcaatttttgttgctgaataatgaaccactataaaagttaataccttaaaaacaataacaatgtattattctttcagactctgggttaattaggtggatcttcccctttgtatgagatgaacttggaggtccagtgtggtttcatctgcatggctggtgctggctgctccattctggcatcaggcttctgattgccatttatagaggccacctcccttaccatagctagggtctagctttcaagcagaagtgtgcccaggtttcggctgcagcctggggaagctcaggctcagaagaacactgtgttgctgccatcttcttctactatttcaaataagttccccatcttactcgggaatgagcaggggacatcaacgccatggtggtgacaggagaaggtcacactgcagaagagcatgagggacaagagttattattgtggtcaccttgggaagcataatctaccagagaaatcaaagcccttcttattatcacttcttttcttccgaagtctgtcatggcgttttaattgatctcgtgcctctccgggagagccgtggagcatggacttatcaagtgtaatttcttaaatggtcgccttttgtccccatatagcatagatccccttttgagagtggaatgcacttaatagccaaccccactctgtcctgtcaccagcattctttattttttaaagagatggtcatcaatatatagtggtttcttaccttgactctcatggggcaaatgcctattgcaaggccttaaacacctgttacaagggagtctgctccttcttttgcataaagtataactgaggatcccctaaatatttcttcctaggtgaacgtagtatatataattggtgtcatttgaagtctccaattctggctgaattacaaactgtccctcactttctgtctgtagcacacttgtgttttaggtcatctcacagacttccttgctctccttccctggactcaggagcacgagttcgtgtgaagcactccggctgtgttttgtggccacaggttagccttgacctgctgtggttgtggccccaagagccagcgtttactcagcagaggaaagctgctcctgatagagatgagtcagtttccgtctgcatcgagatgtttactcgtggggacaaatgcagaggatgacaagcctggaccatgtgaccacccgggattgtttttcctctctgggtttccacgtgggaagctgttgtagtttagagctttgctgcagctgagcccaggatgtccgctgtccaaggtgcatccatgtttgtcggctgcttctgtggctcagagccagcagcacattcttttgagatgcattcactctttagaagagggacaccatcctgtgtcttcctggaaggctggatggagccataggtatgattggttactaccagtgaagggccctcaaggtcagcaaattacagtgccattgccttctgcagcatattgtgtgtgtgtgagtgtgtgtgtaagtattaagtctaaaattatttctttgtggtaattgggaggcatacacctatgtgtatttatataagtgtataccttattagtttcattatcatagttgtgtctggatatggagagcgaaaagcaactccagaagcatttattttggcttattcctcaaatacacttagtccaccatgatggaaacacgtagccacaagtgcacaaagcagctggtcaccttacttctggagaagggaagagtggagtgtggcaaggatgtggagtggggcaaggatggaacaacccttccagattccctgttcccctgtcacccatcccttctactgacgcttcacttcctacagcgtccacaactttccaaagagcataacccagctgggtgcggggatgtcatgtgttcaaacacacatttccatgagtgacatttcatatttaaaccatagcatgtatatacaaacatacttaccgaagcatgagtttcttgcctaagtcaatacttgagcatgtaggtcgggtttgtattcagatacatgtgcacatatgtgggcttaagtaacagtgtgttccccggttagactagatcaagtgtgtcacggcaattacccaggtctcctatttaaagtatgtgatttagatgggacaaatgagtgtcacgggcattgttatggaggagctgagtgacaggggaactgtcaccatgctccccattctcctgagatgggcagggaagagggatatggaatactatcagacctcttggtttgagccttccatttgctttagcagccgcaggtctacaaagaagtgcccgaaggtctagtctcagatttactctgactcagtccacatcccataatataggcacaatgtatttgagagggactctggttctatgattggtcccagagttcatggagtgacagattcctttggcttggaaatttcttgtaataactgacagaaagtgttgaggatgtagtctgaaggctgctgagaatcccatattcctgtgattgtgactactgcttttctgtgatttcaatgaaatgccagtggtctacgtttaatgaccaaaccctataaacccctggtggatgaatgattgaatgtatgaaatgtctcattagaaagaacagaaaagatttcttctctaagatgcccattaaggagttatgaaaattcttatgttgaaaataagagactctgaaatttatctaaatcgtagtcctacagaattaaagaatgactgcctttagggaaaacataccgtaaaatgtgtgggaaaatgtttgatttatttcagtttgtagtttctctggaacctgtggtctgtgtttgtgcaacatcctagtgcacatggggctttgttccattgactattagctcatgtagtcttaagcagtgtgaacttttgtagacctgctacatgtagtgggagccacacatatcccaccttctagcagaaagctgtggtctattcctaatgttcagaatactgtctcaagaatttatgttaccctctagatggggtgaagtaaagaagaaggttttgctaagagttttgaatattgtaaattgatcctgtccaacaagatcctctctgagaagagaccatctggctagcatgtgcttgctatctcccctccttagcaaaactggactataaggaatacacgacttaaactgtatacatgatggatattttgaaagactttctgccttaaagaaagatgttcatgttttaggttccatgttaatttattgtaagtctgtcatgcttagtgatatcagggaagggaaaagaaatggtttctgtttctatattcttttccttcacagagtaaccacacaggcacacacaagtacagaaaagcacaagacattcttgtgaccattcctgcattcaatacttacttcccaaactgcaggtgccgtttctttgactgaataaatatccttgaacatgtttagaaatattcctttctaggatcctgttaacttgcaattgttcttctaattgtttttgagagagagagaggtagagacagagagagagagacagagagagaggcagagacagagagagagagacagagagaaagacagagagagacagagagagagacagagagagaggcagagagaggcagagagagacagagacagagagagacatacagagacagagagaggcagagagaaaggcagagagagacagagagaggcagagagagacagagaggcagagaggcagagagagagacaaagagacagagaaagagagagggagacagagagagacagagacagagagagagacagaaacagagagacggagacagagagagagagagaatgcacaaacacctgagtgtgcatgtgtgtggtgcatatgtgtatgcagtgtatatggagctcagtgggaagtgcaaggccttctgttccccattcagacactgtcttgttgtttgtcactgcatttgccatgggagcccacctgtgagcttaaggagcttgctgtgtaccctcctcccatcttgacataggagcattaagattacagactcctgctatttcatctcacttgacttgggtctaggagtctaaactctgttccttgtgtactttactaagtcatctttctagctgcctgactcaggatcatgaaaggcagcaaaatatagggagacacattttaagtaacacagatacttaggcaccaagtgtgaatcccagatttgggaactttggtttcaaaatgacccactttatagcaagggagacttgaacttgaccttgaagaaaaggcgatattgataaagataaagaagttagacatgcgttttaatacagacatcccacaatgggatcttagaaggccaagactactatctattgtttgttcaagaaagtgttctaattccttttcctgttccatatgactttaccaactgacaccgtgtcccatttcaaggccatcggcaatggcgttctgttagactatagtatgatgtagtatgatgtagtatgtagatgatttcctgaacagagaaactaaatggaggttcttaaatcttagcaagttcattcaaataactctctgcttcttgcataaaggagtttgattcttgaaatgtgcaaacccatctctaaatagaaggattcagggttatttacaattcctctgaatggaactgtatctgtagagaatactaattgcaggtgacagtcacttcactttgtgctgtagtgcctctgtcaacaaggatattattaccaaaatcatagatctagacagtatatatcgtattgtaaggctcttttctttttgaaatgaaataaagtaagaatgtcatttctaagtcatatgatcagaacttatcaaggaatatagacagaactgtagtacagaagacaagaagggaagctttaagccactgctgtgttatttgagcccctatgccttaaagcaaagtaatgagaaatcaaagcttcttagctagacatccatcagcctagctaactgtggcagttcccagggctggtcagaatggggcaccatggagaccttaagattctgctcatgggagtgaaaattggtaggaaaccaggatggtcttgtctaacaaattcaaagacaagtgtactcttcagcttggcattttcagttttttctagtttggagcaaagtaactgtgtgggaggtgacatgtgcttgcacatggatattcacagcagcacggttaacactgttacctggaaacagcactgggggcacagttaagtagataaagtctcatccacacaagcatgaaaacttgagttcggatgtccaggatccaaaaataagccagggatggagtggggtcaagtaggggcaactgcataagtggggtcatagggtaatcaatgagctcttctttagatgagaggctatcccccaaaagataaggtagagagagatgacaaaagataccaatatcaacctctagtctctacatacatgcacaaattcatgcttgtccacatacaaaggcttggacagatgtacacatacacacacacttgtgaaagcagcctagcttcaagccaatagagtgtcactatgcatgttcacatgccgggatgttatgaacaatgaagagaaatgcacagcaggtatactccacagggcgagggctcccaactctggagaaaatggagagttgactcaagaaaatagacagcaaatactatagcctgaatgaatccatccacacagagtcaaaaacttcgattaacctggctgctcagttgtctgcataggtggaggtagatgacaaacaccatcacaaaggtcacgctcactctgagacagccggaatagatgatgtgagtggggttctcggtggtctgtgtaagtgctgccagccttgggttgcttggggtgcagcttagctgccccaccactgaggaggttttgtctttctcgttgggtttcttgtaattattgactagattgcccatttgctttcttgtaactatatatatttctcgaaatatatagtatatgtacatatgcatatatacacatatgttttctttattttatgtggaggagataaagtaaggaagaaatagcagtataaaaaaagatttctgtcataaaatttcttaaagcacaagatagttctaatagaagcgtaggcacattttctaccaaatgtgtcattgttgttagattctccagtgaatggggaactacagctttactactagaatctaatactttcaaataagaagcctcaatttttctagggtctcaggaaaagaaaaggtccaagattttcaaaattaaacttggtaacaagctttcctctagttgttttctttcaggttgtatatatttggagatggcagcaggccattgagtgtcacttgcacggaaagtggctggagaatcagcagaaacttaacaatgaggcagggaatgggaattcttgtgttatctagagaaaccaaaaactttgtgttgctcttattatttcagaatcacctgtgaggtcctctttaaggaaagccttcatcagacctctgttgtacctacactgcagagtattacgcagtaatgaaagggaatgttaataaaatcatttctttttcatgttgatgtggatcaaagttgtgacttcaaaatacagatcataaaaatgaaccttttcaagattcttggttcctttcattagatttgatgtcccatgctctgcattaaagacatttatttgcaagtaagcaaaaccaaaacaaaaaaaaataccccaaacaaaaataaacaaagtaaaatacacacttcagttgtaatttgctaattataaatctattttttaaaaacaagtattttgtcttaaaggtgaatttttaattcaaatatgtgataatcacaatgaggcagatggatcaaaagtgaaggttgtgtctgcaagaaaggcttgaagcaactttgctaaaagcagcctaccaaattggcttattttctagataaagccatataatactatttaagtaactggattacaaaaacgaatgttaacaaagcagctgacaatttgacgattgagcataaagtcagctcatgttttggagagtatcctgaattcctactttaagaagctcaattaaagtttggaaataataattttcttgttaagtctctgaagagcagcaatagggagactgctgtgagggagaacctgaaaaagccagcattaaatattggacccctggagcaaagattcatggattcactagtgtcaaattattggtaatgactatttagagctctctaagaaatttgggagtgtgcatgtgtgcttgtgtgtgtgtgtgtgtgtgcttgtgtgtgtatgtgtggtatgtgttgtgtgtgtgtgtgcaagtgtgtgagtttgagtgtgtgtgcatatgagtaagtatgagcttaggaacttttaccattgagcagttctgcttggagccctcacttagacaaaagataaaagtgagaaaagatgacttatggtcatttctacaattatatttatgatttgtctctaattattgattaaaatgatccataagcacaggagactaactagagtgtctgtattttttgttgttctgctatttctttattttaatttatttatttaacattgaggaagtaaaatattgactgggaaaaagaagcaaattgtacaggagggaactactgagcactagatctggacgtgaccttgagtcctcactgagctgggtccaccccaggttcatgaaccactgagactcctaagactccaagatggaaactctctggatttgaataagatcaactttccttgtgttcagatggggaagttttatgaattttatgtatcttgaaattctgcttaataataaaaaagatagtttgaagtccatagttttagtacttaaaccacttatattagtcatattctattgctataacaaaaagtccaaggcttggtgacatataaagaaaagacgtttagctcaccattttggaggcccaaagatatgatgttaatgtgtacaggattctcatgaaaaatccttgagctacatcaaatcaccagaccatatgtgtgtgaaagatatcataaggtaggagaggaagctaggaataatttggtgctcagacttactcatttataataacctagtctttaactgtgtgtgcagagtatctcttaagagcattgcttgtcaagagaaaagctgatgatggcccatgacatgaggcaggaactaggaggtgggacattggcaggaggagaggattctgggaaatagtgagaggataaaaaggagacttgtctgggaactggggggcaggggatgtgtcagaggtaaaccagaaagtagctgaactgaagttagaataaaaagagcgctagatgctgagggagatgctgtggagatgcaaagaaagaaacagactgggacttaagagagttaactaaccaaatggtaggcatagaataacttgactgcgttaagtaagttataggccagtcatggaatgagccaaagcttgtggtcaatgcatttaataataaataattagtctcagagttgttattgttgagtactaagtagaaaagaaaaaacagatttaatatttttcacaactgcgtctcacaagagctatcatagttctttcaggggacagtttctccaatgacctaactagttcccactaggctccaccctttgagacagtgtctctctatatagctagtgagatggtatgtaacctatggtggcctcaaatgtgtcttgattttctgcaagtatcaggtaagaggtataagaggagatgcaaaagacctggtcctacaaggatgctgtggggagctttgcagaactcaacagttgcaaaggcattgatgaaagaaactttttgttttgcttttccagactctaatatattcacttattgtgcccctgcatgtagatcactcattggaagtctaagctccataacactgtatagatagtgatgaagacccaaagaacaaggcagtaaaattagcaatgtttgcacaataattgtgtgaatgctgcctggacagtgtgggtgatggtagggtgagggggactccagtgtaatgtggggtgctgtcaggtgacatgagtaagtgttagtgtccatgctcatctgatttaattcaagccaaaatatgcctttgattttctaggcagatttctttcttttagtaaaaagaggctcaaggatccttaactctgttcggtttccctgtcttccttctattctttatttccataagtcctaagcaggcaccgcttatgtatcaaatactgtcaggcactgcatcctttgttgttccataagaagttttgatgtgttgtttttttttttttttttttttttttttgaggtagatggactacaacttctgaagaactgggattaaaataatgctacgaatcaagcatcttccagttcgttgttgcatctagaagagatactaatggtttccttctgcaaggcccaagtttccaatttttctgtacagttgatatagggaaattctagttctacactcagaactagtagtgactgcagcatgcttagggcttaggctgcagggtggctggcgtccactgagagttgaattgtctgcaggagtgttggcatctgttgactcaaggatccttgggtatttgaaggcaaaagccagaaagctgacccgtgtttctcctggtgggagaaggagcttctattttaactaactccacacaaggggacccagccatcttggaattaataagtggcagttgtgatcctgtattatctcaagatcaaatcttcaatctacttttacatgcctgagcttaatccaactgctagtgggattaatttctagtgccctttacaatacccgggaatagactaagatgtccacatccagacatacttctgaggggtggggatactttccctagctgaagcacttaatggatcatgcatttattctgtctagtttaatgaatagtatttaaaagtgaatgtataattagtcacattagtcaaatatttgtacttttgtgtattttcacttttcataagatgctgaaatggagaaggtgctgtgactggtaggtagtcgcctcaaagatatttttcctgactcattatttataattgaatgtgaaagagtgtatcttacttttttaaaacgttcatcatcattatcatcatcgtcatggtggtggtggtgtgtctgatgtgcatgttagtaaggcaagtgcataccagggagtgggtgtgtggaagtccaaggtcagttgtggagagttagtcttctctttctaccttgagttgtggatatctgccttggaccgtcaggcttgaacagcaagcacctttacctgccgagccatcctgcctaccatcttgttggcttattgttgagtaatgtcgtgataggattcttcagtagtgccctggcagttgggcaaacctaatagctttattgggtgtctaatgttcctaccgtactttccccctgagacatctagaagctttatatttcatctgaatcagatttggacatttattagcaaaatagactacactaatagcaaagaatccatctatccatccatccattcatgcaaccacccatctttttattcaagaatatggcctactgaggcactctgtacactgctcttaggagcagcctctgtctagttgaggcctgttaggaagcaggatagtagcaccctgctgtctaagcagtttttgttggttctctggattctcagcaaggggcctaggaataagagcatggaatgcatatttcacaggtgttaatgcttggcctgattgatgaaatttcaatgcagaatgatataccagctttctgaggcattcctagctatctcagtggtctggtaggaactcttaggtaagttctgagggacaaagaacaaggttggaattggcccttcctaagaagatcagtgtcttggccagggtgttgtgaattctaaggtacagttcatcttggtatctttactcatccaagtactctctctgttactgcagatgcttataaactgcagacagcatgccgttcatgaatttggctgcttttccattgctgctatgaaaattgcaaacaaaattgcttttcattttgctttgacaggcagttttaattttattcatcattttaacaaactgtataacatttcagctatatgcagcttgtcttttgtctttttctgcactatatttatgccgaaaatatgaaaacaaccataaagaagagcccaataatagcaagttatagtaaaaagggcttattaaaaggatattttctgccagggtaaaaaacttccttgaacacatcataaatagtttataacgcgtagaaccgcacactttattgtctgcagaagttgattgtgtagctggccacattttaaaaattaaaaataataatctctctgtcccaattttgaatttatgttttgttgactcagaccttgtcacagcctaattagataatgattatctgaagtcacccgaaagtctcttcagcctcaccagagagttggggagtgagtgggggattctgttggttaggaaagatggaagatgctcataggatttatctgataacaacgtgtgtacattttcattttgtagaaaaatgactaatgctatccgggccaatgggcttgcttttattatgtgctttccaagctcttcgttgtagcttcagcaatatgaggagccctgcaagcaagcaataaaaacagagcagctctcttgctcgccgcctcattgatgtctctcacacaaggcaaggtctgttcaaataatcactcagtgctggtggcatgctctctaaccttgacttccagaggactggagtaggaagagaatcctgtctgccagcagtttgaaagaaaatcgtgtttattcacaatgctctttaggacataaagacttttatttaagattttcaagattgctggtaggatgattcataagcaaagtccagttttccttagggactaagcaccacggtttgttttttgtttttctagcatagcaactgaatttcatcattcattctgtcatttagcaacagaagacaacttcaccaaagaacttcacagtacgagtaaaattggaagtaaatggaagccatatgttgttgctgtaatttccaaggttaaaaaaaaaggctatagtttaggctatagccttttattctaagtggaaggaaggtaaatgcttttattatcaatggccttaagttgtaaccaaaaccaaaaaaaaaaacccatttattttcttaatggcagaacaagacacaggtgacttcagtgctcaaagcaaggctgatgtgtggcggtaatccatttcttaacttatgtacaactgtgcagttattaatgctagtcaggttatgtggaaggattcaggaaaattctttattcctcattgactcctgacagttattgtacctaggaactgggtaacgtgttctgaagtgagcaattatggaaatgtttacttcactggctgcatgtaaatgtgtgcagagaatgtaccagactttctccttgggggtatttaattctctccagggcaatgaaaatcaaatgatttctttctttctttcttttttttttttaagctttttttttttttaagtgttctaatgcagctgataatgatggatgcagtggaggaaaaggagaaaggtaggaaggaagaggagagaaagagggagctgccaacagccctcgaaagcggatttcccaacaggagagctgagaatggaggcagacagaaggccagccctgttagagatgcaagtttgcaggggaaatgatgagaaatgactcttctaatattctgtggcagtacagtggcagttgtcacacatttatctttgcaagaacttaagctccgtattgttcacatcgaaagccatcccacttgcttgttaatgaaacacagaagcagttcttcccatgaacagtgtgtgtgtttggggggcgggtagtccacacatgtatgtgaagttctggaatttctaaggatgcaaatgagcggggcatagtcacagccagattaccagtggcaaagagatttatttcttggttttgttttgttttttgtttttttgttttgttttgttttgtttttttgctttttgggttttttttttctcctcttttgagaagagggtaaattgctgagaataagatgagactcaggaggacttgtttttagcctggggagcttcaggctcggacactttctgcgagaggccattggagatggatccaaatagatacaaggtggtcttgggcctctgggtgcgaaactgagctgtcatagtaaaactgtttgtgtgcactgtctgaagaagtctagttgggcaagaacaattctataaatttcatgcaggtttatttattatttatttattgtcctgacgatagtgaaagtaaatactgttcaacttggcctctgcagtcacatgcctgtcactagagttgaacggcactgagaaggcatgctgactggtctttatactctctagttttgttttttttttcttttttcttttcttgcctggaatttctcctgaatttctcaaggaggggtttcataaaaagggtttttatgtcttgcagaaaattgagttttgtagacattacctaactcttgatttgtcacaccgggatcaataacatttcgctgctcttaaacacacagaatcacaggggacacataatgttttttataagtgcagtaaagttaacgtgttgttgaaacaaaaactcctctgacagtcttgtaataagtacactctgcaactagaaaattatctgtaatactaggaaaggcaggaagagcgcttaagagtacaatgtgtacgttgttggcatcaggcactgcaagaataagaaattagcatctgctgggctcggcatgtcagaatgattaccgggagtcactttcctcagaagagaagccgccggtccccaggagtgatgcctgccaccacgtttcaaccaagttccattgcttatgtttggtctctttgttctttgaggatattctgtattggttgcagagagaagccctttccttacagcaaagaaagtattggaagcaagaagaggggagcacattttctaagactcttcccaaaagtacacgcttcctggtccatcagttttcttttggaatctcctatgatattctaaagatgccttcagccagtgaaagtcccctatgatgtaatttgtaaaagctatttggaattgaaatcactcttggatgtgctttcatttcctcagtccagggagccagagatcctgggttacattagcctaggtgggcactgtgtctaaccgatgcggtgcccctgggccacgccacagtgtcttctctcaccccctttccacctcattaaatttcctagtccccctttcagctgcctaaagctcccctttttgtccatattttcatttttagttaattttatgagtacagtattattttccctctctttcctccctccaattgatgtgtcctgttctgtgccttctcaaattcatggtatcttactctttaattattatatgtgtatgtaaattacatatgcaaattacatatgtaaatttgtaggaacatactacctgctaagtccctctagtgatgtcctatgtctggtgtagtggtctggccctgtgggcttggatggcctgttagggagtcggttcctggagatgtctgaacctccctctctccacatctggtgctttgctccccgacttagattcccaggggaggagcactatggattatactgtcttagggagcgatgtgtagtctgtctgtcactgatgcatgcatgacctttcttcccttttggcaagcgtctttctctgtctgtgagaataacatggtagcctgagcatggccatgagttgaggtggagaggaggaatgggccttcctggtggtagagtggtcctccctgtgcaggtaggtagggatggcagccggttgaggccgatcttgtcacatccgttgccttccttcttcctccagccctttgctgaggaggtagctctatgttcatttaataattacccattttgctagtgcttgtcgccgagagcttcttgagccccatcaggttttcagagaagcaccactcacgctcttctgctgaaaatgtttttccttccctcccttctctccatcgcactcttccccttatcgacgctctcatcagcaccagagctcttcagtattccactcctgtcctttgtgaagtgattttgcccagacacgtctggctcagggtgaagtgccctcccctgagagcacgcactgcagccccaggtcgccagcaccatgaatacattattatcccaatttccatcctgttgccacggcagcacttttggagcggctgggttattaagtcgtacatcactaataccctgatatgagcagaagttggatttaatatcggcctttgatcagattacctcccaacagtcagctgtcattagaaaattcctttgctccttataccctcggagctctggcctccgtagcagaagggtggcaggcctgatacatggaggcaattttcagcccaggccctgcactgtacacttaattcattttctgacctttttgtgatttggggagattccatccctgcctcagtgcatgtgagtgtgtgtgagtgtgagtgtgtgtgtgtgtgtgtgtgtgtgtgtgtgtgtgtgtgtgtatgtgtgaatgctcatgagtgaagtataactgtagaatccatcttccatcctaggaggtggatagaggtgtgtgtgagaggtggcttgtcttttgccaagtgatactatactttgttggaaagtgtctgttttttgcctgtcctcgggtaatgtataaaacatggtgcttcaggtagagatgaagggtaaactgatgtccccctaaatggccagcctgtgtatgcacctaacacttcactgagcaatctgtcaacatgtcagcaacacatgttttataaaaagcctccagtgggagcaaaggctcctgccagggcttaggaaatgctttgaattcagcagatttctattgctggagtcccccgaggttccttttacaatgcctacatttcagaaatttgaacttgggacccttagggggttctctccgaatgcctgaaaatgtagagttatattgttgcgtgtccccaagcggtctttactaatacctgaattcggagaagctggaaattacagagctccccagggggagctttatccacaccaggaagaagagaataactctgcagggagattgcttaatgcattgctgaaataaaagaatttgagagagatgggttgaagtgttttttttttcccccttctttttctggccactccttcagcttagctaagtccttaaagacaaagtcagggaaggaagcagctgggctctttttaatgaaattttagatgtggcttttgaaatagtcagaagcctgatgctgcgcgtgtgcttgtgtgtgtgtgtgtgtgtgtgtgctcgcgcacgtgtgtgcgtgtatgttcgcatgcacacacatacattcaccactgtcttctcgctctctggaagccacttttgtttacatgcagaaagttgctttcaggttttaggcacgtcatcacttctgtgttgttttctttttaatgctcccaccgtacctgtctccattctttggacatatttcttcctctctctctcctctctctctcctctcttgctctctctcctctctctcccctcttgctctctcttttatggcgcttcccttttattacatctgcctgtcacactttgtacactccccctttcataacttgggctgttgccatcttccttgccaacttgtgctactttgttgaagtctctctttattcctaggacactccagttccttttttattgtctaccagccccaagtcccctctcttcttagcttgctgggactccgtgaacattttgagctgttttctgattaaatacatttcataacatttagtagtgacatacccttatttttgttgctgttgaatttcaagagagtcaggccacttgcacagtttagaggacatgcaagatttcggttcatgaatgttctaatggtgggtgtggaacataatgaggtagtgggctccgcgtgagctaacaaacagaacacacacattcacagcctgcacgctcaaggtgagaaatgcaggggctggaggagggggctctctcatattaagtgagtaaggaaacctctagtccatctctgctctttattatcactggaaaagggaaagaaaaatatcctccttgtgtgtgctccttctagatctttccttggctgtcttttgacaccatgtcacctgaccctatcaggagggggctgggggctggagctcatgtttacccagggtcctcctgggactgaaccctacctccgtgtccagcgtcttccagctccacagacaaagacaagggagcattctcacagagcttgctggccagggtaaaacagttccagctgtggctactcatgaatttttggggggagggaaaaatggtcttggcttgttttttaggtgtggctacattcgtaggcttgtctgcagccatcaatttaaaaaaaaaaaactgatttagtttaaaagtggcctgggattaaaacactaactgttttggaatttggcaaattataatattttatactgtggtaaactatggtaggagagagtagatttttttttttgaagttaaaatgtttcagatgtctttaagattagccaaatttgttctagacacaacgattttagtaatgtattgtattgttttgttttatttttttaagtttaaggtcatgttccgctattgaatagttttcccaactgtcttgttctcaaacgctttctagtgagacattatgatagtgaattaattgttctcagtgcagacacataaacttggaagagtgcagttgatgtttccagctaatgttcttgttgatgcaacagcgtacccctgtgaaggtttatatggggtatttattgtggcccagtaattagagactggcctcaggtgtgaattagcctgtgctggacggtagaccaggctgagctcttgaattagactcaggtggccattattgccaagtactggtaacttcaagggttaagtttagaacagagaaagcctgcctgggtaatgtgtgttaaccgagtagccaggtgttcatcttctgaggacaggaggaggcacaggttcaaagtagactccacgaagggaacagatcctgcagagtagtgatgtctgatgcatgttaggagctcaggctagccttcctgtgagatttccacagtcctttcagtggatggagcgtttgccctgttccttacacagaggtaccagctgccttttagcacaatgcaggctgactgcggttacagtcattctctgggcacttaatgcatttgagtgggatgttttgtgcttaagcacttgtgagtgtccaggggaacacttggattggggaccctaaaaaaaaatttaaggccctttttatctgtactctgtgtggtgccttccactgacaatcttctgtggtctttgatttctttgttacagggaagcattttaatcttggtggattttcaagttttgtttttcttattggcaggtgtccctggtaaaaggcagggagagaatatcaataatttttttctaaatatttctatgctaagtgtggcactcttacatgatttaaattttttttctatttagggctctgaatagccttttcaaaatgattcttgtgttgtttcaccacataggaatggaatagcattctgggcttgtccttgttgcccctcatgtcctgtcttaccccaccgtgagtgtgagcccagactctgtcacatctgcgtttgggccaggggtatgataaagctcacccctacagaactcctgtttctaccaactggacaatgtgatttcgggaccaggctttgtctccccaaaggctcccctgtgaatgtgcagcatgaaccttgctctgtcactgctagtctgatgtcctggtcccacactgtctggcctccctgtggctttaatctgcagacttctgctcttctccctctcagaggacagcccttctcctggtcagtcacctggacacccaactgtttccctggctttgcattcttggctggctttggctagctgcaagctcagtcagtaccatcaagaaaagttgctctaagtattagcgaaagaggacttgtaataaaagtattcaagggtgttctttgttcacaaatccacccttaatctatgccctaaaaatgatgaagtttgcagggatttttttccagaaacttttggtatattagtccccaaaagaggttcttaaaaaagtcctccaaggaagggtagaaaggttgattttaaatctttaccaagtctttgcccagcggaggagaggaatcctgttgtcttgtgggtttcagttcagcagcatctcatagatgttcatacccaggtgtctgcctctgctcctctgaccacacgctttgttccggacactccctgctgcccccagagtccccgtgcactcccgggacctctcatggtatttgctcagtaacactgcatgttgtaggagttgaagggcagtcagatgcctgagcatgctttctacttcctcttcctagtgcttgtgtgatttgaaatgttactctactccctgagcgttcttgcccatctagtgatgggggcagggggcaatatgctccccacacgaggggccttcaaaaagtaatggcagttaagcatctcaaggctattgtcagtttagaagccacagggatgttgcggggatggtggctgatttcggggaccttctgcatagcaaatgaatgcttctcctactaaaccacaaacctggccacagaaaaaaggcttccttcctatagaaagttgaaactccccacacttgatcctctatgtccaagaacgaagggaacatccctcactttctcattagtaattagtatttctattgaatggcaataaccaagccaaagtaggtctacataaacaatgttctaggttcttagaatgattttttttaatcttttcttttcatgactctattcttagtttcccatggaaatatgtggtgggtaatggaccatgaagactagttcataccctaggatcagagatgagtggctgcggtacactaacatgcatgcgtgtgtgtttgtgtattggtgtgtgtgtatgtatgtgtgtgtgtatgggttgatgtgtgtgttggtatgtgtgtatgtgtgtgtgttggagtgtgtgtatgtgtgtgttggtgtgtgtgtatgtgtgttggtgtggatatcgctctgtgtatctatacatgttgtatacttagttcttcagtgccaggtcctttgttcataaccgtgaaatagaaacaagtagtatgaagacttcgaggtgatggtgtcagggaaagggtagggcataggagaagttaaagcagcacctatggacaaagtgttagttgatttccattcctggatcacttcttggagtcactggatggaaagaactctgtccccagaaggctctccttctcaagaagacactctggtttacttttgttttgattcacatgggagagctgggcaggcacaaatgaagctctgtcagggtttagtggagaaatcctctccattgcttgagattctttgcccttcctcctttgttttcctcgttctaagaagcctggaactgtagatgaggtagtccgagggactttctaggtgtggggttaggtaaagatgcgcaagccagatggtttctatctgtagaaatcacatgcctttcaaccttggggataggcagtaaaggttgaagtgttcactactgtgagacttgggaacgtcaatgcttgtgtaaatgtaatataattaatttccaaaggaatacatgttaactaaaagtctgtaaatatgctactaggccaactttccaacatttataactaatttttaacctttaagaagctttattatatatttctttgttaatagtaactaagcaggaagcttctaaacacaaataaatacagtttatagaaaaaaaggacatacagactgggtaatggttattgtattgtaagagcaaaggaagggacacaaggaagtttggagctcttccatcttttcctttcttacaatccttagcaatttgtatttaaaaaaactgaaatgtgtgtatgtgtattgaagagtgtcatagtgtgaacattcaacctttgtgtatgtttctagtattagggccacattgcctgtgtacacacagaaggtcccctcccattccgactgctgtgtgcagcgctggatgtgttgcaggcaggatggccatctgtcatgggtgtcgaacaggcatgagggtggaggctgaaggaccaccaactatgtcctctgaggagccctccagcgccgagcctgtgagtctgtgaaataacttggccctaatgtagtgccagggacattctcttgaaacttaatgtgatatcatatcctttatcaatatattgtatcactgcagtttgcgacattatgctgtaaaatgctaggccataaaagcttataatttataagcctatgttaggtacttactttatgtattgtagcctgatagccttgtaatccaacattgcctatcatttatcctatatataattccatggagagttctggtgacattataaaccacaaaagcagagctcaagtggttagtcattagaaccccaagatagaaataccttgaattacattattcggtattcattattttctatgatgtgaagttaaaacacttgcatctggaacattttctatttacattcctcatcacggtattcatatacatgtcaatcatcagggctttgcttcagttccacatcacaactacatagagccttggttttgtagaaaatgtgtgcttctcgcgcagagccgcgttgtccatcattctcatcgtggttctttcccttggctgcttatcaagcaggaaattctgctgcctatccattgtgaagtttgttgttgttgcctgttaagttcaagagcagcagagtgcatttgtttttgaatgaagtctaaatcattcatacagagcccagtcaaaaataaacactccacaaggttcttttacacaaaacctgctgtagctggggtcatgggccaagggccacagtcgtgctaaggaatgctgagtccattaaagcagtatagaatgctgtggagtactttatgaggtctttgtctgtccaggcttcccatcatctgctaacatttacccaatagtcctcttctttcaagatttgttttaagtgatgggaattggtcctggtgccttatacatttgagacaatcattcgaccactgagctgttgtaagtttgttcttgatttataaacaatgccacactttcttgtgcgcctcatcttctcccttgtgactttttcttctcagcaacactttgattataagagctataggtggtgaggcagatgatggtcacagcagcagctggtctctttcacttgatttcagaatgaaaatttcccaacctccccctccacagtccgagttccttacagttgagctctattttttttcccttcggatttttagagactcaaagtttggagaaagaaagatgaccaaaagctaataaaagaaccaagttgtaaagaatggaaggcaagctactgtaaaaaaagaaaagaaaagaaaaaaaagagctgctttataacggagttgttataactattcacaggggtacaaaggtctgcagagggacagtggttacagccacttgttatttgttggaatggaggaagagaggcagagatttagacacaaaaagagaacacaaatgaagagcagtgaacagacagctttccctttaaatcgtgctgtggtttctctcctagtccatcagtgacttgaaagtattgaaagataaacaacccaagcaagggccttggaaccctgccatatgctaggatctcaattaagggatgaaattgcaggacactcttcagttagatcacaagggaggctgggatggggggccatccagcaggctgggggctgctttgggcatgggctgtaggggctcctagggcataactacctgcattagcattgatggctcttagtggcacaaatctcttcaaatccataagagaatagacccccggaagggaagaaatggctggagagtgggggtttaactttgcttgactcctctttgtcggccctccttgcttctttctctttggcatttgctaaggagtaagaacagcaggccaaggggggggggtggatctcaaatggaaataactctgatgctgtgtaggggcctgagagttttaagtgctattcaaaatccaagttgcagagaatcttggcgggcgcgtttggggcacttgagcagtgagtctctccatttgtgctcatttgcatcgctgcactgtcatattgtgctgtggcaccgttcgctctaagcattgcgttattgacttaaaaggtgtcattttccaaatgacagaggtatggaagcacattttccttatttcataatttgcacacagactggagaagacttatccattgtcacaaaattcggctatgatggatctcgtactttaactggatggtgggtgtagggaaatgtaccagtgcattaattttaatggaagactgtggcatcactgaaaaatattttgaaagtcaagtcatgttaatttccttccttccttctttcctcatcgttcttgaggcctgaatcattgttggctttttattgtttcgtgtcgccaaggaaaagtgttgatcaagataattgaggctctagttttatttatgttttgtgtgtcttttttccccattaatatgttgtgcagatagtagcttgttctggacttgtgaggaatgcagtaattatctttcttttacttattttcaccacaaaagtttggtatgtacacctgtccacactttcaggacatttgggtcatgaggtcttttgggcaccaagatttctgctctcttcacttgagagcgtggagggtacagaggtacagtctccaggcagcccaccacggaggttaacttagaaattccagctagacgtagattgggggttttgttatttttttattagtattcttattgtttatgttcagaatcaaccttttttctttctatagatgagaagccagctgggttaggggtatgaggaaggcaagggaagtgtgctggtgtgaacttactgggttgggggatagttggataattgagagcttgcttagcgtatgtaaggccctgagttgaaacagcaaaaataaaattaaaagcccagatcagctactggttgaatgaataaggaaagtagaagattagtgtatttggctttgctccaaaagtgtgtgcgcatgtgtggtgtgtggatgtgtaaatttctgtctgtttgtctgtctgtctgtctgtgtgaatatgtatgtgtgtgtgtgaatgtgtatttgcttttgtgtatgtgtgtgtaatgtgtgtgtatgtgtgtgcatatgtgtgtatatgtgtgaatgtgtatatgtatgtatgtgtgtgaatgtatatgtgaatgtgtgtgtgtgtgtatgtgtgtgtaatgtgtatgtgtgtgcatgtgtgtgctactttatttcagaccttctgaaataactgggtcacttactattgataatatacaatcccattaagctttcagtttaggataaatactcactaattgggattctctgactacaaaattaagatgggggaaatgtgtctgagtttgtgctgttagaacctcttcaaagacatagaagacaacaatcttccttgaaccaggcagaaagccgtaatgcatcatttctatgttgagcgagatgggacctaaacacttccttcacccttcagatgcctatctactctgagggaagtccgtctttgccaggacagaatcggcagtacagtgatgttgtttaaaaagttccaggagtatgtattgctgttgtacaggaacaaaataagtcaagtttctttttctgggatttcaaattcttcccaaggagaaacaattaatattaaggcctttacagtgggattaatttagtatatctctcaggagtatattaggtattatatttatacattataaagtatattttgatatgccttaaattaataattttctctcttcagggtgaatgtagagctcacagtttctgtctgtgtgatgggaagggagcaggaggaagtggggaaagatggaaaggagccctggactgtgtcctgctggcctgctggttatccctactgcagtcggagccttttctatgctagctgagcagttccaaaggtggggtgtcctaagtggcagggctaacaggagacaggccattttctctaacactgctttcaaattttacttttgaaatgtagctccttaaaagtgtgttcttcccatggtggccgtgaagaattgctgaactttttctgtctctgccatcacagtggctttcctggctggctcttagcagatgctgtcagctcctcacctccctcactctgacttcatggatggctgcatgtgctggtgcttctgagtcagggggaagggcacagctgcaaagagggtcacccctggagactcaggcttcctgcctctgcagggctggcaaccctggtccatcagccctatgacctgtctcccttccccttctcagattcgtctggcaggaaagcccattggcccccgtgcagaacgctaaacaggctgatgagggagggagagagagaagagaggaagccatctctaagaacagaacattttgacaacctatatttacaagactggacattttgaaagtcagccgtgtttcttactgtctaggcattcctcttagctgtcttaagcatataactgggtagcttggttacaaaccctgccagtcctgtgtgattgttcacctgcatggtctgcaaaacaaagtggagaggctctgtctgtttatttggactcactcacaaggtctagtccattggaactactcagcccacagtatcatcgggttgcagcaaaaatgctgctgtgaccccatttttctttcagtcgtgccgttaagttctcctccagtttcccttccttgttacaccacacacagcccaggatggaagaaattgccaagctcctcctctacaaaacactcccttacatgacagaaaggattcttcaaatgcctgtcatatccaagctagctttatcacagtgggttccagtagcctcacaaatctgcaggaaacccaccataaatttttcagttgcttcatgactgaatgtttgcactatagcaagatttttggcaatattttacaggttggatacggattttgttttgaacaaaagcccagataaggcttctaagtctttctccttttcttctttatttccaatttttcccctttggggttgaagcatttcttcccctgtgttctctgatgcttggatgaacagtatgatgctgaggtagttgtgtgcctgacagacataaagttaaatatacaacaacgatgaagaatccagggaacaagccgttaagtcccacaacaggctttaagatgttgtaaatatattcaaatggcaagtctcccatccacgagacacaacatcttatttcattttgaaaacaagtctgaagaatgtcccaagaattttacatcgaatgtctggcggagtgcaagtatttcttcattattccaaacttcttgcccacaactgtatcataaatacctgcagagttggctgcattgaactttgttacattttccttcacatcagaccgttctcttctctcacagtgttgtgctggtagaagctccatttttctattctgtgtaatctttggaaaagataccagtgcctttttattcataggcaatgagccattctcagcagatgtataattgtttggaacaatatgataatagttgccttactagtcactgtgtttgtgtgtgtgtggagggggggtatggggtggggggtggattggggcaaaacccacctactcaaaagggaggatttgttgactccagggtgatccaatcttttatggcaggagaggcatcgctatggtgatcatactgtgaggtttgggactcctgatcactcgatatcttggaagaccagagactgcataggaagcagagtgctatctaagactcaagtgtttcagttaggttttacttctgtgaagagatgccatgaccatggcaactcttatagaggaaaacatttgattgtggggtttgcctaggttagagatttatggttcaggtcatcatggtgagagacatggcatcactcaggcagcctgtcctagagaggtaactgagttctgcatccagattagcaggcagccagaagagagagtgacactgggcctggtatgagtaattggaaccttaaagcccacctccagtgacacacttcctcaacaaggccacacccccttataatgccactccctctgagtttataggggctttttcattcacaccaccacaccaaggttctcccctcgcctctgacctgcttcctcctgttacactcagctcctaatgcttccatgtcactctacagtgccaccaactggtgatcaactgtttaaacccatgagtgtgtatgagtacattttaccttgacattgttaaagctaacattcaggagcactgaatgagaatcgctggactctgggatgacttcagcagtggaactgagacgcatctggccatcagtcatctacacagggactgcctccagcccttttgtaagccagggtgaaaagaactgcaaggccactcacccacccacgcgcttcttccatccccattttcctctctagctctgtctcatgaaatatgtaactgtaattctttgagtcactttgaaattaaacggaactttcaggctttcattgaattaataatgaaaattactgcaagaaataatcagcataaaaataaactcaaagagaatgctgattgagccccataaactttggttctgaaacaaaccaagagaagaatgcaatcttttcagatagtgaaggtctgcaggtgtgaactgtggaactcaagcctgggtgaaatcttaaaagcttactgaatgcctgatttgaacaaaattgataaatgaatatcttactattatgtaattttaataagaatgagttgatcccagtgaagatactttcagtgacataaggatgaaaaggggagaaaaataacccataatagtagttttctacaatcagcatttgatgaagggatttaatcaacttggttggatatagcccagaaattccttatgataaaaattcatcagtattggcaaaatacttgttaaaatgcttatattcaacatttttagatcgaaaatgctggaacaaaatggcagagtaaatgtattggtgataaatacctattcctgttatcccatcttcataggtctacagaacaggtggttaggaccttcctggaggaggagttgaaacctataaacttcatgaaactggaggttcataatcagggtatgagttctaaatatcagtcctggggtggaaacaccttttcaggagaggtgttggtgatggtcacgctgatgctgatgacaatgataattgcgttgacttggatttttgaagatggagtcttgctttgtggcttaaggtgggcttgaacttctaatctttctgcctaacctcccaagtgctaagaatataagcacatcaccatgcctagaccttacttacaatttaaatatccatccaacaagagcaagtctggatataaacacacttgaaaaaatagctctgctggttacaaatgtgatatgttaatgcaaagaatgtagcttaggaaataggttttacatatgcactaggaaaatcattgaccttattttttttcatcaattagaataactgttaatgtaccctgatcactggtgttaaaggtggataacatcactagcttccatatgccagtcccaggcaaggaagtttaactgtcctagtaaccttggatgcattaatatattttgttccctggggccaaatgaattcagttcttaccttagttttgattaagagatgtgaaacttgtcacaatgtattattataatcgaaagtagtatctgactggaggatttttgaaaattgtccaagccagtagctacaaaacagacaagagaaggtttcagtgaccacttctgacgcttcaccgtgtggctgcatcaggttacctagcaggggtctccaagtcaagttcaagttcagagaatgttcaaaggagacaaggctccttcttagcactctccttgctccttcctcctgctctgtctacttcatggttctcaggtgctcagaacaactttaactcaccctgagttaccatctctgtctgccatactgaggccccagcaggtctgctgcctttcagtggggcacattctagccaagaaccataccacagttctcttatttctctgggttcacggaatcaacaaacttgctccttcgttatcttggtgattatccatcaccttccttaccatctctatgaaagtttaggttctctttttctttgaccataaataatgcttagtgcacatttatagagagataagatgaactgttacttagaggaaattgatgctataatctaaacctcccaagtggctttaacctgctcagacatctttggttttagaaggaaacatctttgatttaagtaagctaaaagatgacctttgaatgggccaatagaatgaggaacattatcgagtatcaggagagaatgcatttaaggatacaatagttgctatggagaattagacaacatgaatgtaagaccccagaaaagttaggtccttaagctgttactgtttacaaagaaagaaacaagaagccattcaggttactccctgcttctcctgttctgggagcagaggagagaagagaatatggaggccagaaggagtctttacacattgtctatctgtcttcgtaaggctaaacctttggttcattgtgtgccaatccctttagttgttgctttccttaactaagggttttatagccctagtgaaaacataagaatttagggtgtttgctagaaagcccccaatcccttagttctgtgagaagaagggaggctgagtcttaagctctggctcttgacttcaggcctgggcattactttagtctgtaggcctctgagcaagagctggctttctttatgcacgtaacatggagtccctctgacaggcaaggccagaggatctgcacctagagcagccagggaagttcattgtgtggcttttaaaacttgagagaaatgagagagagtgtgggaaagagaaggggaaggagaagggaaaggggaaagggaaggggaaggagaaggagagaggaagtggagagagagcagagagtgtagcttcctgggcagagaagagctgttcttgtcctcttctgcggaaactgttagaaccatcgaccctgcgaacaccgtactgggttagggaaaggctagagctgtggtgtcagtctgagcagaacttgtcctctaggaagcaggtctcacagatctgacagcctgtgcatgtgtcatggctgctacttcatcttttctataacattacagctttaccacaggagaagcggagagaaagctcagtgtgtttctccctggtttgataaaactgcaaataaatccctttcctttatcaatctgagtcctgggcagatgcagcagggttttgagtctaagtaccccatgacagatacaacagaatgtgtgttgtgaccagagaaatgaggatggtgggccgcccgtggaatagacaagcccttctattgggctcagtcagtgtactgcagagtataccctgacagggatggaaaatggcataaaattataaaatcgagcagagaatctttctcttagcttcagcgggtccagggtacctcaggaataagcagacagagcgtgtacacagattgagcaaccagatttcaagctcatctcaccatccttgcttgtgagacagggaagacctagtcctaaaagacctgtactcaatttgctcaggggctatgacatggctgacggtgggctagactgaggctatcccgaccatccatctctagagatccatctcccctactgataatgccatccacacgccccaggatggcaactcacaggcaagcgcctgagaaaagccttgctccacaaagtgtcctggacagaagcttttcataataggtcatttcagtctgtggaaactgtgccttcagtagaaatgaaatgacagtcatttttgacccatgggggttcacctcagggcccccacatataatgcaacctacaatggtcaatcctatgtataaaattccataaactttgcatataatctatgtatgtattcttatactttatgtctcatcgagacaagggtctatcctcaaactcaggcaatcctccacccctagtcctgggttacaggggcacactactatgccacggatccatccccctagtccttatggactttataaaacagatccataggttgaagcgtatttatctgatggagatgttgatttcatgagggaaacaagctcctgtctgtttttcttcctttcttctcaccttctgaaccctgtgctgagttggccaactttccgtctttccttttagactttattacttccccccacatacgctagtctccttatccaaatagcttgcttctttctaccaaccaacagtaagagaggtagctaccagttttacttgtgtaggttgtgtttggttttaccattctatccacaaagacaagacacgttcacatcgtaaataagacgtagtgctgtgatctgaacccacagcaccatccaattgagaagacagttgtttatcattctgctttgcagtctctggaccagtcttgcagtcatctctgcaggccattgggataaatgtcagcatcctttgtgtgtcttctgctctgcccctccccctctgtcctctgtgcttgacaggagccccacctagtcctgatgagttccatccatgttggcctcttatgctgcctgtctgcttgggagtcagggtttcccctccatggtagtttcatggctgtttcttctgggcggtcgtcccagaaccctgtcttaagtgcgtctatggttgtgtgctttgaacttcttggttgttgtttgtcttctgactgctgtgagctccataaagtctgaaactggctgcggcatccccagtgcctgcacagggtaggcacttaacaagtcctttttatgcaactcatggaaagaatgaatagtcctgactttcgagtttgcccagacccctggccccgcctccctgcctctgcagttctgttttctgtccactcacttcagcttctcctggaagtctgagcccacagtatctttaccagtcattttggaaatgacccagtctgatcccagccagatattagcccctccagtatgtaacagtgtacgtatttattggattgaagcaaattgataccataactcagtcttaagaaggtttattttgccagggtcatgagaattgaatcaaagggctgcttcaaaagtttcttttctgctaaattacaaatctaaacttggctgagacacgtagctagagtgagccaatttaaaataagctcctggtctgctcctgctcctggggaggaacgacctgcctctcaggtgccctttagagaacccagactgagttggatcagggagaagacagacttttcttatcgtagatttaattgcctcctctacctctcttttgctttctccatccctccccattctctctctccctcccttcccccttccccctctcatgtgtctatgggtgtgtgtacatgtggaggccagatattagcctgactactgttcctcaggtctttttgaagcagtgtctcccactgaggcctggagttcactgagtagactggattaagtacccagagaaccccagggatccacctaactccacctctccagtgctaggactcagtacatgccaccacacctcagcttttaaaacactgattgtgagaccaagcacaagtcctcagtcttgcatggaaaaccctttactgacggagcttccgaggaatagagatgcagatggtgaatcttaaccacatgggttcagatctgcctgttgacattctcctaggcctacccatgctatggcatatagcccgcggtagcatgcatttccttcagcttccccagctcaacagcctttgggacttgatataagtgaagcacgtggtaaggcacttggctcaacttaattgctgcagaagtgatgctattgcttttattatgctgctttaaatgtgaataatagttggtgtttttaacaccaatgtctgagtgccctggaggaaaccctaggtaggcatttgttctaaacagggcctgcatttcttgtatctctcttgccatttttgaaaggctccctgaaacttcttttccttggttgaatccatagacataaaaaaaaataagagaggagggctggggagtcagtctccctcctttatggccatatgacctttcctcctcgttttctatttcctgttttgttccagtttcggctaaaatgccctccagcctctaggcttccaatgcatttcttgggtacctagtcttataacatattgccattaggagtcttttcttgatctaaaacctgaattttcctttgcttaatttaatccctcctcacatacacctcggacctctttaaataattcttctccctcgctgccatttgcacctttcagttacttgtagagagttgtcatagctcccttcgggcctaatcctatcactgtgattcatgttgggcaagctgtacattttgtactagtctatggacacattcttagactgctgcttggctgaaataaagacaattctccagtggtatgatccggaccttatcatcaataacagctactaaatgtgaaacaaagcaagcgactttttgagaaaacaaagaacggaataaagaggaagccgtcgcttacccattctattattcttatcaatgatggaggtgccatgtgctgagagtggtacaagtcactgtcttgctttgatctaaattctgtatttataggaggcggctttatgaatagccacaaaggtagtgtgacctacagatgttttgttttcaagagtgtgaaagcctgtgggtgactgtgcaagcagtgttttcggagcttatgctgagtcttttacagtgaaaactgcttccgttaaaaagccgcaccctttattatgggctatggacctcctcctgtctccaaggctgcagctctttagagatctaggtccggcctcagtgactagaaaagtgatgaggaatttgaagacatgccctcagtgacttgcaaaatgtctctgagaagttgcatgtgtcttggggaggtgagggaccagggccactgctgttacgtttggggaggaggattggaggagaccttcctcttggctcgtggggctcagctgagctacaggcaagcagagaagaggtggcttctccactgaaggacttcttcctctaaagcttaggacttctccctctaaaacttaatggctaggtgacattgtgggactctatctatctcctcctaaaagcaccaaggtgggaaggcaggactgagacagtggccacatgtttagtggtcagaggacctttcctagcagattggcccttcgggggctgatagactcgctcctggctggacggtgctctttcaaacctgtgtcaaagctcattgtttatgttacgtttacgtgcccagctctagaagcaaattagaaagttgactgaagttgacatcctttcaacccttccagaagagatcttccgtgagttaactgggaaaacttagactttacttaaattagtgtttatttctgtttccctggaagcagcagaagtatttctacagactaccatggaagcccagcccccagccttctgaaggacagtgacctccctctccagatgcgtttcctgctggcctttcccacctgtgtttttttgtttgtttggttggtttggttttttgtatgcttttgcttcatccagaatggtctctatggtcattcggggaagtccttttcgacttaactttcttacaaaatcagttcagtggcatgcttggttgtcttgggccatctggggacctgccacctctgacacttgtgctccttactctgcctagtgggcccgcgtcttctttcagtcacatgcacactaagcctcctagccaatgccaccctcctgcctgcctctatccctgtcatttgtccttggattgtcccctttggcagagtctgagcgtgtctggcataacctggcctctaagattcttttgtgtgcagtggtcctgggtggtttcagtccttcacagcatcagggtggagctggggactctggatgttaaaagccctcaaagcagctgtacacacctaccaacctgatagaatctactttcttcaaatctcctttgcttccctttaagatctgctggttctctttctttgcatagtttaatttcatagtttaatcgctcacttgaacaactctaattgtggcaaagtatacaaggcctggaagtctaccgtcttagttttgaggtgtacacttcagccgtcctgaacacagacgcttctgctgtaactggtcgctgtgactcttttacttgcttgttagcttgtttgttttctgagaaagggtcccttgatatagctcacagtgacctgtaatttactttgtatatcccagggtgaccttgagtttccagcaaccttgccttagtttccctagtgctgggcctgcaggttgtgacctgcctatgtccacatccaggacacttttcatcttgtagaactaaatctctacagattaagcacccgctctccagcttctttctcctagcctcaggaaaccactatcctgtttcctttctctgtgaactcaactcctctatgtctctcacataagaggaagtattatgagatttgactcttaatgctggcatatttcacttagagtaatgtccttagtgttcacaaagattgtacattaaatgagactccccgttttaagactaaataatcgtccactgagggtatgtgtcctgatttttccaaccgtttcctcatcagtgtgcatgcaggctgctttctcctctgatggccatgagtaatgctgtacagaacatatacctggtgcagatccgtgttctacaaccccttctgtttctcttgagtgacttcccatggattgcatggttgacagttctaaagtctggggtctcatgagccttgaggtgagtgactttgtcacatgtatctttgtagcttcacagtttccagcacagaacttagtaagcaacctgctggatgagcaaatgaacgagtgttttctaccattggcctttgagtgacttgtattaagacattctttttgtttaaatcagaattcaaataccagggggatggatatgctgagaagtatagccagttactatatgcctgccaaagagaaacgagaagcactgtgtacattcttatatagtggttataacaatagttttatgattggtgggtgcagctttatataaaattgaaaaaaaaaaggtattaaagttccaccttcacttttactctgaacataaagagctataactcactagctactaaaattccaaattgctactggtaaagccaaagtcactgtaacaataataattgtaaaatgtaaagtaatcgcaagcaggttcacgctcagtgtaatgatcagataacgtgagtaaaagcagcaattatgtgttcctggaccacactggaggcagaacacaagaaaggcgaatgccgtgcacgtgtcattactaagggagtgctttgtatttactttgcacttgaaagtttgaatgatccagctaacagaaactgacaatacctgtactttgtggcacattaaaattgcccagacagtacgacaaattgttattttacagccatcccacaatataggaactacttaacttctagttgaaatcataataaatttgcataactcttactgagagttttccttgtgctggttcatttctttcaaaccctttcttgggggtggcaccaccccattatgtcaaaggctcagggtatactatgaaaagaaaggtgggatggggaaggaatccagacaaagcctgtaatcaaacaacacccccccaaccccctgccaggcagagcaggtcagttggtagagtgcttgtctcatgtacacaaagccctaagttctgtccccatgctagcacgtggttgtagtttcagtatataggaggtagcgacaagaggatcagacatgtgttgtcatcctcagctacatagtgagttcgaagtcagcatctgggctagatgagaccatgtcaaaagaaccatgctagacattgagtgtccatattcagatgtcaagcccattttcagagtggtccactcctaggtccgagttacaagaaatctattccatactcaccactttgtttcttgtaaagctctctgttagaacactaagctcagacatgcttctatagaggtaagatgtggagacaaagatctacatggtcatgcttgttggtctatagagggtatctggatatgagtgcaaatgaccagggagaaggacttagtaaatcaaccataaccaaaagtccgccagcatctgccaggaagaaacttaattgcttgtaaacggtattaggctgtggataattaagaacttggtgaagtcaccatcagggccaacttccctagggacaactgatgaatatactgctagtgtagcaatagagaatacacatttttacctgaagacttaccttggctctgtaaaggaaaatgggttaaagtataattcaagagagtatgcattattaacaccaaagaacacacattgataagcattgtgtgtagtgtactcgccttgcttgattgattttgttgcatggttcaggctatctttgtcgacacacagttatttgctgttatctggtgatgataaagagagggtagaacccaacttaaagctttcatcattagtatggctctgaaggagcaaagaacctgatttctttggtccatttgacagctgggcatgttggttctgatgttcatagctgtaaagcactgtttttcagtgttatagcattatatggttatcttgctcaatggcaagtcagaccgccataccatcacaataactgcaaactaggggcaagtgtttgagttcatgtgtgaaaattccagaagtgtgagttgctgctaataattgggccatacttctgctacaagcccttgaggtacagtgtaagccaacactggcatgccctacccccaagagtgagttccaagcaagtcaccaggctgagtttccccttgctgttccttcctgaatgtcctgattggttaggaatgtgcctcgaacagatgagtgcttgcacagcaggcaagaagccccacattcagtttgcagcactgtacaaaaccatgtgtggtagtgcccacctgtgcctgcaacactgggtcattcccagcttcacgtcaagtaggagtccaagtggttactctttgttgctatgcaaatgtggggatttcatttaattttgacttctttttattttttatgtatgggtgttttgcctgcatgtatatacgtacatcaaaagcatacagagcctgcagcagtcagaaggggcatcataaccacttgaactggagttatagacaatggtcagctgccgtgggtacgaacctgctcctctgcaggcgcagccagcatgaacgactgctgccctgtctctccagcattcacttttgataaatcaattgtggattagtaagtgtgttttcttgaagcataaactagatagaaatgtgcctttcctttcctcttttcttgtctttgtgtatgtggcagggtatgtgtttgaacacatgcatgtataggtgcattcatgtggaaatgtatagaggccacatgtcaaataccttttcttagtcacttctccacctcatcattattatttcttccccctcccctccctctctccctcagcctctccctccccttccccctcccccttctctctcctcctcctcctcttcctcctcttcctcctcttcctcctcttcnnnnnnnnnnnnnnnnnnnnnnnnnnnnnnnnnnnnnnnnnnnnnnnnnnnnnnnnnnnnnnnnnnnnnnnnnnnnnnnnnnnnnnnnnnnnnnnnnnnnnnnnnnnnnnnnnnnnnnnnnnnnnnnnnnnnnnnnnnnnnnnnnnnnnnnnnnnnnnnnnnnnnnnnnnnnnncctcctctctcaccccccataactaggttacatgtatttgtcaggcccctggcttatatgtatggtcaggggatttgaactcagatcttcatggttgtgtacaagccatcatcccagcctagaactatacatttccactgtaacataaggcattttctctttcaaaacaatcaaaatccccaatatatacatttctttgagtacatttttttgtaaaagataaattcagtgggaataaatatagctgattttgctatctgaaattagtataagccaagaaaaaaaagagatgggaggatgggatgggtctaaggcgtttaaacaccatttgttttcattgaattgtcccagctataacagacttgctttcacattctccaatgtcacaccaatttggcagtgcagagaaatggcaatacattagtaatttatacttcagttgttagggatcctggtgcccagtcagaaaaagaccatgccggggaccaacacagtaatttctacaaacacaggcctttggaattattgagttgaatgggacatttctttctgttttttccccctcttttttctgttattgtaggagtttatggatttgattgatgaactcggaatgctgtaaataatgaaataataaaatggtatgtcagcgagggataaagttactcagagaaattaaagtgaaattaagtaagtcgctagttcacttcggaaagtgcttgttcctctcagctgtgtggcggtaaataccgctctaaggagcgtggacttccttatggataggtttttataaatactccaaatggcatcagcacacacccttggaccttgctgggttttgttgatccttgcacatattttgaaagctctgctctcttgtaggaggcagtaggaggcaggggccttgcacagcgtttacaactcaatgtaaagcttttccagcccttcatgcctgcgctgtggggtttgaagttaatgggaatgtcgggtcaaagtgggcagcactatctaagatcctgcgcatgatgtgcggtgagaatccaggagaggcgagaaatgcaagcatccagccttcttcagatagagtgaggggaaaacacccagtcttagggacaaaagtgagggtgaatgtgtggctgggtttctaggctatgggattttcaggatccagattgccttttttttttcccccacaaaaatcaaacagtatgagtaagtgaggtgcagtatttttccattaagcattagttctttgtataatgtgtgcataatttttatgaatcagaacccgaatcataaataaaatgttaatttgtagacacatttaactgtggagcagatggaaaaataggactgtgttagaaagctaggtatttgcagaagctaatgacgttaattggtctcattcgaccaccttcttttccccaaccccctaaagaccaggcttttttatttctttaattaaaaatgagtttggtatgttaatattataacctttcatattttcctagttttctatataaatgccttatttatagaaccacccttaggagtccagtgttagcaagaacattagtaacctgggagcagcgagcagggcgctgttctacacaaaagctattagccacatccattggtgtaatgtgtgcttatacgccttgttattacttcctgtcctgttacttgtgattacatagagaaagagctattttttcctctagcttgaaaatggcacatgttaaaaatgcataaaataatgatcactgaatggaatttaatttttaaataccagtactcgaacatattttgattgcttaaattgcctggtaaacgcccactgaaatatcaccagtgtgaaatcagagaaatcaccatcttgagctaatcaataccatatgtgtagacaatgttcctgaaattattctttgtgtaaggcaaggctacagtgcacagcgtttagctccttccctaaagagtcctttatgcttcagctaccactgtggagtacactgtctctagaaggtaccactgcctactacagagggtcctgggacatggctcctctaatgtcatcactcgcatattgcatttgtatcgattgtctatgatttctgtatatggatgattgggtttgagcaaactacttagggtttcaaaggatttgggtaatgttacaccatggggttggaaatctctttgaatattgtattgcagagggacaaagtcatcatttctgtgcatttattaggcccctgctgtaggaacagaaacaataaaccatcttttgtaagttaagagatcttggaacgggcaattctaataaatcccggcttaaggagaagggtacgtgctgaggccccaaagttgttgaatcatctggaatgtattagaatcttgattaataagaatacatctgcagtcctacataaagaacagagcgggcagtttggcagataggagtggaaacggggaagaaaggaagccacagccacgatgcctattgttcccttttgggcaagtgttgttattcctaatagagcaaagcagctgccccatccccaaccccaaccatagaattaaacctgtggcttgaagaagagataactctgagtacgtaaacaggaaggaatttgatcttacagaaaatctgcatatgaggaaaggctcagttaatcagtcatctaacttctatgatgtcagatatgcataacatatacgtccagatctgaaatacgacatttcaccccacatgtcctgtttaatacccttttccccagggaccccatctcttattctcataatcacttaaaatttagggacatgatttctgcataagataccttcatgtttggcttgaatcagcttttggaaaaagactccagaaaactatagtaattgtaaagagaaatcaaaccccaaacctataaaatttgtataattcatatatcaacaggatggcttcctaaatgccagagcattttttaaaaggagatgataagaacagagctcaggcttgggacataacatatttggcaataggttctgaagagtctgacatccatacagacattaacctctcaggccagccagtgaaatactgttaaagtttgctgaaagaggagattcatgaaaaccacttccgttctgttaggagcaagatgagcaaggtctgatcaatgaaaaatgcaagttttagaggaggaccaagacacaggcaaaagcagcttacttactttcatactccacaggaaagagatgtggacagtgcgcgatggaagctccaggtagctttctgttgtgagaaacttgcagaagctaaggtgcgactgtttctggctactcagtcgtagccaactaaataataataccaagtgggttttgcaagaagttgggcttcataggaaagcatgctaaaccttgcttctcaaagataattgaaaattgattgaatgttgacccctccaatctttagcagtattatatttatctaatgataaaatatagtttacttcagcacttacctttacccagagtgtgatatttcagtaattttaggcatcatttagttgctttcttttagcagaagtagaaaacaaagacatatagtataaaaaaagttcattcttagtgcatgagaggaaaatgttaatgcatgataagatggtgaagtgatagcttataattggtattggggttgccacttatctatggtgaaagtctagttgataggtttgttccacacgtggtttctgccacaatcaggcaggtctgctgtattgagagagcaactcatgcttggtctgtaaatgactgttcatggctctgttccaataaaactttatttataaaagtgagaacatttggtgcacagcttgtaatttgccagaccttaaaatgtattggataaacatttagtggggtttctgtaagtatttggtgattgagaagaaaaagaaatcactatgaattttaaagaggtgcatgcataattttatccatatgtgacagaagggaattgtgtgcatgtgtcagtgcccacatgctcttaccatgtttctactttgtttataatgacttgttattgaggtaaataaatggaaggaatatggaaagatttttacgagactctttgggatagtgcttacaaagataaaaagtatggttgtcatcatcactatagcaccccagcactctgtcccaattgaaagaggaaaagaaacacacacacacacacacacacacacacacacacacacaaaacatagtttaacttttcctaatttttttaagtgcagacgcctactttgtttcagattcatcaaactgtactcttggctggcttccctttgaaacctgggttcatgtatgtcatggtaggtgacctcagtggcccagagtacaggcatcaccggaatccatcccagttgtttcttatttagaggattccaagtactgttcacatttgctccagcagccttgggttgagggtagtgcgacctgtgggaagtagttggaaagagtgagcactgttggggcctctcctttcccgtcttgctgtcgccattccctgagtgtttggctctgctctcctgggggaatgaatgcacccccacaatatcactgttgccaccccttttctccatgatgacctgaggcataacttcataactgcaggctttgtgtccagctttcatccagtccttcccagtccaggggagtctgatgcgaagtcagctctacagattaagtctctttcccagctctctgctgcctacataatggttcagagcccttacttgtagggaagtccacccacatatggcttcatttcatcccgaactctatcccctgtgcactggtgcttggtcttgattccctctgagcatcccctaggcaacttctctaaatactcctctaagcctccacctcagctgcacgtactgtgagtctccagcagggggataaaacattaatacgttttaaatgactcccaggtggttttaatgcctcgctaatgttgagttctcctttgtagtcagtcacttactggagtgctgattttctggttgcagagttttgctgttgtgtatacaatgcttctactgagtaaggccggttttcttctttacctggaacatcccagcttattctttgatgttgaactcaaaaaagtacacccagaggtggcctttctgtgtcctccagtatgcgcctgatgcttcccacagtacttctggagggagggtgctgattttattctgtcatctcatgtcagcaaaccattcagcaaagctactgtggcattattgacttcatattggctccagcctatactagggacactgaagtatatgatcaggtcagaagaaccagactggagtgatatctagggtatgcctgaaaaagctctcgttcatgttctggacaccagagtgatgatctttgtcctaggtatatcagaaaaaaaatcacattgctgaataagagaatccatacaatgagcacactatgggagcctctgggttatggccatcacaagaaaatcatgtgaccaatgccaaagtaatgactagagtcaagactgggagagaaggatgagaaggtgagggataaaaatctcagcataactgccctaaaccagctcttaggagggggaggaagccatgtgtgcgtgcacctcattctgaggcaataagctagtaatgacatcaagaagaaaggttgatacagtcactagaaagcaagatgttgcttgaaaagttgggacaattcaagaggtctacatggtacatacctagagaaattactgaggtcccaaaagatcactcaaagtcatttaattgattataacttgaacaacagtgttggtgtgagggatttcaagaaatcttttctttcttatgtaaacagtcttaaataataacaacctgattgactggaaacagggaaaaaaaaacagaataaaatgggaagaagtctgtatccggccaggggtgaggctgggggtggagttcagcagaagaaagctcatctagagtgcacaagaccttggcttcagtctccagcactaaaagtattaatagatcataaaagacatatacaaaatataaattttgtctgctttatttttatttgagtgtagccttggctatcctgaacatactacatagaccaggctggccttgaactaacaacaaccttcttgccttggtctctggagggctggaactataggcattataccaacatgccctactaattttactttatttaaaaatatggtctatccatggagtagggtacagaatggataaaatatgtttttcacaaccaatttattgcttctttgtaagttcttttcacaaaaaacactggtcttaaagatgtaaaatttacctctctcaatggcctagttggtcatcaatgggaggagaggcccttggtcctgtgaaggttctatgccccagtattggggaatgcctgggcccggaagtgggagtgggtgggttnnnnnnnnnnnnnnnnnnnnccgtgtgtgtatgtgtgtgtgtgtgtgtgtgtgtgtgtgtgtgtatgtatgtgttgctagcaatggagctctgagctctgcatgtgcaatgcagcactctactactgagctctaccttcagcctgagtgtgtaagcttcaacagccttatacatactcagacaaagccaggacgggtgggtgccacattttgtatgtctttttatcttcatgtctagcaaaatgtccatttggtgactgaatggatgagatggtgaatacctgggctgggactgaaggcttgcaaatgactggtctgtgtgcagaaccagtttctctccagcttgcagatcctacttgggtagggtttggaaaggagggagttaccttctgctctgtctcccattacccatcctgccacaagctgaaagtaggaagctcaaattcaaaagcacaagccatcgaagtgtgcaaattcagctacatcactgtgaaaacgctactctggtggtgtcagcagctagatgcgagctctctgctgtctgctcaagttacttgtgagccttacacatttttggacgacatattaaaaatataatttcaggggctgaagagttaaaacagtatttctcctgaacaggaccttcagcacccaggttaggtagcccacaaccatctagaagtccagcttgggtgtccactgctctcctccagactccatggacacggatacctgccctcagctctatacattccccacacaggcacagatagagccataataaacaaaaatcctaaaaagtaaattcagccaaagaccaactcattataaaatataaacactaatgatccataataaaatgaatgaaatataaggaattttccatccagaataggcatgtggatactaaatacctttgctgtggcaataaaagtttgctagagcagacccgatccttttgttgactttagttttcaataatgccaattacaacttatacaaccccatcaggtagtggggctcatacatttaatccaaccccttttgatacagaggcggaggtatgtctgtgagttctaggccagcctagactacagactgagttgagatccaggatagccagggctacacagagaaaccctttttcaggaggaaagaaaaagaaaaagaaatcaaagcaacaaacgaaataaacaacccccttcaaaacaaataaaaaacaccacaaacaaacaaaaatcccaatcacaacannnnnnnnnnnnnnnnnnnnnnnnnnnnnnnnnnnnnnnnnnnnnnnnnnnnnnnaacaaaaatcccaatcacaacaaagctatagaccatccccagctgataaataagttaccttctaaagtttagttaaaggttggttaaatgtggggctgtatggctcggttgtgcttgtccatcatgtaagatgctttgtttaatcctcagcatagcaaaataaccaaccaatcaacaaatgcctaatagtgagataattatttggaatttatcatggatctttccaaggttaggttcttggtataaccaaccaatcatccctctttcattcttctatccctctgtccgtccttccctccctccctccctttcttcctcttttcctttctatggggtcatgggaaatggctgtagaacacagctctgcagtttgtacacttcacagtggtccacagcagtgctacagggatgaacatagagcagtggtgcagctatctgcgcagtgaggaaggccacgtttactacttctctgggagaggaggccctttttctctgtacattaaatgcctctggctggtaatgggtcagaacaaagtgggtaacctgttaaagaggcacatgactctgagctttccttaagacagtgagcatgtattgtctccagcccactgtaggtgcagagaccctgaggatggaccttctctgctgatctagaatatgtcctgtgtcagttttgtgagcaccatagcctctgctcattagggtagctgaggagaggcaacatatgggcttcctattgcgccagtctggtgtcaaagtaggaaaataggattctaaagcagttttggtctttaggagttggatattctgagagggaatgcgtgtataagcacacatgttcatagctgagcatttggcgcttctctggggaggtgaaagcaaggcttctgccctgcttaggtgaaaaccatggagtggttccatggaggtgtctaagagacttgatatagacaggatcatttctttgtgcctccttgggccatggtgagaatcctgctgaaaagaacaggagcggatgtcccatctgttctttcatctacagcactgcgcacttgggcattttggagccagtgtttctacagaagagttgactgattcttatcactaatctgttttaaacactaggaatctgaatgtacaatattcatggtggcagagggaaaaactgaaagaagggcaagtaagtccagtctctcatgacgccaaagcaagtaagcccacagtctcatgatggtgaggtcttccaagctgaacaaggctagtgcccattcatcaggacctactccaatgatacaaaagaattctttttggaaaacagttctttgcaccaatttgaatgtgtggtatagtaataatattaatcagacaaacaatccacactaatcagtcctgcctcaaaatcagatgcataattagcttgatgatctaagccagtggttctcaacctgagattctcaacccatttggggtttacatatcagatacactgcctatcagatacttacattactattcataacagtagcaaaattatagttatgaagcattcgtttatgtttgggggtcaatacaacatgaggagctatatgaagaggtcacagcattaggaaggttttgaggaaataagtttgttttggaattcaggaaaagaaaagaaaagagagggagggaggcagagagaaacaaagaaagatagacttacatctgtcttatttctggaacttaacatcagatcctagactgacagagaatgactctgagctctgaatttcacctttgaacaagaatgatccctgtcagttgttgtctctagaagagagaagagggaggctccttaagtgtcagggtttgtaaagaccttttcttgtgttgtctcccttttcctttcagagaaaaaaaaatgtagttagttccctctagatagcaatctgggctctgtttgctaaggccaagtgtgatgtagaccgcagggcatattgtgggatggaaactggcagtagggattggtaagttttccgcagtgccatcatacttaaataaataatcaaatcaattccttgtcctttttgaagtagtgcatgtcatcaaggctgctgtgctgtatctgaagctgagggctattgttctatgttcttgtctccatcttccctgttgcaggttcctctccatgcacagtgcttagatgcccttacattggttctttcagctggtgtttgccagcattcttccattcagacaggtcatttgtagacacagtgtagattaaagatgaacactagatactgtaaggagtgaatggggaaacagaaagtcactacctgctccagtcatagttggaacaccagtgtccataaaatgacaaactcagcgagtgagcgagattattgagctcaccctagtaaaaagagaaattgaagtcatttttgcaagaaagaatcagagagtgaattcacagggtaaaagaagggtggagtgacaagttgggccatgaacggagatgagttattgttctgggtcaacaccaactctatttggttgctttcctaaaagactgaagggttttgtttgtttgtttgtttgtttgtttgtttttagaataaaatttccagctcagcctgagctttttatcgtacatggcttggcagatgtgaaagaaagttcaagaactcagaagagtcatgctagaagcccctctcagaagagaccttgggtgtggatttggtgatgacacaggccattgagtcctttcagagaattgtttgtcttccatttttcaatggctttaattcctccaaattgctccttgaataataggaaaaaggcagtttgaattccagtgacagattggacataacaggttgcagctattaggcctcattttaccagactgagaaataaaattgcctaaacataagcatcgaccactggtgcagtaaattaatttgtacagaaaaagtagtttagctgcagtgcacattaaacataggaaaattttcaaaattactgctttctgaattaatttgtacacttgtttacttgttaaaagcatgcataaattctttcttccaaggcagtgtggctcaaaatgagcaggaaagaacataaaaagtgtccaggaaatgcagatatatggaagacacacacacacaggaaatgcagatatatggaagacacacacacaggaaatgcagatatatggaagacacacacacacagtgtcggggtagcaaacattctcatcttttgtcttcagatgctgtttagaatatggcttggctcagattctgtccgttagatcactaaagaggcctccgattccatgatacgtgggatgctttaatggatttgacttatatttgctgaggattgagctatggtgtaattaaaagagttttatcatctggttgcaggatgggtttaagcattcacaccacaagtcctctgatttagactgttaactttgtgttcatgaataaccaactgatagatctctttgtactaaagcacaaaacaaacaaacaaacaaaaccaaacaacaacaacaaaagccactggacacattttcattgttacttgtaactctattatgaaggatgcaagacaaactttggatagtatcttttcggattgttccagccaccatggaactggaccctgcaatgagggcagtctgatactatctcctgcccactgttttcaagggcagtggttcgatttaaatacaattctgataagtggcaggttttcgagtctttaatgccttgacaagggcatcactctcaggagagcgaggtgaaaccgttcagacagggatgctgcccctctcctttgtgctgacacactaagataatggacaattaagagaaccttcacggcatgagaaaggatagggttatcactaatgtaaaggagcctgtgtggtgctggggtatggaggagaagaaaaatggagattttttaagaaaggtaaataaaacacagatgagttgcctaataacagttactacattgctctgttacgtgtgatcatggagtgcttagcattgtttgctgtccctaaaccgaaagactagctcactgcctttgacaaagtgttgtagaaaatctacccccatgctggcctacctaaaataaagtccacaagtccagcagctactaggtttgctgttatgttctctggatggatacctccttctgtggtcagtggtaggttgtctcctgacagttggaggtagtccttgtcaaccctgcctgtattcctatgaactcccaagttcccaggggtgtgacttaatgggtctcagaagggatcctatggttttcaaagcacccaagatttaaggcatctttaaggagttcagaactgaagcccaggttccttaataactccagtgccctgccagaccatctgatgatttcacaaattgaaatcatcatatctgtgtcactcttagagatgactgtgtggcatctaacagccatctcttgcttctgttcatcttgaggtttaaagctggctcgctgctgagggaagtccctttatctggactgctgatcccatcttccccctctgcactcaatttctgcttttgtccccttagtagatgagtagagctctcacctgtttaccatcatggataaatgatcaggaggtaccatggggtgtggcctggatgctcaggtaaaggcattcatgcagttcagaatctagagctagtacacaaatgtgaccagcagcctctgtgtacttagtcactctactccaatgtgcttcatgtcctgtgcacatggacttttgaagggatattgctcatagccttcattcccaatcaaggtgagacattactgaggtatttatgaatggagtgctgaagagggttaactgactgtcttttgacttaaattatcatttgtctcaaacagcctgcaagggagtagagtgcagtgcttccgataactgtgggctctcctcagcccgaggagatcctgtgataagataaggagcttgaaaaaaatcaccagcttgagggagtgggacaggaggagagggaatgtgcttgctgctttgactgctaaatatcccctggtagccagagataagacactttgagctactcagaaaaccttaagcaggatgtaaatgaaaccaataaaaaaaaatcatttgagatcaagtcctgctctgttccctctctgcccccagcctgacagcagaagacacactttactgtagggctgccacatccagcagaccagtaagtgcccagggattgatagaagtgcaatcaaaggacaaaataaatatctataatttctagagatgtccaaacttgagggcatttgatcagcaatcctatcggcctttcctgacgggaacctgaactcactgctgattagccaaggttcccttccccttccttgctttctagtccaggtaggtattcacttcatatttagttttaggataaccttctattgccaaagtggttgaaaaggctcaaccacctttaatggtgtattcgcatctctctcgcagctcgaacatcatgttcagcaagggtttagagacaatggtcatgtaccccttagcatcacttcctcagaggataaacagcattggggctataccctagtgcccaggagtgtagtcagtcaggcacaccatctttgttcagtttgtagagttgcattcggatgtccccagagcaatgtggatgtatttctcacactgtacctttgttttaaacaagatttgtgtgtgtacgtgttcacatgtgtgtctgtatgaaggagtgtgtgtacatatggaggacagaagcccagtgccacagccagcagcatgatcattgactcagaatgacatatggtcttcaggcagtaacatccagcctttatgtacttggaactttatgttttccaaattgttactgtcttcttatagagaattacaagctacattttacagtctttctgcagagaggaagtgacgtggtggagctagctgaacagtatgaggaaaagatctaaggatgcagtcccaccccgagtagagggtaaccgtgacagtctgcagtgtgcgatgatttcactgccttaccatccaaactgcctcctagagctgggactcatttggtgtgtggatgtggcaaggcatccttttgtgagtgtgttctagggcagaccggccccatgcaaattgctgcagggtagatagtgctgccaggtgtcggcatttccaacagctactgaagcactgggagatgatgtgatcccatgctagcaaccagtgctgtggctcactgttcattcttagtatgttgagctatagtggctgcaatactactcaagaactggtgatttaaggacgaggtggcaagagctttcttttatccgcttggcatgaatgtgggggaacatgttcctggtgtctctagggaacatggagagatgaagtagccacttgctgctttcactgttccttttcttctgttttcatttgtcaagattgggcataaccaccatacagttacagagaaatgggagtgcatgtgcatgtccacatgtgtgtgtgtgtgttttcacccgttcgtgcatgcatgcacgagtgtgtgtaggattttctatccagtctgcagaagtaaagataagctaagcagtgatgagccagctcagttggtgattgtttgttgtgctcacttactgaagaacttgtgctcagatcaccagcactgttaacgagacacaaaggatgatgtgtggctgccatttgagagctgaaaacacaagaatggtccgctagagttgcctgctcagaaagtcttgccttgaaacatggggagagcttagaggagtgcgtttgacagaggcctctggcctccataaatacatgcatgcatgcacatgtgctcctccatacatgcacacacatgagcatgtacaaatccatatactcagactgttgacagagagttgtcagttcatctaactcttgattgctttattgtttccttatacacgtgtgaacacatgccaattagcttgagttagttttgcaatatgagaacactattttttttttaaatagacaatgttcaacatcacattaaacttatttgcccataaaaacatggcagctgagcattttggtttttgtttgtttgtttgtctgtttgttgtggtttgagtaggggatttccattcttgttagttcagaggtctagcacgtagctgtggttactgatttgtctgatcatctgcaaggtgagcattccttttgctggccagatttctcactgttctcagcccccctgcaccgtgcctgtgggcgggcggctcagggtgagagctttgccttgttttgctctgtgcaagctgtggagattctttgctttctttcctttgatccctcgagtgtgactgagaggtaggtgcagcctgtgccagccatcacttaggctcccaggaaagagtggagcccaggttcagcaaggttgtggcgattcagaaagtggcctttggtccatgcagcctggagtcagcatggtagccttgagtgttagggctgtgcttctgtgcatgttcctgtctctatcacctttatcagacagaaagcattgccattcgcttccctatggaaatgaccgtttagacttgacatgactcacatgactgctaagagggttcttgtcacacgccttaccatcagaggagaacctctttctttttcatagcgtaaccatatttaaccccctcatgtttcaggctgctgtcatgtgctgggtgccagagggccaggtgtcacatgttttcgtgggataagcacagatgggtctttatcttcctccttgactgcagtcagatttgtcaccgatttagtgctgtggccacaatgactgtggtaatcttcttatatagttatttgttttatggtcttttagatatagacaaattaaatgccataatatggaggcatcacgggatttctgaggtctgactataattattattagaatttttagcaagacagttaatgttaactgtatatttgtacatatatatattatgtacataaataatgtacatataaataactatatataaattatatataagcatatcactgaaaatagcattgtactattgttacctaaagtaatgtttcattaaatatgttttcagagataggtacttatattaagtggcaaattactgtaattagctcttttgtaatgacacatctaaaatctttgaaaagttgcttttatataaattatgtgattgattttgaacatttagtgaacgttagataaacataaggtgtgtgtacacatggggcattgtgaattttatctgataaacttgtgtgtgcacacacactcagtcctgtgatttcaactggtgaacacacaatttatcccagtcatcctaggtccaggtctgtttcagagaagtgactgctgaatcaaaagtaggatgactctgtggaaagtccaccatcttcatctctgcgggacttctctgcagagctccattcatagtttatataactgggtagatgaaaatattaatctctaaacttatttgatattatatgatcagggcagagctattttgtatcccaattgaaagtcatttccaaggaatagttctgtcctttgcgggacattcatgccgtttatagccacaaatgtttaggcccgtctcccttgcactgaaggaacatttgacatcctatctcggctgcctgggatctagtctcactttgcaatttcagttgtgttgagatgttgtgggaattctatcctcccaggatgctttgcagcatccttctctagaccctttaccaacactgagtttcaaggtcacagtcttcaggatctcaggctcctcataccacagtagcctgcagcatctgaagaaaattggagaaaaccggggtagacacacaaggctcttggcgtcgacgttacatgactgcatgtagaaataagtctgtgccatcacaaaattcaaactgatggtttgccacagatcctaaccattcctatcacatattctgcatggggatgtcagaagcaagagcatgcaggtcagtgggtttcattgtggcaacctgatcatcgtggcaatatgtgcccccccatctctgtaacagctttttctacattaacaaaccctatttatcactttactgcacaatgaatccacagggggtgctaattgttcattaattaaattttagcctttcaacacttttgtattctccagtggcctagtctgcagtgaagtacacagagtggcctttttcaactgccaaaaattcaagttggtttttactgctgccatggatacggtacaggtaaatttcagggcagcagacacattccagtattcttgtaagtctctgtgacccaaagtttccagctttagaccacagcctttggagttaagacaaaacccagaagaacatgacataacggtcaatgctggccagtttggaataaaattcgaattgtttttgtttgtttggacatcctgttgctttatgacaggctctcaagaggttgtaaacatggtggaatgaggtgtagactttctaagacccatcattcccaaggaagccatttcaaacttggttttctctgagactcttccttagtttcagttttcattgaagagattaagttaaagatcacaaagttgggaggcaggtagcccagttggtaagagctggctgtgcaaacctgaggaccaaagaccctctgcagcagccatgcacagatgtgcatgacagcatgtgcttagaatcgggtgccgctgacacaggtggattcctgagacttcctggcctgctaaagctcatgtcccagagggagactgtgtctcacagacaaaagcaaacaaacaacaacaaataacatggtgggtgacctctggtttccatgtaaagtcatgtgtgtacatgtgaatgccatgtttgtccctcacaaacaaattcactaataatattagtggccctgtgaccgttacagaacatttctcacgggatgtagctgttgctttcatgctgcctagaccgtaatttataagtgtaggagatttcaaagcaaaatagaatttgtctcagggattttctaaaaacaaaaatcagaatagcttggcatgtggctgtctgttccacagtggagcttttgttctaataaccaattaatcacgactttccagagtgcacagtttcgaagcactgagctagcgtatattggtttttgagaaatctgtaagtcacattcagaagtttagtttgactttttttttcattttctgttaaatatttgtgttatttagacatttaagccacttaaaatgattgtcctcccagcatgagaagaacaagtcagctctgctgtcccatccttttctgtgcttgtcactatcccttaggacttagggtaacaacagctcccctagtatattagttgtgttcatttttatatcttagctcagatgtcatatttgctccttataatactaacagtgaggtagactaaaaatatttctggtattatatacaaggaaatttttaaaaatgtaactgggaggttcagggttaactacaaagcctgaacacacacatgcgcagtgttaatacattttagttaaataaatgaatgaactaactaaacaacaaatatctgcttgagaaattacttgtgcaaacacgagactatgtagtaactaataaatgtcttgcatgtcacagtagaagaggagaggcgaagctctctactcagctggcagaggcctgggatagcaagcaagcaaagcctgagactgattcttagaatccgggcctagtggcatgtatgtatagtccccaaactaagggccaggaatagacggacccttgactgctgtcctgctgtccaactcaaatcggccagtccagaccagtgggaggcccccatctcaaaatgtctggggaaggccacccaaatttgacctctggtctctacatacacaggcatacatgtacaggtgcacacatgatcacacacatacatagtagggaaaaagaatagagagaatatgccgtgatgcccgtcattatcaaagcaaagataaacatgttgacatgtttaaggatttcactcactcccagtccttcgagcagatgtgctccacaaggctgcctgctaccaaacagccagaagttggtgcttagcattagtgacatatagttttaatggagccaagagatcggaaaagcaaagccgttctcacccctcctccccacctcaaaccggcatcactggaaacgactcttccttctgtctggcttcagcaacacccgccttggtttccgtgagacggtaacttttcttgaactggttttgtgtcagctttttcctcatttgagaggtggagtctgagtgtgaactgcttacgaatgcgctgttcactgtttaatttggctggggaagatggaattcatcaggcaccgtctgttcagatgaactttaagcaacggcaagcaaagcatttgtggtcctcaccccacactctatgcacatcgtcttccaaacactgaagatgtgaaagtccaggatcacccaagaagagcaaagaacacgtggcatcttatctcctgcactgggttatctggagtgcaaagaggttgttagagggaaaatgagtcactttttaaaaattaggctgtaataaaactaaaaagaaaaaaattaccccagagctcttttatctggaatttgtctctaagactgggttaaaatgtgcaccacaattccctgcctcttctgtagttatgggggaccaccctttcccccataacctgactgttaatgcatttaagtagtccttccagaaccatttggaatattacacaattttaaggcatctgtgaataataaatatttctaaagttcacacttcagactattcattgtcagtcagttaaatacattatatggtatagaagtgaatttaatgtggagctgttggtttcaaaatgagacaaagcaagtaccccccccccccacacacacacacacaaatattattaaagctgcagttttccatagccatggacattccaatcgagaatgaaaggaagcagttgttcaagaatgcaaaataatttatttaacatgacctcatcctttaggaatttaaatcattgctgtaaaaatgcattgcgtgatttgtttaggtggctttaataatgatgtaaaagttgttaccatgatggcactggaagaaacacaagcacccttgtcgcctgtctgctaagcacacatttcaaatcaacgttctttgttagtgttgcgtagccatttgtttgcaccgggtgtgtttccctcaggattccctgcttgtgttaaggtagttctggtagctaatgaatgggggtggagggaaggcctgtgaacgcaattcaataaagaagttaaagcccactgtagtagactgcgggcaggcatcaagaatcaaatgaagaaccacgacaaacctggaaatccactttggtcttctgttctaaacaattgctcaacacatgcaaaaataatctactaaattaacttattatggtgtgaaataatgcattggctgtattgctcatgttttaaagggaaggaaggtaatttcaaaattatatacttagcttcagaattacatagtaacgtacttgttccaaggttacctatctttaaagacccaagattatatcctgtgtatgataatttagtgcttggaatatagcatgaatttatggtccattgatttttagctgttgccagctatgcctgttttcttgtcttgctgcctgtgtacactactgcgagtgctccaggcactatagatttccactgggccactctttagaactcatattccaggggttctattaaagaaaagaaaataggaaaatgtgtttatagtaaatatgcggacatttgcaagggaacaggagcaagtgccacccttctcagtctccctatttatgtgagtagctttttttctagtagattatttttgcaaacagtcactaatctttgtaatactctggagggtaagtagtgagaattattatcttcatattgcaggtgaaatacttaggtaggggcagattaaatgacctggccaggtcactctccaagtcagttatggagctcaaaataaaactccagactcctgattctcccttcttctgactcatggcacctggcacatagatactggcctatgagtatccttcacttccagacacttcagaaggaaccagtggcctaaagcctgactgtgctcaggaaccctggctgtgtggcatttgcacatgtgtgatactgagcctatggtgagatgttctcagggtactctggtgattctgaaggtctattagagagacagggaagctctcactaacctggccttgggaagagctagatgtcacacaaggtagatgcttgctctaactgctatgatttcttaaatgcatgtaatgtctttagcgttgggtggggtggggtggggtggggtatgtgtgggggaggcaggaagtggggatgtgttatgagtgtgcacgaatgtggacgtctgaggttgactttgactcttcttcagttgctgtccacctttttttctggaaaacacaacaaaacaacaacaacaacaacaacaaaaacaatctttcgctgaacctggactacatggatttggttcaactggctgtccatcaagctcgggaatccttctgttccaacctttgagattacatgtgcacataagcctagaaccatatccatcattgcctctatctatctatctatctatctatctatctatctatctatctatctatcatctatctatcacccacctacatgcctacctgaggtgtggtactggggactgaattctgatcctcaggtttggacagtagatgctttcctcactgagccatctctctagctctccatttttttttttttttttgaaattaagagtgattcagtccatcttataacttttgtttcttcttaataatttcatattacctatattattagaggtaaccctgaccttggcctcagaagccaagggtcttacaccaagacctgattgggccacactcacactctcctgagcacagcctcacccttgcttttttggcacagtatttttacttttggctgtatgtatttagcttggacagctaacagtgtctgggacctccagtgcttctcttctacaaaggcaggctataaacttagactatcttgctcctttggatgacagggtggccctgccaagcattcctgtggctccatatgcaatagctggaatagaagtcccctccatgtttgcttgctgcttccagggtggtgtgcgaggcccacatcacaaccacactctgtgctccggagcctgttagctgaggtggaagtttgagttgacttcactgttctgttggtgtggtaagcacttttgcccataatatggccgaacaggtgttgttctgctgctaactgagtttccagctgtcctcctccacacagaccatgcaggatcgggtattctgtcctctcaggcgggctggaggctcattgagcccgagatggaggtcttccttgcaggatatggccatatcgatgccagaagatggtcgggaaagcctggctggctaacaaagacaggccttcagcggctgggtgtagctccagttctacatcccctttggcagctgctcagaggccactgcagtgtggccagccagcaaaattaggaaataaggaccccttttatttactcaggctgctgaatcatgggcattcctgtctgcttggagagaagtcaggcggctctactttccacggaaagtctcgggagtgctggagactttcatctccaagtgttcacacacttgttttaatgtgctttatggaaatggtgaaacttagcaagtgcagtcactgtagaaaaacatctgcactaactaggctcacgcttttgcatctttaaatagccgtttaggccacagagtgggctcccagcaaactttccccccaattgtaagattttgcctcggctttccgtgagttaaggagttaagtgactgtttccaggatctaaaatggacatgcagaaggacctcatattgtaatgcaccacacgagttgccagaatacagacagacagtaagtgacaaagggagaaagttccagtagattctgaacctggacttgaaagaatccaacatggctttcccatgaactagaaaatgcaattgcacttcttgagatttgtactgacaattgaagcactcctttgcagtgcttaagttaacaaggataggcaattctggaagaatcggtagagctcagaggtggattggcagactgtccaccaggggaggcttgagtgaacaggacaccattagcacgtggaccaagccctgggcagtttcgtttctagttttttttttttttttttttttttttcctgtgcctgcacatttatggcactggccagtgaacctcttaccatcttgattccaaagcagaaataaaccttttagagaaatggccttcattctcattcattcattcattcattcattcagttacccatttattcattcattgattcatattctctctgtccctcccttcctgcctgcctgcctccctccctgcctacctattgagtaacactcttggatgtaggttttccctgtcctgtccccctgtcctgagatgtgtgagttttgtaggtgattcttatgttcttaggctacagggataaggctgggttggaacagtggaaaagctttccagtagtactctgaattccagaaaacaaaatgaaacaaaacaaccctcgaccctaagttttttcttttataataatggctcattgcttcataattccttatacaaacctggtggcaggaattgtacactttactttttacatggcctgttgttccacagctattcatacatctacaatgatgatgcatcacacccagacacagtgtaggatttaatgataaatagtcttgctaggatctcgggctcacggttcatctcttacccatctggaagcatggtagatgctcattcagtgttttctctgaatgtgcaaatgtgatgatgtgcttaaagatattttaaaataaaacagcaagattcagaagtaaaactcaagtgtgaaatatggcaggatttgcaacctcaaacgctgagtacatttattaatgattggaactggaaggatctataggaatcttaggttatttcagataccaagtgtacatatcttttaaagggaaaactcggtcattgttgtgttgtttttgctgttgttatcttgactgttttgtttgcttgcttttggttaggttttgctttaatgtactgtgtcatgggttgagcttatctgcatatgtgtttcatgtgtccgtatgactcttagctggtaacattcacgcctgcttgaggctgcacacatgaggggctgtggagtcctgtaagcaaggagacagaatcaggaggttttcagcttgctttgttgcggtgggcagggatccaggaatggtgtttggttgttttctcagggtgagagggctgccatctggcctcgatagtgagatggccttgtcatcggtttctccatgcaggaaaggaacgatcctcatctgtttcctgtggataaggaagaggctgacaatctagtaaaatcttgttaccttaaagaaagcagacatggaattcgtttcataaagtcggcctgtttctgctttgtgtccaccatggtgcatatgtgtgagccttagtcctgaatgaagctctgaactttctggattcttttctcatcaaaaacttttagaatatttcagtcaaacctgtacttgtaaccaaatgctgtcatctgctctcccagctagcctgcattgtctttaattatctctatctttgaaaactattatcttttggattttgaacacttttgaaacttctggctctgagagagaaattataaaacgtaaaagagattttacaacatgttttgagacagtcttacttttttatttgggtattagggaagcaacaggagaaagggggcgtataccatgtaaggaaaaaaaaacaaaacacccccgaacatagatgtaaggcagcgttccttcacgcatcgcatgctaagccgtatctggttggcagcctgtttgtctgctctttgttgcacataaatctctctgcatttaccataatcatttatcacttttcctgtttccagtttttcacaagtcgctttgtctctgctcacctcaaagctcgggccctgtttagctaaggaagtccgggccactgatgcttttcacagaaggaagagatggtgggccacctcttgaacttttccaacggagtgcaagattacgatctggtcctcctgaaactcacaattttttttcttgatcctggatgatcctagctgtatgtaatatctcacagtgccttctaacatttaataatccattttttggcctatggtttctgaatctttcagttattgaggaaaacctggttgtctttcattacacaagacgtaattattattgtgtttcctgtctccttttatgtgcttactttttaatatttttttgctgaaagcaataaggtctgtatcaataagaaccccaaagaagacttttggtctgcagaattgcctttttatagaaaaacaagcaaaatgcagagggagttttttattaaatattagacatctgggttgactgcattaattttaaatcactcctgtaatatttcctcttttcatttgctccttcacatgctcacagaatatgcaaatcattgtagaatgaatacaaaagaaacattaaatatattaaaatctgtattttaataaaattgtcaatgtgtaatatatgcctcacttctaaggaaaaatgataaaatgtaataacggggtaatttagacatagaactctttaatatctttttgtattttacaaaccagccaaaagcaaatgaagagtaaaagcttggggctcagatctgcgatgctcactccttcccctcccccgagaggctcaagatggctcaagtgtgtgtccatggtggcgcggtctgagttctcagcacgtgtaatgatatgttcctattgctcctcactgcagatggcgttgacgttgaggacgaccccagctgctcttggccagcctcctcgccttccagtaaggaccagacttcccccagccatggagaagggtgtgatttcggagaggaagaaggtggccctggactgccttacccatgccagttctgtgacaagtcctttagccgcctcagctacctaaagcaccatgaacagagccacagtgacaagctgcccttcaagtgcacctactgcagtcggctgttcaaacacaagcggagccgtgaccgccacataaagctccacactggggataagaagtatcactgtagcgagtgtgacgcagccttctcccggagcgatcatctcaagatccacttaaagactcacacctccaacaagccatataaatgtgccgtctgccgcagagggttcctctcctctagctccttgcacggacatatgcaggttcatgagcggaacaaggacggctcccagtctggctccaggatggaggactggaagatgaaggacactcagaagtgcagccagtgcgaggaaggctttgacttcccggaagacctccagaagcacattgcagaatgccaccccgagtgctcccctaatgaggaccgagcagccctccagtgcatgtactgccacgagctgtttgtggaggagacgtccctcatgaaccacatcgagcaggtacacgggggtgagaagaagaactcttgcagcatttgctcagagagcttcctcacggtcgaggagctgtatagccacatggacagtcaccagcagccagagtcctgcaatcacagcaacagcccttccctggtcactgtgggttacacctcagtgtccagcacgactccagactcgaacctctcagtggacagctcgaccatggtagaggctgcaccaccgattccaaagagccgcgggaggaagcgagctgctcagcagacctccgatatgactggcccctctagtaagcaggcgaaagtcacctacagctgtatttactgcaacaagcagttattttccagtctcgcggttctgcagattcacttgaaaactatgcatttagataagcctgagcaggctcatatctgtcagtattgcttggaggtcttaccctcactctataacctaaatgaacatcttaaacaagtgcacgaagctcaggaccccggcctgattgtttcggccatgcctgccattgtttaccagtgcaacttctgttccgaagttgtcaatgacctcaacacccttcaggagcacatccgatgttctcatgggtttgccaatcccgcggccaaggacagcaatgcgttcttttgtccccattgttacatggggtttctcactgactcttcacttgaagagcatataagacaggtccattgtgacctcagtggctcccggtttgggtctcctgtgcttgggactccaaaagaaccggtggttgaagtctactcctgttcctattgtacaaattcgccaatattcaacagtgttcttaaactgaataagcatattaaagagaatcataaaaacattcccttggccctgaattatattcacaatgggaagaaatcccgggccttgagccctttgtcccctgtggctatagaacaaacaactcttaagatgatgcagactgtgggaggcgggcctgcccgcgcctctggagagtatatctgtaatcagtgtggtgctaagtacacgtccctagacagctttcagactcacctcaaaacccatttggacaccgtgctgccaaaactgacctgccctcagtgtaacaaagaattccccaaccaagagtccttgctaaagcacgtgaccatccactttatgatcacctcaacctactacatctgtgagagctgtgacaagcagttcacctccgtggatgacctccagaagcacctgctggacatgcacaccttcgtcttcttccgctgcacactctgccaggaagtgttcgactccaaggtctctatccagctgcacttggccgtgaagcacagtaacgagaagaaggtgtaccgctgcacgtcctgcaactgggacttccgcaacgagaccgacctgcagctgcacgtgaagcacaaccacttggagaaccaaggcaaagtgcacaagtgcatcttctgcggcgagtcgtttggcaccgaggtggagctgcagtgccacatcaccacccacagcaagaagtacaactgcaggttctgcagcaaagccttccacgccgtcatcctgctggagaagcacctgcgggagaaacactgtgtgtttgaaaccaagacccccaactgtggcaccaacggggcctcggagcaagtgcagaaggaggaggctgagctgcagaccttgctcaccaacagccaggagtcccataacagccatgatgggagtgaggaggacgtggacagctctgaacccatgtatggctgtgacatctgcggggcggcctacaccatggagacgttgctgcagaaccaccagctccgagaccacaacatcaggcccggagaaagcgccatcgtgaagaagaaggcggagctcattaaagggaattacaagtgtaacgtttgctcgagaaccttcttctccgaaaacgggctccgtgaacacatgcagacccacttaggcccggtcaaacactacatgtgccctatctgtggagagcgcttcccttccctgttaactctcacagagcacaaagtcacacacagcaagagcctggataccggaaactgtcgtatttgtaagatgcccctgcagagcgaagaggagtttttggagcactgccagatgcaccctgacctgaggaattccctgactgggtttcgttgtgtggtgtgtatgcagactgtgacctccaccttggaactcaaaatccacgggaccttccacatgcagaagacggggaatgggtcctccgtgcagaccaccgggcgtggccagcacgttcagaaactgtataagtgcgcatcttgcctcaaagagttccgttccaagcaagatctggtgaaactcgacatcaacggcctgccatatggtctgtgtgccggctgtgtgaatctcagtaagagcagtagcccgggcctcagtctccctcctggtgccagcaggccaggcttgggccagaatgagagtctgagcgccatggaaggaaaaggcaaggcggggggactgaagacgcgctgttcaagctgcaatgtcaagtttgagtctgaaagcgaactgcagaaccacatccagacggtgcaccgggagcttgtgccagacgccaacagcacacagttgaaaacgccccaagtgtcacccatgcccagaatcagtccctcccagtccgatgaggtaactcgccttttctcaagcttgctatttcccccctttaaacacgacccccactttatagtcaagcttgccacggccttatctacttttgtcacatgcgccaagagatgcgtagtttgaaatgcaatgtttttctccctatagccattaactagcaattacttggttcctgataagtagcattttggcttgaatggtgcaaaataggactaattccagtctccctaggacactgtcttctctatgactgaagagactggctctcacgcttagcctactgagatctggaacctcactgtagtttcacacgcattgaaatccccagctatgacttgtgcgtatggcaaagagataatgacacatgagtacagtagtgtgagccaacgtgttggcttggactctctctctctctctctctctctctctctctctctctccctccctctctctctctctgtatatatatatgcacacacacatatctatagatagatatatatatagagagaggtaacaaattaggtagggtgtctttaatacatgttgacaacactcactgtttttctttgtcttctgggtagtgaggaaaaatactttgcacaacaggagtttttcaaagctcccatatttatctgcttaaagacaccatctcagaggctttactttctgggttctaaaacgagtgtttattaccccctcagttccagagttctgcatctccatgtttcctttggcacaatatgtaggagaagtacattcattaacagtgcaattgtagttttatcaactgtcattcctccttcacagaggagggctctgtggaatattattcctgttggctttatcacctccacttccctacctgctcctatctggagatccatccaaatgaaaaccccagggaaaaccttgtcccttgcaggtgtggttcctgtaagtttcttatcttgtccttgcactcaaactctcggagggctcccggcatctccccacagatagccatcaggcagccagtaggggagaagggagcaggcaacacagagcccatcctcacccaaggtggcgtctgtgtaacaggcagactcccaaactttgaagctgttcttcttctgtcttccctgcccgagtaaatctgcactatccttccatttaaataaatgaaatgcttttagactgatggagacagctggatgaacatagcttggatagtggttcctggctcaggtgtcatgtcctattcagcagtccctgaaacaagccatacgtagaaacctatgaaatttctttttctctcaaaacttcattttagaaatgtttaagcttgtattaacattaaagagacagcatggtaaatatgtgtgtttgtgtgcttgtaggaacattaaagagatagcatggcgaatgtgtttgtgtgcttgtgcagtttaccagaccaggacaattttgtcccctctctccttcctgtcacctctcttcttccctttctcacttcttccctccactggtttaaaaatcagcctgaaagtacattggagatatattttgatatctccttaaacattgatatttcttaaaccgcaatgtcaagtttgagtctgcatttttttaatccattcttcttaacatgggtgctttgaaaatcttctgttgtgcaaaggattttctccactacccagaagacagtgtgcaattgtaggatatggctaatggtactattagccagagtatcattggcttaaggcaatagaaatagctacattagcaggactcagactcaaaatatatttgtaaataccttagccatataactatgctcttctttaactagatcataactaaaatatcccagccactacactctgccctgtggctggttacctgtgcccaggtaccatgtgattgtctcctcacatcgccccaggtagatctctcagtgtttcctcaaatctccttcattctatactttttatttttcttctaagacctgtttctggttttctttctacttttttattagtatcgttaaatgtgttagccatgagcttcggttcataccctgaacagctcataaattattttaacccaatcagtgtcttctacttggctagttcagtcctggcccactttttttttcacatttccttttcatctcccttagttcatctacctactggtttacaaacttgtcctcagtctgtctttcccacgttctcctttttaaactctcactgcttcccagaatcctctttcttcctgcctgtgtcccacctatgtttttgccttagctcattggccatcagcttttctattggcaggtgttgcttgtaagagattctctctacaatctagaatctctattacaagagggtccatcttcaaatgtctagattgctcctaagctgttttatgattttaaatgttacaaaatcaggagctgcggtgcttgggcgatgagcttgcagaacaagcataagaagcagttaagatcctcagatcccctggaagccaggtgagccaccggggagatgatggagccgcgaaggtcctaagtagactcaccagcgagcctagctagaacagtcagctccactgagagaccctgtctcaaagtatagggtggtaaatgatggaggaagatactcaatgttggcctctgatctccacactaatatgcacaggctcttgcacccacacatatgtgtacaccccccacacaaattaaagattgtttttaaagttgcaaagtaagcgttcttaaaacacttaagtggagaaccgcttgtctcctttttatagaagttagaatgacttcattctcctgtgcgtgtgtgtgtgtgtgtgtgtgtgtgtgtgtgtgtgtgtgtgtgtttaactgtgattttctatgttgacaatcaagactggaccggaccggaccacttgcttcttagtttgcttctgaaaatgtccatgcgtgtctttttccttcggccttcatagcttctacctctgatacttataaattgcactatttatttgtttcacttgaaatggaattacaaaatgaaagtagacatatgaagagcatggacatattaattcagttagaattgcttgtctggaaaaacgctcttggcctcttatttttttttctaaagcctcgtgcatcctaggccggagctgggtcactgaggtaaatcctcaaccagaaagcttatccttaaaccatgcctgtctttaagtattcctaaaatagtaatgttagaacatttacttgtagtctgaacttttataaatcaccagaatatttttaaaacacttacatccacatgatagtttttaagtacttagctatcaatagtcacaacaactttctatgcagtaacttatctccctttgaaactgtatttaaaaaatatcttgcagagatggccttccttgaccagatattaggattcagtttataaataattttcataacaatctgaatgtttttccaatatgatcattacgattactattgctattttaaaattcattattctatttcagttataaaggtgtatgtaattaatactttctcaaattacgaatatacatattatttggaattacaaaaaattgcccaaaacacataaagatttctatttaaataattctaccactaataaatgttattgggaagaaatgatattatataatattttatgtaataggtatttgtttacatctgtggtcagttatgttgaatttgtgattttccagtataaatgatgtgtaatttggggagggtcacactgggtaaaagagaagttactatatgtctttaccaaaaccacaaaggtgtatcatttgggggtgaattttacaaccaataaaatgtaagatccatgactcttgtgttaaagaccttgggttttctgaaggcctccaccaccaagccctaagggagctattcccatcttttctctctgaggcttcaaagtagagaggaagatgacaggagacaagagagcccagacacagattcttgttttgagagttcagatttacggaaccatgacttatgaccacatagggattcacactcaccttcatatgtcggagatatatgcatatgtgcatatgtgcatttgattggtactagattatatatttgaacagatttaaatttatatataaatctagagttgtgatcctattcagtcctccaaatggatgcaagtcaaggtatgtgacagtcaaggaaggctaactgcaggcagctgtcacatggtggaggtatctggaagggaacttaaacccatttcccttgcttgatgtcttctgactttgaaaaaactattttcttgaagtttgcccccatgattattaattgaaattttccgctagactttgggattcagtatttgaggagagcctcaaccttgatgctcctcaagggttgactgtgatgtatttttgcatattacctatcgtgttcaggtatgggagagcctatcagagaggaaaggtgttagccatctagctttaactacacacaggtgcctttccaagttcctgacatttgcaatgtgaataaatatgagctctctgggttcattgatgatggcccgaaactcccatcagtacctcagaagggtgtcacatgaccttaaagttcttcaatagatgtcgggagaacatgtctgcagggtccttctgcctctgttttttgtttagttttatttttaggatggtttgtaggtttctccacacatcatttcaactcatactatcccaaccagtacgttgaaattattctgcaagggacatcattatcactggaaggggcagtggtggctatctgattcagccaccgcattttggagacagacaaccaggctcatataaattgaaataagctaaaaccacagtggccttgaacttactatgtagccgactgactaccctggagctgctagtcctccttcctccaatctgagcacaagacttacagacatgtgccatcatatcacccgaatgtctcctctttgcagttccaggcactttgttctaggtacctatcaagcccaggaacttgtcaccgggtccgtagtatttccaagctctcttctgccatcagtcatttctcctcattgaaaaggttcctgagcatgtctctggtctgctgacttctctgtgctctcctctggggccttagttattattgctattaagtacttgtcacaggtagctcttgcctttttcagaagcccctgtgtcccttcctggctcaactcccacagcctgctccttttaaactaccataagctcttgtttgcattgctattctgccttggcatgctcttttcctgtggccccagccactccccctcctacaactaccacactacactgatgactctccaaattgtgcctccagagggcagggtgcacctcttggaactgacagtaatgtgctaaagtttgactataagccgggcgtggtggcacacgcctttaatcccagtactcttgaggcagaggcaggtggatttctgagttcgaggccagcctggtctacaaagtgagctccaggacagccagggctatacagagaaaccctgtctgggggaaaaaaaaaagtttgactataattttggttattgcctgcatatttctgtcaatactcactggatgtgagtgcattcttttgtatgagacttgtatctcagtgaagatagtattaattaatatggttgtttctgtgtgcatgtattatatatgtttgtgttgacatgtgcacgtaagcgttcacactgctctgttatatgtggagaaaagagggagacaccagatgaattctcctctcttttcatttgagatgctatccctgcctgagcctggctaggctcaattagctaggctgacaggccagctagtctggagacccagctacccccattcacctccaggctatgctactggtgtgcaccaccatgcacattttttatgtgggttctggggatccaaatttaggtccttgtgctgtacagacagtacttgacccaccaaatcatctcctccgctctctaatgaagcctacttttaagaacagtggtatcttcaattcaaatcctttcactgaggcttggactcagtctcagttgtctgctggacacttgtggatgtcaaatttggcagattcaaacttgaacccattatcttcccaatgaatctttgtcactgcagcatctccttgtctcctcaggttcttcctctgtctccacatccagctgtctccatatatgttttagtggttctccacctgctgtctccatatatgttttagtggttctccacctgtgggttgtgacccctctggaggttccttatcagatatcctgtatatcagatatttttattatgattcataacagtagcacaattatacttatgaaatagcaacaaactaattttatagttgggggtcaccacaacttgggtgactgtattaaagggtcacagcactaggaaaattgagaaccgctggcagacatatttgagcatacatcaaatgcatatattaattcatagatatactgattgttttgccaaaatgtactttaatgttttagagtcagatgtaatgtcagaatgctaaattaagctaaaagttttgaagtttctattaaaaactcatcttaaacataaaggcctgcttcaagtggcagagagccaaaattctatcaacatacttcttgtattgaaaggaaactgtacataagaaaatgttagaaggtaatcaatttctagatttatattgtttttatattataagaatttccatattaggctgaaaaatagaaggttgagaaaaaagtagttctttttgatttcatgttgttggtgctagattttatggagctgatgcacaaggaacaaaagataaatggttacgctttctctgaataagccacatttaaaacttaagtagaaaatttatatgagaaaataaattcataagactcaagacgttcttggaatacattaaattgctttgccaagtgcaatctgccttccagattcactgttatgtgtaataattgtttggtatctacaaaaagagctaatggccttggcagaagtgtctgggtgtggggcctacatgctcttgaccaggtcatgctctagtctttgttcccaggctccaaaccagctctattgaagtagcccaacatgcaactccagtgctctggttgtccgtgcctccctccacttctgaatgttttgctcagattttcactgtgtttgcattgtgctctgagcagttcaaagttaagaaagtatttgtgtacaaccttgcgtgtaacagctggctttcagttccagatgtttaaagttaggaatgtttttgtgtgcaaccatgagtgtgcagcagttggcctttggttcaaggctgaaaaagcttgcaatccctgtatgtagcctcggggctctatctaggaggagactttaatatttttactgtaattgagtcaagatggaagtaattaagtgttcaagaagtttgttgaaaaatacaaagatgcattctgaatcatgctacctaccatgtggcatggatacagcattttgttatattaactttgaatttctagaaatttaacattttatgtgtgagaactcttccaaactcttattttttattacatacatacatacatacatacatacatacatacatacatattattatttgtatgtctgcagaatgcatacacatttgtatattcacatggcatgtcttctgtacaatttgcaggagttggctcttttctcccaccatctaggttctgagacttgaactcagattaatctggcttggcagcaagttcccttaaccaccgagccaactcactgaccctctgtcaagtacttaataaggagactgaatagtgggttccttgagatgttacttggttttgacctttaaattgttctcacctatacataagtccctttgactctggagctggagagagagcccagtggttaagcacatttgctggttccgcggaagacttgggttcagtttctggcatccgcaccaggcagctcacaaaccacttaaaccaggaggcctgtcttccacagacatgtccacgtacagacagatgcacatttacaaaataaaactgagaaatacgaagaatctgaatgttttgaacttctggtcttaatcactcttgttttcccaactaccattccatagaaatctctctcccctttgaaacggaatcaccctagtgcacatcggcacttcatcctcaggtccaactggggccgttgcactccgctcttggagaggattgtgacttttcctggccatccctgatgctggcctttcttctgcttcttgtgtgagctccatttccctgcactccaggacaccctcgctggcccgctggtccttgttttactatgtcttttctctgcatcttatttctacacaagagttcagctgtctcagtcactctctcttcccatctttaaaaaaaaattctcagcaaatttcagcattaaaaaccacacaagtcatattcgtgcagaataaaaatatattttaaacaagagaattatctttaaaaatcaaattttcaagttaaaaaataaacataacacaaagcttaaaagtagtatttaaaaatacttagatctggtagctgggtgtggtgcatgcctgcaatagcagcattggcgggttgcaggcaggagaagcagggttgcagaagcctcacgctgcattgcaagccagcctggtctatgtgagactccgatgcaaaccaaacagaaacaagcaaattgttcaaacgcatatgactaatacaggacttagtaagttatttggaaaaagaattataaagggagatcagccaatcctgtgtgaataactaccagttagtcacattgttctccagctaaaccaagcaagttaactacagtaaagggagtaagatatcacccactgccatggggacctggctaaagttaaacagcagccttttttatgcctgtcagtgcattcctacaatcataagaaatgagtatgtgtttaaatgagtgctgaagactgtctatagtggttttatgtatacacacttccaactagcataaaccaaagcactcaattgcatggagtgaataaggatagttccctaatgatgtaatccatcccgtttgtaatggagtagtactcagtaatatagaatgacctgttattatacagcagcccaaatgactcacagacagtgtggaaagatggaaccagagatacacaatggctcactctagtcgtgcagaatttaagaatgagcaaaagtaatctaggatgattggtatcagagaatagttgcaccaaggctggaagcaccttggaaggaacaggaagaatccacctaggtgagtgctccggccctgttctggatgactattaatgggggcacacacacacatctgtgaatctatttgtaagcactgcttggtttgcatgagccctgttacttctcattttaaccattacccacaaagccaaataataccccattgtggcatatgtttatgctactagcccaaaagtttctattgtatggaaaaggagttagcataatgtaagttatcaaaccaggctaggtagaggccgagagagggagaggaagggatcggagggaaaaatcccaccaacattagaaggtttaataaattcttgaaaatcatcccacaaagacagtaccagatccaggtggcttttagagtgaattctcctaaatgcagacctagacccacaggtttggcagagtctgaaaaagggcaagcattcgctgttataatcttcatatcaaaaccagaccaacatggcggaaaaaggagagtcaaagtaagctttggtcacgattctcatcctaacattttaagcaaaatgtcaataaaatgaaatcccctgtgtgccaaaaataagggtttgttattataaactggatttatgacaagaactcaagatgggtttgagctgatgtaaatttgactaatttaccacatgagcaaattaaagaagaaagaagattatatgttcatctctagaattcaagacaaaataaacagaatcgtcttgtgttttaaaatgctacattaggaaagaaacaagactttcctgtacctaatgaagactataacagtgtcaccattagcaactagtatgaaacaatagaacgttttcatgaaattaataattcataaaaccagtaatctggtttgtaggtaacataactaagacaatcaaatattgaagtctagctcaaaaatggaaaccagttaactgtcacatacagggggtatggtttgttttgtgtgtgtgtgtgtgtgtgtgtgtgtgtgtgtgtgtgtgtgtagaaagtactgaaaagtatttgggcaggccatgtaccgcagagctgcatccgcagtaaaacttaagctctgtgtgatttgttcaccaagtcacaaagcaaagaccaccaaaatatcaattgtaaataattttgtttacaatgggcaaaaagtcgtgtatattcaaaaacaaacttataaagtacataaaacatttatatagaaagggattaaatggttttcagagatgattttaaaggcctagatgaataatgaagtacagtttgttcatggattagaacactctgcatcacaagacattcgcttgcccaaaactggtgcagtgattcttgcattggttatctcagcaaagttttattgtttgtctctttgttttacattcatgtttttaatttttggaacttgaccagcaattctaaaatacccatgaacaagcgaaagacccagaggtgtgaacactctgagtactgtggcagagtcgtaaactcagtatggaggccataggaggaggtttgggagcttgggccagcctggactacatagcaagacagtccactcagaatagcagaaagaaaccatcagcaggggataaaccatcagcaggggagcacttagtcagtttataaccagtctttagtaattagtagaccccaaataagatgccccaatgagatacatagctgaaacctcaggacagcatgtagctatctttagttatcattgaggaagcagataaagtattaaatacattaactatttggaaaaaaacaaattcttgctcatatataaaaaattagttccaggtggtttatgtacatacagatttgaaagataaaggcataaatcttttgaaaaagtagagaaaatatttttataaacttcggttagggaaatatttttttaaataatgtaatgtgaactacaaattaaatgattggtatgttcatcttgattaaagaaataactgaagagaactcagagatgcatgatgatgataacatattatcataaatataactgaaacaaatatcagctttaaaaatacctttaaaaagagccaagagttggtaggagatcacaaaccatcaaaaaagaaaatgagaaaacaacaagaagatctttatcagaagcaggaagtaaacgtggagatttgaacatgcacagatttgaacatagtagcccattggacttatgggaaatgtcaatttggaggccaagaggatggaggggaagaccccttaggaagctaaggcaggggcagaggtttaatgtatgctttttatatgttaggtatattcaatatgttcatcataagcatttagtacttaacaataaaggcagaactgtaaatgcagagagtgcccttcactacacagagaagacaaatgtaaaaccagcactgtgcaccgcagcccaggttaaaattcatccctgcccaattcagggagcctggaagctcttccttcactgttgcacgaaagctagccaagtgtggtttataaaggcattactatgtggctatatccccgttagacttactgtgtggctgtatccccgttagacggcttcctctcatgtgctacttgaacaggtgcgagcgagttcctggtttggggggacatttggctataatatgcatttgtttcagttcattgccttgtaagataataactgaattcttgctatgtccagaacattgaggtgcaaagctgtaaagagaagaagctttatgcaaataaagttcttggaccagtataattctgtgattataatcatatgctataggtattcatataaattagctatacatttttattctcaatgtagcacctggaaagctcataaggtaattaatatatagcagtagacacagacaaacgccattctagaggcgccttatgttgagtcttcagattttgttggtgaggaatagccgttgtgggcagttctgtgcttcgacagcaccaagacagagcaagcggcctggaaggaattcacttttcatatgtctgtgttagacatcaaacagacttgaggcaactgccacatcccaagtcctgaggcaggaggtgagcatctgtataaagggacaagcacggtagagctgtgtgggtcaggacgacaccacagcgaaagcagttgggcatgcattgcggaagcacgggttggctaagcatcctcacagctctcagagcactgacttgtgcttcttgatttcttaaaatgctttcaagtgaaacttggtgattaacgcaataggcaccttgaaaaagatggaaatattttcttgagaactaaatattgatactatagcctagaactgcacagaaatagaacataagatgtcttataagtatgtaatgtcctttgtaattcatattagaaagagatgaagaggcagatgaagtcttgtaaaacacctcatatcatggtaaataatttattttatggaattaaacatggcatcgcctaagcaagccatcaactgagtccgtgcgggttttgctgaagaaacgtggtcactgaggggaatttaagggtccagtatagtaagagaagatatttgttaggaaaaaagttcaaataccagttgataaaaatgtctatgaggcttccaatcctgtttctttattgatacaatgggctttctgcccacactgtgtgtgtgtacacatgctttctaaggttatcttggagcacagctgacacatttaaacatgaagattcttagtgaacagagaaagcatgcacgcgcacacacacacacacacacacacacacaatacatggttatcattatgtattatgataccagtgtatacacacactcctgtttattcatgcatgcatgtaacttattcatgtaatcttttttcaattaatttagtatgacaatattaaataaggctagaataatggcttatttcatcatattgtatcttacacaattgatgaaatagaaaaacataattgttaatagcaaatctaggagtgctgaaaatcaaagaacaaagggaaaaacagaaaccacaaaaattaaaatcttattttatttgctttgaggttagaggtagtttcagtaagtacaaaagatgtaacggcagtaaacttctgagcatgcaaacagacaaataaccatgggcaggtaaggagaagtgtccagtgatgggactggagtaaaacacatccccaaaggcaggaaatttaaaaaacgcataggaaacaacatttaagacaagtagaaattgtctgcgataagcatagtaaccaaacacggaagttagattttcttttttaattattctaagtccagaaaataaatgagtcacttgaaaggcaattaaagaacttgattgtgtgattggaatccactggcattgctttctgctaatcatgtatagaattttcactggaggggcgaagggaaaaagtggtggcatttttatatttgatttttataggatttataattttgatacatagtcttagtttattttaaatgtatatttagattactaatacatgattaggggtgagttgctttaaagcaaacatttcatgatctaaaaattcaagtgttactgataaacttaacttacaaaatctgttatgaacatagcgcagcttaccttggaatgactttggaattcttatatttatatttagtttgtcatgggctgtaaggaaacaaaaaggagttctaataaaagcatgttttctgaaatagttggtttataggtagtgaacatgtctttcgtaaaggttatttgtcttctaaaaatgagaaggatgagagggaaggagacactgaggatgggaagaaaagatgagggataaatacctaaatgggaggtcagaaaatctgtcaggagtatcaaatatcaataactgtagctattcagactggaaacaaaatgggttttgtagaagatgaatctgttttttaaatttatttttaatcaagtgtgtttgtgtgtgggtatgtgcatgtgagtgtaggaacccatggatgacaggagagggcactgcaaccttttggagctacaattcggggcttttgttagcctcctgacctgagtgttaggaactgagctctggtcctctgtaagaccagcaagccttcctaatcgctgagccatctctctggccccagtggacagattgctttagtgccttaaatggctatggattgaaggtttttgttttgttttggttttgttttttgtttttcttgtcattctccaatttaaatcatgtcaaaacaggcatgttattctgtctagattgagtcaagtcaagctgattccttcttttaatcaataccaatttaaatgcatactaaatagcatacattcaaaagagacgagtgagatgttttcaatgtttctcttggtagagactatagccttcagagaactgctctatctttatatcaccaaaatatccactggtggacaggtgagatggctcagcaggtgaagatgtatgcttccaagcctgaggaggtggtccctaggacccacatagtgcagggagggaaaggacttcctcaagttgtcctgtgtcttcaacccatgctctatggcatgtgcctagccaaatacagacacagaatatacatacacacccattaaacgaaataaatagatgcaatctatttttctttaaaagataaccaacaatagaattccaaactgtttttctaaacaatgaccaagttgttgtgtgaacttataacagcaaaacatcatagaagaaaggaaccatagagagtgttttgtaatattttctatttgatacaatcatcatttttttttgatttccctgattcatactctattccatgaagacctttctcaataggtcaattaggaaaggacactgtaatttccccactatcatattctgggtcattttcatatgattatttctagttttatgagataagttgtcaggaatagttgcacagaagttttccaggtctcaaatttacatgtctgggggtaatctgctggtggtggcgagagcctattgtcttttatgatacaagatctaaaattgcttggtgatggtagtcttgtccccttcatgacattttgggacatcagatccctgccatatgtctcatgttctgacaggcagtgttttaaagagagaaatgggcattgcccagtgggcatcaggaaatctatgactggagtgtgcatatatgttttgatcatgtgattcaagcatctaaaaatcagatgtcagaaatgtgctaagattattctcactaccaatgtgacaccatgaatgacatctgacattgtgggcagggtcatagttaaaatatagggcattaaagtacaaaaaactgtttaggataggtgtataaaatatgtatgcaaagcttatattaattttatatttaggatgttgaggcataaatcatgacctcaaaacttctctgcatttaggtatttcaaaaattaaaaacaaacaaacaagcttttgaaatacttgtcatccccagaagtttgaataagccattctcaacctatagagtacattttatgctgaactacgtactgagaaatcagtacattcaaagaaagcagcagtcagtcacaagaagtgtccatagagaggtgactttatagggctgtctctaccctctgaacccacaggagccttgagaaacttggacagccaacttggcggtggttaatgaaatgaattgtatttcttctggagtccagcgactgtgtcaacaggtgtgaacctgctcatgccgctgtgttctcgaatggcttggtgactttctgtgggtcacgttcaagatcacttcatctgctctctgatgggaaatgtgaaataggatgagatcacttcctttttccactctgagcctccatgcttctctgcaaagaataatatctgtgaaatatgaatatcatgctatcagagttttgggtctgctgaacctacagaaatgccaagttgacatggtagcctgctgtcatttcagacataggatacagagacagaggatttcccagagtaaattggccagagatactgtccaggttgccaaactggctttatctgaactctgggtttgagcctcagtgactgaggtggaagtgttggtgactaaggtgcaagtgtgacaaggtaattcctgacatccccatgcatgctcccactcacccttgcatgcgtgtgtgtgcgcgcacacacacacacacacacagaaaagggtgttcattttttaaatgaatgaggaagaatttcaacaatctagacaatttcaattcagttggggggtgtggttaaactcagccttccgtcatgtgtctaatacactggaacagcacaaaacattttggcataggggagctgaaagaaacaccaccgtgtcctaaaaacagtatagacaacaggaataaagaagccaacatccacagcactgtgtgggtgtaattgttaactggcttttcgactcgggtggttttagaagcaatttgaaagaaatgggaagggtcatctgacatggctacgtgggaaagctgtttgagtggacgggatggacaagaaaactcagaactctgtgtttgtggtgtgagagagagggagagaggaagggggaaagggagggagagggaggaggagagagtagacacctgagtgtgggtgtggacaatacagtaagctatttcaaagagataacagtaaccacagacaggtaatctgcacagcgctgccaacagctgcaaataccagatgaaaggagagcatgtcctgtgggtgggacatgaagctgccagaagaatagctggaaggatagaccaagaatagaaacaaaggaaaatggtcaggctgcctcaggggaggccaaagagcacaggaaggaccagagatatgcatcagtgagaatgcataagcgcagcatgggcaaagtcatgggttcaagcaccacccctaccaaaacgtaaaaagggttaaataaccccaaacttaaaagaatatacataagcaagaggtttttattttatagcaagcatatgagttgtacatatttatttatcataaatatgtctaaataatcagctatattgcaatagatatgaaatgaatgggttaaagcctcctgtcctcccttaaagagtgaatatccccattagggcatagattaacattgtagaaatagtcttgataaagcatgtaagaattaacataagaataaaaaggaatcatgatctaacaagaagtaaggttttgtgttatcttttggatactgatgatagttatctaagttctcaaagtgctagtaaacctagtatattccttgactctcttttatgacagagattatataacaaagtgtgtgtgtgtgtgtgtgtgtgtgtgtgtgtgtgtgaacaattatcaaagttttctaaagacccaattatttcttgagttttgactatttattatgtctttggaattaaagtatcttagaactattttatctaatatttaaaaattccaataaaaagtgaaaaatttattttaccccctctttggtttttgaaattgtgatagcttaaattttaactttgtgaaatatggattttgttggcaaaaataaatatgctcaaacaattattccctgatacctgaaaaaggcacaactctgttgcataaagcaatgatctgcatccagattgtgcatgttttctgtctagccagttggctatgagcaatctttgaccctgtttcttttctgagtagttctcctcagtctatccaatgccgcccaggacagtcggcaccgcaccttgcagatgataggcactttgtattattccattttagatcatgcatcacctccagggctcttttatttggttggtttggtttgggttttaaattttttcctgactcttccagggcatattaaactgttcctaccagacttgttttagctcccatagctggggaccaacaaagatgcttggtcctgaactgtattgccatgttacttaggcaaaatctgagtaggactctaatgtttgtgtgtttccttttccaaagtgtgttctgactccttgaattcaggatggtgtcatttcctcttggtggttaagggctaccatgtgccaggcactgtgcacagtgatagtctggccacatgattacaccatcaaacactaaagcttccatttttccttgggttaggtatcagttgattctgttgcattttggctactttcccctctgcgctgacttatcttcatatcaattcactattatgttgaaaatgactaagctaaattagtaagttgtctaaatttgtacaaagctgtgagctcatgacttaccctcacatacaatatctacttgtttgacaacaaaatcctgccaactaaaggtgttactctccatatgtaatttgtaatataattgtttttagaatgataatatatattgctgtagacattaacaactcttttgtttgatatctttgtttctcctagcttgtttggagtggttttgtgtggataatttgcataaatgtgtgtatgtattttcacatgtgtgtggaaacacaagtgtggaggtgtatatgtatgtgagttcttgtgtatttggaatttggaggctggcactgtcttcctctgttgcttttcccacttgtatattaagggaggtgggccagtcgctcatctggagctaccactcagtgatctagccacactacctagctttttccagggatcccgtgtttcaccttcagacgtctagaatcatgtgagctgcagtgcctatgggtgctgccaatcaaacctccagtcctcacgcttgcatagcgagccctttacccagagagccatcttcttgggcccagtttgaatcttttacagattgttctttaaatctcttcctttctgtcttcccacagttgtcactaactgtggtgtcctttatactattacttactgagcttttacaaatagattttagaactcttaatggacataaaatctaaatctgtgtattttaatggaaagaaatgttaatatgatcccgaagtcacctctggaactcccttggtaaggatctttgtgtgcctgctagtatccttcccttacatcccataataacctgtcaagtaaagagcaacaaaggcagttacttttgagcactggtttgttcactctgggcatggtctaggcatgttcgtatagttctcgttccacatagaactctaagatgtaagctgtattgtttttaattgacagggaaggaacctaacactcaccatcattcaatgacttgtagctcagctgaatgatgaagccacggtgtagcgactgattgtagagagaacattctagagggttttttttcctactaagattgctggatataattgggctgagtgagcatttgttttataacattgcattgttgactgccccttccatgcttgaaactgttggagtagagtgagccgtgggctgtaagacagctaggagaagtggtccaaacatggggagtggtgatgaaggagaaacacaggaacctgtgtagacatgtccttcattcttccagtgcagaaaccaagtaagacattggggatgaaggcaagggtctgtgggtctgcaggtctacagggtctgcgggtctgcagggtctgcgggtctgcaggactcttgcaaggaaatactaaggtttcatccttataagacaaagccagacctgctacttattcatttatctgtttctaaggtttttaaaaatggcattgctgtaaatttattttatttattttatgtgtataggtgttatggaagaatgtatgcctatgtaccatgtatatcctggtgtccttggggacaaaaccccccaaaggactgacattacagtgtttttagtcaccatgtgggtactgagaaccaaaactgggtcctctggaagagcagcagtgctctgatccactgagccatctctccagcccctgatccatctgccttgtatggagtgcttgcttagcattgatggctctgaggtcaggcctttccttgtaagccaggcaggcgtaggtgtacaaataaataaatgaacaagaaacaacgaataagcaggaacggcaatgattccttcctcttgccggagagactggaaagtaaaacggtgctgttgatttctgctttgtatttcggtttctccctagacaattaaagaagcaggaagaggggcaggttttggacttaaaaccgaacctgtgttgtttcttctatccctgcagcagggcaggtgcacaggaaatgtccctctgtgaggatcaagtccagcagcctggcatgaccttagcgaggcaatgagcaaaaggcattcactccaagtgggcttcaaatcaaggcttcaaattctgtgaatgagcctgactctgatttaaaagaagaaagggggaggaggagtcgggggaggaggagaaaggggagaaaggggagagagtcagagacagacagagaaaacaaccaccagaaagagactttgtcagaaaagagactatcagcatttgcaatgaaatagtaggtttaatagttttaaaaggtgaggacaatttccactaagaaaactgacaaattttaagtaaatctaagcccaggaatatgtaccaaaagccgagataatttaatgtttaaaataagcagtggaagctagttgttgaaatgatgctttggtagagatgacaaactcagcactgaagagggggctcccctgcaggagagctcagatgttcatgccaatttgttaaaacatgcatgcaagagcaattgctataggagagaatggtagaaatgcttcagtgccgagcttctggaaggttctgggagaggtaaggggagactcaaaaactgtgttaatttagccagatgaaaattgtgggaattaaagacattcttgccatctcggaattaaactgttcttagtattgaaataaacatgtaattaaaatacagtgttgaaactacagaacattgagaaaaaacaaagccctgcattagactctgggagatcagagcctcttctacactgagatctaagagaaggatctgggatgggacttgagagcaaaggtgcggaaacaggccctgccttgtcctgagctgtttctccatcatctctgacattccgtgttccacaggaggaaagcttgcttctccgctgtggtctcagcttttcttgcagagtagaagctgtgtttaaaggcagggagaaggggctgagtagaatcctggctttgtttagggtattcatgccctgtgccttcggacaagtcacctaatttatctggatgactactctttctttatccgctcctaccacgttattgcaggcgacctcagtgcacagcgattctccataaactgggaagtacgagacataaacagggacttacattacttgattttagaaatgaatgcaaactgtaattcccaaattcttacaaatgtatacgttagattcatgctcaaaatttcattaaaacagcaaaaatatttgcaaagctacttataacctctaaacagaaactatttggtgtatctttcatatagatgtggaaaaataacacacctggacatgatcaggatgtgttccgcacaagaaaacaccatgcacgttgaggcacttgcatttatttctctgtccctgtgttttctctgacagtcacccatgcacctggtgattgctattgtcatgtagctctttctgctttgcccatatctgtgttatttgtgtattgtttcctctggtgttgtgagagttcacttgtgagtagcataccacttcgcctctataccaatgatgtgactctcctgacacaaaggacattggcctttcctacatactatcatcacatccaaggaagatgcccattagccaccaataacatccagtaccaaatggtggtcacttttccccagttgctcaaacactcctggcccctttatcccaaagccagaccgcataagtgcatttaatagatgaacctctttgagccacctgagaatagtctcctgtgacctggatgttttaaagacaatagtccggttctctaaaaggtctcttcagggccttgtttattcttctgtctctgtctgtactgaaacctaggctgctacctctaaaggttttatgacattcaacttagtattttggataagtttctttgagtgtgaagaataatctttctctgcaaaggcttcagctactaatgttttccaaatcagtgcaaaatggtggctttctccattctagcattccttcttctttcccttgcatagccctcctatcattaagtaggcatggactgaattccctcctggaaaagcttagtgtttccaagtctttgactgccaattgtcagaaaaagaaatttgcatcaccaagcatgtggaccaacacacacctgcaatcttagcactcaaggctgagggagagagttccgagtttgcagtcagcccgagatatccgtgagattctgtttcaaagcagtcaaaaaagaaaggagggaaagtgacctcacgcttagagacttatttaatagtgaccatcatagcaactgagattggctttctaccttcgagggttactgtggactcactgatttttttttaatgaacttattatattatttttttaaaaaagcaatctataactccaaaacataatttttaaaaattcacaacttatatttaatttggtaagacaaaatgtagtttaaaagctaatgggacagagatcaaacagagagaggtaatcagaaaaggaatatttaatactatatgttattagagatatttaaccttttttttttaacttatgagatgctcttttctgaaagtctccgagtacctgaacagagtatagctgaaaacaaaaaatgtcaaagaggcacgtttaaattgttctcaaaatcaatcaaatataatgaggtgctgggagaaagttgtatccttgataattacatctatcagtatcagaaaacaaaggagaacaatcaggaagtgacagtccttctcccaagtagctcatttaaaaaggctaatgaaaaaaaaaagtctcttttaaaaatgggactaaattagcatttcaagtaaattgacaacctaagcgttgatcaaggccaatgtggggcccaaacaatggaagttctgtttctacttcacctgcttttaagagaaattatctcacgtgacttttttgttgttgtctttgatataaatggaagcaattgtcctgagggaggtgacagtcctcttgcactccggcagcaccgggtcacccctcaggcatctggcttcacttcgggatctgtttatccttaatgactgaagaaagctaaccatgttggaaaagccactggacagtctgttgcgaggtgtgtgtccctgctctcgactgagaagggggctaatgagaccgtctattagacaggagattcctcctgctccttagagcctcggccgaggtttgggaccaatggttgaaagcaggaaaagggaggatttgggcctagaactagggcaactccttggtaatgtcagttatgcagagctctcccagcaacagatttacaggtgtgtgttgtgtgctcagtgagtggtgtgcaggtatgcactgccctcagatagttagataagaatctattagaatgagtactttatagaccatttcaatttactattctaaaaactggaaagtgaaaatgttttttatgtatgccatttgcatagcatggctttgttttgaggaaactggggcagaggttgctgagctgggtgaagctgcagtatttaggccttatggtgtcttctcttgaatctctagttggctgcagatttgggcacatgtagataaaaacatggctatgtcgatttaaaacaggagaaagcattttagacaccgtgagggtgtagagaattagctgtctgaattatcaatagtgacacaagcattttctttcaataagagaaaacttagaagggtctttaaatgtgtcagctcattttgaagataggcataagtgctgccattttattaccttggcttttcaagtggttttgttctttattagtggacgagaaggaaaaaagcccttagtatattcaagcaacctccttatcagtcataatttttggagacagttttcgacatgttctgtgttttactgtgctaacaagagaaaagactagccattaagtttatgtttctttgtttttcagcaaggtcacatatcaggaatgatgcttgaagtatgctaataaacaatatataatggaggtcatcagggagtaagaaatattttctaactagttctaaagggaaatatagttacaaaagggatgaatgttatttacacaggacatgttgctctatgcgtcactgtcaaagggtctcacgaacagctccatgcagtaaatcgtcttccttgattgtcagggtgtgggaagccctggctaggtttagatttggtacactcagtccactggtttctaatgaacaaccactactgggttatttagatatgtgcattggagacatgcctgggcttttagggtttgctaggtataatgtcccttgttgtagaagaaaatactatgtagattataacaaataagaaatacttacatttgtggcacttatcctttgtaatttcaagtgaaattacacttattttcatactttatgtttttatgtcctaaacaacttgagcttttcacaatgtgctataatttatgattcatattaacttatgactcctatttcatattaacacctgtagcaaaacatgttatagcacaccaagtgaaataataatctttgggaattattacaaccaaacattacgtgtacacctttacagatggaattttcccacatttacaagtgaactattccttaattgtttatttcatcatagtagatttcatttttcaagatgttttttgattgtagacagcgtgtaatgcgaagggatgtatgtgatggtgtgttctatagaacccctcagttctttcgtcactgagtcaaccctacatgcaccgagagagaatcagtcttgagaacagaaagtcacaccgcatgcttcctttgagatttgagagacattacttcttttcccgcttctgtgtcacagtgacatcgagtgtgtctgagtttgtgtgtgtatgccctaacccctatcataaatactctgctccatctatttcactggacggtggtgttttatcttgaacaatttcctaagaaaagaaagtacatattcaaatgagaggaattagactctcagaagcattacctacacttctgactgcacaaaaatacctaccttcttagaagaatgatatgggttttctgtatgtgtgttagtgttttgcctgcctttatgtctgtgcaccaggtgccacgtgcctgtggaagtgacaaggtggccactctcctggatatagaattacagggagttgtgagcatccaggtaggttttaggaactgaacctgtgcctactgctacagcagcaagtgctgttaactgctaagccacctctccagccccattgtctaaaatgctacgagtcttaacttactagtcattttacttctctatttctgggaacaaaactaccatgattttagtgagaattaaaacatgtctgatacctaaaggcattggtttttgaaactgagcccatgtgttataagtactttgaatactagggtctagttctgagcttaagagcacctatattattttgttatcattatttcataatgtggtgcctttgttccttgtaaatgtaataacgtgtactgctagctgtcaactctcagtttcttggtaagatgctcatggtgctttgtcagagaaatccacagaatgttaattagccacatagacaaaaccaacatcgagggaagaccgttctgtggtcagaggttttccctcggtttgtgttgggtgggagcatttctttatgcacatgtgtctaagcaaacgcgttcctccttcttttctcagaagaagacctaccagtgtatcaagtgtcagatggttttctacaacgagtgggacatccaggttcatgtggcaaatcacatgattggtgagtgagactccgccccttactactcatccatttttctcatatgtgtgtacatcagtgcctatgtaattaaacagcattaagaatgaattaattgttctgccatcaatgctttacctaggcgtgattgattttttttttattcctcttattagacctggtaaggcattagcgcgttttattttctgcaagggctagtttagacttctgcagaggattatctgcgttctgccagtcaaagcacaggtgattagcaaattaaacttctaatcatttttgcattattgaaaactaacaggaatggttaatgaactggatgttagctttccatagagttttagacaggttttaatttcagaagttattatgataatggcactgctgtgtgttgcttaagcatctttgtatcaaaccctgaagtggtgagttttgtgatggggaaacataaataatttaaattgccataaaatagttttataagtatggtttcagcagcctggaaataataatgatcataaagatcatgtaaagaattcaggaatcagttttttatttcccacgaatttttccacagatctttgtagaagtggatagggagacctctgacgttactctaggccagtgattttagaatcgtgcatgtattagataggctggaactaaagtgacagcttttccacttattcatggtgtcccattatccacccattcctcaggggttactgcctggttcctgttttttaatttgataatcacttagtaataatgctaagagttgtaccagccaattaaactttatcaagcacatcttttgctactaataaaatgacaattgctattattgtgtactatttttgttactcatttgtatttttataccatgagggttttgtttatttatttcatacttacttcttggtgttttataaacccatatataagtagaatataatattttgaagtccgattagccctatattcacctaataaaaattttgtaatatagaaaaacaagtttaacatttttagacatggaatttgtttccagggttgggggactatcttgtattgcacagcaagaagcagagctctaagaaagtacattccagggtgactccaactgtcacccctgctcagggaaggctgaccatagcagaacttgcaacatatttgattaaaattcaggaccatgttggaaaaaattaatatcttctcaatagccttagctttttttttcaatgattggatttttttggacaattgttacttataaataaaatggtcacctgcaacatatgcacggcagttgaagtattgatcagtttacgtctttgtgttccatatttaagtatgaagattattagtgatttcttatgccttaagataatatattcgttgccatggcgggatagtattaagaggttttcttaagcaccgagaagataagcacagcatggaagggattcagagaatgttccgggcaaatcgcctcctgttcagaatcctggaaaaaaaaaagttcatgtaaacttccacaattgccttttttttttttttttttttttttttttttttttataagaaaaagggataggaaaacctgaacgatcccttccacatggtacctgcccatagttacatgtctccatctctttactgtggcttggtggcagcagtcacagattctgcctcatgttacaagttgcaatagtctcgaccttcaagtgctccagttacaaaaacgtgtagtgagtcctgcttctctccagatcccttcagtgtaaatttaatctctgggtttctaatttatccacgttgctaatgagaatacaggaagtatctcagccactgtgttaatatctctgccacaagtaggatctagactgaatattgagtgtgaaggtacacttggctttcccatctcactgtcaatctgtgactcccactggctcatccccccactttctctatcccctactcttcctgtttatcttaggttcctccagtccttcattagtgctctcccaagtctaccccctctctgtaatagtggattaatatgacactcacctcctcttgggatttgagcatttaacaattcaccttctttcagagatgaaaatccctttcattttcatggagggcctgattatttaatattcaggctatttttttaaaataataaaatatgtgattctattgcactcgaggcctaaacaaatgaatagcatccacttaattgctctgtctgttgaccaggcatccaagttcttaaactccattctccttgttaatatctagagagaaaatgtgaagcaggagggagtcgccaaggctaagatgcccctttttaaaatcccagtgtgatacttagtctttcaaatgaggcaggcagcattattttgttggctaaaatacctccattgaggctgggtatttttagattgtgtatcagtgtgtattttttatctaataaaaaaataatctgaactagacatttagtacaggaagagggattagagactgtctgaaagcctcttactctgttaaaagggtgggtggtgttttgtagctttcattttgcaaaacatctagaggaagagccctgtctcctgacagaaacatggtctaaggacgcctcaatgagctgggactcaaaagccccctatagcctcatcctttgcttttgggggtggggtgaagcaataagtttttcaagtaacctccaaacctcttctttctggagacgctggtttcatgctattgatgagggacacttgagaaaggaaacccattgatattttcaccaggagcatgagggaagtgtccttaagttctgtttgcagctaggcgtggacacatgatctcagttgcaggagtaattacttgacaaaagtgtgccagggccttgtgtatgcttattcaggaaaacatgaaacctttccatttaccacattttgacaaggttttgcatatttatgaatacatgcgcacacacactcacacacacacacattcagaccagtaattacttaattacttagggtttttcttctttgcacacacatatgcagagagtgagggagaggctgggggagggagagaactacagaatgttttaacaactttcctagaacaggttagctaacttctgtgcagatgagaatgtttttgtcttcctttgttcctttcacacagtctttgttcatttttaccataaagaagccattgtgcaccgtgacttttaatgcatatctacccttctatttctatcgagtggtaaagatttagtgttattttcctctgtgagatttcaagttactattatttggtacatattaacaacaaagaggtggaaccaggaaatctaaatgtgtttaacccagcgaagggattgcctcatataaaattacgaggctccaccatagtagagtaaatttgtaagtgcttggaataaagggttgttaggcatgagatgatataaagaggtggcattgccaagaactgtttacgaggagcttaattttttcactctgataattcttgaccaataattaccagcctctaattatctattttagttagaaagaaattctgttcactatggaggttggcactgccactactaacacataaatccctaaagagatgaatgtgttccaaacagccacacacaactgtctcatgaacgcagtgagcaaattgtgagtggctggtgataggcaaccagcagtatgctcactatgtagggccagtcagcctgacaaagaaatgaccaaaggggagagaggccattatccttggaatgaattattgcggctgctaacttccgagagaagtagtgaagatacactgtggtcatttctagccctccttccctagttcctagatcgattgtggagaactgaacacagagcatacacctatgagttactttgaaaaatctacttagaaatagcttgttttcatttcacttatcttttcatgtttttataagattgtattgtaatgattgcacgtaaagaatcataatatccccattttggtattttaaaaaaactggaaaatttcagatatgctagtgagcttatccttaaaggtcaaacatgatgctaattagcattctaggaagaaaatatatttatctcttagagaaacaaaagtggaaattagtataataaacattagctggcctgagaagtgcaatgcaatgatgttggctatttttatcctggtctctgatactcagtatcttctggataattatttttaaaccatgaagcgactcaacacgtgtacagtgcattcaggaatatatgtaccccatgtggtatggaacatgcactatgtcaagacaacaagagtgtgtaaatcagtttagtggaatggtgacactgtagtctgttcttacagtaagtggcattcatatgccttgtagtatgtctgatgccggggtgacagggtatcgccaccccttctttgccagatgccttgttttctaactgatcatgaaggtttgatggggaagttctgtgtcatctctgaaacacttcaacttgagacctcttgctttagaaaacagaaaacctaatacattgggctctaccatagttttggattttacatgactttgagagaaataacaaaatattttgacctttgcatatactttaaattctcttctttcattggcagttataaaactaatgaaaaaatgaatttgtcataatatttataggtatgactatatgtatatgtgaggtgtgtgtgtgtgtgtgtgtgtgtgtgtgagtgtatgtacctgaaagagatcattcataccatcgtaaggattacaaagtcattgagattctttggagcaatgatttacattcattctaaatggggctattggatttaaaaaaaaattattcatttgattacctaaaaattcagggaattaagaaatcaagcatttgatgttgcatatgaggaaatactggcttatttcatcaagggttggattaaaaaagatgaaatctgggcagtttaatggtaagagaaagctaccctcatgtgggcaatgctggcttatttgaaaagcccataaagggtttctgcatgggccatacaaaaggggtactttctctttaatagccatctgtacaggagagatgagaagtgggccaggtcatctctcctcagctgtcacgatattaacgtaggtaatggagcaagctcagcgttctgctgggtgttgtttttcatagatgttcatcgatttacacagataattctatttatttcttagagttggtccaagtgagccaggcagaataacaaacaccaaagcatttcagatgactttatctttgtttataacgttaacttttgtctaaaaaaaactggtgtcacacctactgtgcagatggccgcgtgatctgtaagccagccaaaacatttaaacaaatgtgtgatctggggatagattaaataaaggagaaagtggagtgtgggccacaaattctaataatcagataattttaagttgtgtgcagtgttgagccacggccacagcgatagctgggagagcctgccaatggcagcaaggtgccgcagagctctcaggatggagtcggtggcctggtaggccccggcttcagaagcacacgtctgctgtacagctggcagctctgtgtggggacatcagataaaacttatgtaaaatgaagtgttattgcttagtttgaaattattcagagagggaatttttagacagtaactgaaaacagaattcgtgttaccaatgaagcggactggacgtatgaagaggctttaattatctgcgcaatttaacaaaaattcaagatgtattcaaaaagggcggccagtagcattatagctgtgctgtttgttgagagcaaagagggctgtgggaactgcccaaaccttgtctactggtagccttcctgaaagcaagggcaatggaaaagaaaagtacccttagaagaaggcagagtcttcaggagcccagctgagctgtttacagtcacaagcttcaaaagattcagagtgacaaactttgtgcttggtccctacgtggagttaagttattaaaatgcaaatcgtgatgtttatcctcttgtgtttagcagccatggcttacaagagtaataggtattagcagttagtgtagtgtctgacttaccccaaagaacacctcccagacattccttatgttaacttcctgtaagaaggaaggttttcctgagctcatagacagacccacatttcatttccctgtcaccttttaggatatgctgcctttacagagccacaaaagagcctagctctcgggcagaatggccgatagcctggcctggcctcctgatctctacagtgggtaggggcagtaccatgcagttttgcttcacagtctcattttctcctcactcttgatttctgtagtctattccacatgaagtttgcagaacatttctgaatggaggtgtgggaattcatcagtaatcaataaattaatcagttcaatgcaagcacacccatacaattgaacccacgcaaaggcacgctcaagtgcatatcattcatatggatcctgacctatttacacaggatccaactgcacccagccaaagaaaaggtctctgatgacccgtttagacgggttatttcttagttccgggggccattgaaagcagtaaacaaaggagcggagagccaatatggagagtgggtgtcaacttcagctgctcatattgttgcatttggagagctgacggggtttcgtaggtcacctttagaattatgcctatgacagcagtagctacctgccaagattgcaaggtatctcacggctctcaggatggcgcctgtggcccggtaggcctcagttggaggggtacacatttgctgtacagctggctgcaccgtatggggcagccgtgtgggctgttagggagctggaaaggagacaagcatgaaatttcttctaaccccaactctgtttttctgtactgttggctgcttctcagatccttgacaaaaaaaccaatcaggcaccctttaatccgcctgtgattaccactggtataaaaagagaagcataatgaggaaaaatgcctcgttttgttgccttcaaaagccaacaaattggagttaacttgacaggaagtggcttaataattagattatttatttattcctgacacatatccccctgttactagtctcaggagaccctgtagatgctacgattttcaagctgccattacttcgctgtcttctgcgaacaaacaagctactgtctatcagtcaattaaatgcagtctttaagcagcggctgcgaagtcctcaatggagagagcccagggacattgtggctgatgattcctttctctgtactgtacatcactctctgaacgaaggtccccacagagacagaacaaagtcatgcattaaaatatcacttgttgatttgtttgctaatgaagagccattggactgtttgtgtatttctgtggcaaaaattgttgataaaagggcccacttgcaagtctatctcagttcatctgccctgagtgcttgtttaagagttattaaaatgaaagtcaacaaacagcagaattggggggtgggatctctgtagtaacaagtatcctcactctttccatccaattcagcccacaagggcaggaagcatgggcaaacagtgtccccacagcggcgttcctgtaacacacacacacacacacacacacacacacacacacacacacacacacacacgtgcacacgcaggcacacatacactttcttttctttcgtaggcaaatgccctttctcaatgtttaagagtgctacctttctgttttgttttgttttgttttgtttgtggggggtttttgagacagggtttctctgtgtagccctggctgtcctggaactcactctgtagaccaggctggcctcgaactcagaaatctgcctgcctctgcctctcaagtgctgggattaaaggcgtgtgccaccaccgcccagctgagtgctatctttcaaaaataagatgttagaatctctttcaggagataatctctcagatcccttttcctgtttattgaaaagtatttctgcaacgatttctctaacctgaatatccctagatattcattttagaagggagctaatataggtggccatgtaggtcagaagcaagaccccagccttgtgtcctggacagaactatgtctgtgcctctgtctcttcttgtgttgtctttctccttttctttctcctgtgatattttatgtacatattggtggtactcaagttccctctagactcagtgccagtgtcttaccacattccttatttcttcctgcctcaagtttgccaagtgtgctgccttcttttgatacactcctgagttcttgttaaatgccttgtgcttggaatgaacagctggggttcatctggaagactaaagacctatctgagtttggaaacctagataatattatgacagccttctgatgaaatatttagctgtggctcagctactgaaagagatatctacatttggagtttaaactctggacttcagaaagtgctcctctctgttgcaccagaatttgtaaagagcattcaagtatttaagtctagctttcacaactatcccacaacagactgtaaagcactaattcaggcatcgccagattgctgtatgtcctctctctaccctgttattccaactcatttgttagaaaaagcttaggtactcggaggtgttctataatagaaaatgaatttgaaaccctttcattaattggtgattaatatgtttcaggattagtttaagcagggctctacctcctgcccagtcaagtatgttctggttaatatccaattatctgcaccttcgtcgttattatgtcttaatatttcggatatgataccagaaacttgagagtcatgctaatgaggagcatagagcaagaattaaccaatgacatactcaatgatccttggtgaagagtctccttccttcccccgaacatatcgcttcagcgtcctgtgagccctgactgagaaggcagacttccagctacagcagacgagaattagaaaatcaattgttctcccctttaaataatatgatcttgaatttgcagtgtgttcacctcaaaccattgtttcatttcatttctcagaggataaaataggactcagcgaacctatttgtgtttcccaaacaggaaaccctgcgttctttcacctcgccctttaaacaagctgcacgtagttttgcctccaatggatgtttaattcagactaatttggtgtccctgtaatatttcgctaaggaaacatgtttcccctgccaatcttttattctgtttctccaagacacagtgccatgctgtagactggccacacctccattcagtgggttttttttttttttccatgtccattcacttttgagagatctgacttggttcccaggagctgtggctgctgtggtggcttgtgcctggtatggctgtgtggtgcctgtgtcattgtgtggtgtcactggtgttctgtgtgttacctttcctgtgccataacaaagccacatcagtccttcgcttccagtgaatggtgattgtcacacagggatccctactttgcctgggggtccattctttttgttgttaatgttaccgaccatgttcttaactccctcgatgcacaacttgctgctggccaccaatgcaccatggaggagatcttgaagaacaaaacaaacatcattttttcttctctgaggaacatgccaataccattcgattctaaagccagatagtgcagggcttctctttggttctttatagcacctggctttcttgagtccatttacaatgttccctcagctactcaaaagaatgaggcagtgaggaggagaaggcacacactacatttttccatgttgtatgcaaatgtcattaatctatagtgaatgaatggcagtgcacatcctaatttgagcctccccgaaaaccctttagtaatttacaaaggcatctagatggcaaaactggttcagcaccagggtttcatgaccgataattttacaatactccttaaaacaaagtaattagtaccgcaggctctggctgaacacaattgtgtctttgcttctctgtgtcctctctgtatcgtctttctcctttctctttattttgtattcttttattgccatgtcaggaatgctcagtgttttctctacaacagacctcagaggcttagcatattctctgtgtatttctgccccaagtttgtagtgtgcagtgcccatctctgctacatgtctccatttgtagtaaattctgtaaataaatggttttccttattttctgatcccacccgtgctcgctacaaactaataacaaaccaacttgagttggactcagagatcgtatgtgctcgctgaaagcactgtgaagacaggtttagcctctgaagagttgtgtagcaagtctttggtggctgctggtctctttggtgtcataaacatgggatatgtgaccatgtttctcccagctctgagtgtagctgtttttcctcctctgaggctatgcagcattcaagttaaaaactggactgagcactgacacacgttcaattgaaccatcaagtcttttaaaactgcctggccatgacgccagtctcaggctgtccgaccatacacacttccgattgtgggccaaagagcattgatttttagctgtcatttctagggcacatactgtagaattgaaatttaaaacttaatccattcagtaatgcaattaatttttaatgtgcagtaatactaattgaaatggcttgaatttagtaagtcaccacaagacattttcaaaagcaagtgtctccactcaggacctgaagagtaggtgatcactgtcacagtgtttactgaggggacctccctcgctctgcaggtctccagctgaaaggcactttctttaaattacaggagaatatgtatttctaagaagacagccatggttggggggggggggatttcctacgtaaatgttatttttttcagtgtataatttaggaagaaatatttaaacaggtttgcaaagctaatcttaatgtgctaagaaagtccttggcaatagctgcaaatgaagtcactctccaaccatatcacagtcaacactgagatgtatagacatagtgtctggcaaatttcactgtgtgatgtgttttgtgtttgtgagatcattttacttaaaagttttaattaaaagtgccacaatcaaagtcagcattctggatgggcaatctcattatatattatacttggacttgagatattattttcagatttgatggttgtggtaatctgttgttgctttttggtgtgtttatgttctgccaaattgatgctatatcctactttcttatattccaatgctttaacccttacatactatttcaaaaaggccttttaaatcccctgtgagaggtttttttccttgccacagtacagcaaatttttcacagtaaaaacaaataggttttcagtcatttctatactataaaacgttctctgagcacatttatctgctagtaaatgaggactttttaaaatgcatcagttctgatgaatgggcttgcgcggtgttcagaaggagcacagcattaagttaggaaagcggggaagctctgtacatcatgctcccgcagccctcacgttctagtatttaataacggatagagctgttaaagatttagtgcaggttccctcgtaaccctagcatctattcaaatgcgattttaagacagttttgcagcacataagtaaaaatgatatccgagaactcgaagcaattgtagcgtggcatattttctaaatgaagtgtaggctaacgtggtaccaatgagttcaacagatctacaccacgaaaccttggattcagagttgaaactgactttcatctctctcatggctaaatcgcgggtgctgtggagatccacaaagaacacgaaattggaactgtggtgtgacgaaaggagagagcttacttgtgatcattctaagccttgcaaacatcagctgaactttatagtgaacatctcctctgttttcacttaataaggggaacaaaaggaggaacaatgagagaaaatcaattgataatccatcccgtctggattagccaatcacagtgtggggtgcaccgtgagctctgctaacatctgttttgggtgtgctgtggcaaatactggcatataagaaattgttgtagacaaatacagtgtgctgtagatcatttcaggtaatatctaatagctattatccaaacaataattgctcttttaatctgggatggacattagtctgtaagagtcctctgtgataatatacggtctgtgtgatgctgaagtcacagctggcctggtggtggtggtaggttagaactcacgtacacccttgcagctctgtcctgttgccagccttgaagctgtaaagataaaggtggctaagtttggctccactctataaatagtgtgggttgggttcttctcagagcctatttgtccacctctaatttctgtcctgtttgatttgcagtcagtggccacagaactcattcaaactgcacagatacacaggccatctgtaaaagatagtctcctgctcttgaccagcagaaacgtaagaatcctgatagcagaggggaaatagcactttgttttgccattgtgtgtgtcacatggatgcccaaatgaagtatttcacgagaaagaatggataaaggagacggcttcatgtccacatggagcagaggggaaagatagcaagatgtgctttaggtataggtatgtttgatatgcaatgcttgatgtatgttgacctcaggttacaagagtagaaaatcccattttccagcttgtttcaaatgaagtaaaaatgctgcttcagttggtttatgctactcacattgggaaaggtgcttatactgtgataattatcatcaaggaatattaatgtgttcagcatttgtaacccaaaaactcattatagcttaagctgtgcatcatctgtgaagagagagctttgccagaacccgctcatcacaggggttgcctcctgcttgctgtggagtggtcagagtactgcgagaggtcactcgggctatttttgaaagctgaagttttgcagtttttgaatcgctaccttctgtctaaagggctcattgttttctgtctccaaatggccttcttcgtaatgaatgcataggaaagtgcaagaaagaataagattcaatcaatgagaggtagctgtgcctcatgatgtcaaacatgagagggctgccgtgtgcgttccataccaagataattgaagtgtttgtgtcccctctgctgtcactgagtgagggaagcatttacaatggtttccacagggtgggtgcccttgggtttcagatggaaatgccccattggggctccacttcacagccctctggctggaaagtgtgtgagtaagactgcagggtcagccttcctctctgagcagcagagtccttaattagtctgtgacaatctttcttatgagcctgacctgcctgccggatggcttctcacacattgaagacatctacgtaattcacagatagatgtttttatgcatctgcttaaaatcacttggtggagaccccgacttatgggaaacagaatccctgggccttccccagcaccctggcaattaatctgattaaaagagcaccactagtgaccataggtgcttggtttgctcagaaactgagctcacctgtgttggacagcttgctgcaagggaaccctgttcctgtgatagtttcacatgattaaatcccattattttcccctactgatccatcttctgtcatttcccataagtcaccttgctgcctgctctgtgttatggtttgtataggccaggcagagagcaggaaggctcagctctatcagcctgtctggctttgcagggctgctgtgtttcagaggtcaaactgtgaacctggccttgctcctgggaggactagaaaaatatgtttcataacttcccatagacttaagtgaagaggaggaaggaaatccatgaagcccataggctgcgtttagatgagctgttaggtggaaattcatcaagcaggagagctgactggtgttgaggaggctccctcaccgtgaggggtcactgccttgggtccagagccggtccttgctgagggctttgggggctagggtaatcattcaaatagcccagcaggcacagacacacaagttgataatctccaggcaagttgctgaaatgggaacttacttacctgctacaatcacttacatgaaggaatgctgacatactgagggccaggaattcagcacatccagcgaccgcaggctggttcctgtgaaagcaatttgtttcggtggtgttgttgttgtttgcttttgaaggcaatggaaccttaaatttattctgcagagcactaatgctacgtaatggatggatgtcttggacccagaccaggctctgggtagttgggggctggagccccagcagtgtaatgcagcgatactgtggtggcaccatttctatgaggatggaaacttaataatctttatgaattttgagtaactcataactccacttcctcacccaaagatatattatgaaaagattgcttctaaatccttcagacattctctgcacttatgatacatgccaccctctttaccttgaggcgttagaaatggatgtggcttcatctcttcataagagataaaaatgtatactttggaaggagcaaattgcatttgcctgcttaagttctctctttgcacatgatgtgggggatccaaacgtgaagaattgcttttgacattattctctgcctccgatgtcccaggccattacattcctacgctgaaatgtcctgtcacggcagaaatgtgaggtagaaaacccggaaagacactgcaccctgagcccatgtcctttgctgtaaccctcatttctttaatcattcaaatggtttgtttgtctcagtgatgaagtagtgattgaataacatgcatctctcaaagaagtatgaccaagtgcgggtttgtttggggtcaacaaagagtgttgttcatttctagaggaaatagtgatttttagctctttctaaaattccatttcacatactttttaacttgaaccaaaataaaaattttagtacatatcctgtactgcagacatagtgctgtaatttctaattcaagcttcctttttttaaaagaagaaatgcttggagctttctttacatgttggtgtgtgtgtgtatgtgtgtgtgtgtctgtctgtctgtctgtctgcccatctgcctgcctgcctgcctgcctgtttccagtagcagtctttcccaccacacactcactgctggaccactccctgttttgtgtttaacatgcttccaacagctcagagagcttggactaacgtgaaatgaaaaccatggagcttatattccagtctgaggtttgaaagagagatattggaaaaggatggttttgggctttgctccctttttagatgtaactgctgcttcttcattaggacttggaagagtttcctgtggttaaatttaatcaaatggttcagaataacaaacttgtacactcaaaattccaggagagttttgtatgaaacatgatttttttaatacagagttcatatacacttaaaatatatccacacatgcatctaccacccacccacccacacacacacacacaatctacacatgaccaccactagcaagaacaagaaggttgcagaacgttacgagatactatcacaagctacacctcttctcttttgttgtgtgctgttaagtggtcatgtctagacttctgaatcatacaaaaggctctggggtctttcagttatggcaagaaccaaaacttgagtgcatatgttcttctgggctatggtgtgtggtcactaccattactgttattaagcagctggggaaattgaggaaggcagtagtgtgtttggacttaaggagacagagtcatttctgaagtttaatgccttgtagacttcaaacgatgttctattctctatttgtctagtgatgtttttcctagctgttgagctgggaagactgtgtccctgttgtttcaaagtctaatgtggatgccattccctagacaacaagactaacctttgatttagaaaagaagaggaggaggaggaggagttggaggaggaggaggaggaggagaaggctaaaacagtatgatttttttccataaaaggtgttaagagtttagtgtggttattctattccattttcataaaacctattgcttcaaaaaagctaagttaaagctgggagtggtggcgcacgcctttgatctagcacttgggaggcagaggcaggcagatttctgagttagaggccagcctgctctacaaagtgagttccaggacagccagagctgtacagagaaaccttgtctcaaaaaaaaaaacaaaaaacaacaacaaaaaaaaaaaacccaaataaacaaataaaaaagctaagttacatttctgctttagaaatctttggagacttctttggaaatagcagcaagtaggcaacaaagtgacagaagttacttgttcagtgtaaatagatgtgagcagaagaccgcgctgtgcataaggcctaccgtgcaagtatgcagtaaagggatgtacatggctccgcaaagtagcaagcagttatgttcatatctttttgaaaggtgagttgatggatttaaataacaatagccttgccctgagcaatgtttagaatccagagtcacacaccctgcagtgtatgaaaacacatagccgcccgatgtattctaacagcacactcttttcattgtctgactcttgtcagacacagggagaagcttaggaaacttcagctcttctagaagcctcttcttgtgtgtctccaaacctcaactcgctataggaaaactgcaaagggaatagtccatttatcacgcattcagtgaagcacggacacggtattggggtaactacttgtcagattggcttctgttgtggggttctttttaaatcacgttcatttattagatgccaacatgtgttatttggtagagaaggaatcatgagggaagggtgggctttttgctaatatttttcataaatgttgtatgtgccgctgtgttctgcagaggaaattgaaacgtgctgtaaatttctgtcagaaaacaggagcaaacattttcaggttttctcctgaaatccacaaggacccgtggccaggacaatggaagtgacacctgggtgtagacttgaggtcactggcagctcttccctggtgctggtgacagcttaaaatgatgccgggtccttgtgttctaaacgttcctgtgattagagctgctaaactgcttttaatttttatcacagttgatttcacccaactgaaaattctggccatctagtgaatataaacctaactaaaatctattatataaaaaaaaaaatccaattagctagcagcagctctgcctactaggtgagcacgcagacagcagactctacagttgaggggaaagccttcctcacagtacagaaagtttgctttcctgggggcaagagccctgttggttcctcttgcatgtgctttattttgtcagctccaccttaaaattaaaatttacaaagtacaaaataaacgacaaatctttccagctcaatttctctctggatctggagaccaaggtgtcagcatggtaccttaaactacccgtgaatgaagccagccccaccccctcttcctctgcttcctccaggtgaccttttggtggagtccttgaaacaggcaaaaggcttgatgcctgcaggtcagggaaagaggttctcttctgattttctttaaggttcaagtctcttcatttaaaaaccttcctctgtacctagtcttcataaagcagtgtaagtttaaagtgtacaataaaatacgatcactaataaaactagcagtaaaataaataaataaatcgctgcgagtgacatgcaatctagcaggcaagaggttaaaagtgttcactgtgtgtaaaaattttacatagtgaggtcctcagatgcagaacagatggagacagaaggagaaagggggctggtaaatgctcaggtcacagtgagtataaggagcagtcaccaggttgtaagcccgagccagccagcaagcatgtgcttacaagcatgtgtgtacatgcacacatgtgccggggccatgttgagtgtctagaatgttctgagaccaacttcatctttgtcatttattcggcgaggaagccggtgccgggcaggcgtgcgcggtaatctgttgcactatgctgccatccctctgagcccctgtaggcttcgctgccagttgtttgcctgcctctcctagtggaattcatttaaattaaagcagtggaatgaggcccaagtccccaaatgctcagtccctctccttcatcagcattccagcgaagagagtaattaaagcaaaaattaattctggtgtaagcagaggaggcacaaaataactgatattagaggctagatgatgaatgcctggcatcaagggaggtctcctgggaggataaaagatttcacagagtttttgcatatcacagttttctcattatgagacccgacgaagattgctcagtgcatacatgatatgttaaaagagtagggtgaaaagcagacacttgttcaccagatacatcttaattagagcgctctttagcagacgggcttgcaaactctggtgataaatagactttcgaaggggagatgtaaatttagagcgttggggttctgggagacttcctgttgtttgtgttgcattatggggtttattgtggctctaattgctgccagtttattacagatgacactaggacattgacataaatggagccataaaaagactcacacggctattgaaaatatgcctggatataatggaaagctgcatactcattttgcctctcctaactgctccttacaaataaagtcatagctgtatgcagtacttcatcattttaaaactgagccgggctgtggtctctagctgtattgtataaggcatgggcctcgttatttacaggagtagtatcataaatgtggaagtcagagggcttgatttataagcagttcataattttgtaaaggtagcattttccccatctttgaagtactaagaaactttacattcattatttttaaagggtagtcactcagtgccctacggtagcaaagccactttccaggaaggtacaagatatccatttgattgcatgacaggcagcccaatggggagggaaggacatcggttctccactcaaatcaaaggctccgtagcctatgaaaagtggacagagccaagtaacccaactaaggttttgatgactaaggtttctgttctgaaaataactcactcattaatatcaacaagctgaaagagtgggttaatacttaaatcctccagtgtgtgtatgttgagtttgccatggtttaggcatacaagctggactacagttcatttgcaagcaactgtttcactttaaagtaccccagtattatagcagtaatttgtagaaaacttgcatccatccattctctctgtgtacatagaataatagcacagcttaacataccctggcacattttcttgtctctgggaacccccaatttcttctgaatatcctaggatttccttgacccccatgacagcaggggaagttgtccagaggaagaaggtccactcctcttgcctcatggcagatctgccttgtctgtcttcagatgtctatgttacaacagttgtgtaccccaagtcctatgtcctgcttccggattccccagctcaccgtggaatttggtctagaatgcctgttcacatgtttgtacttactggctactctagttcaggaccataactgagaatgctgtatcatctagtttctttgcctttaccgctggacctcggtcatgttaatgtggtaagtattttaggaaaaatgagaagacttgtaagtacttaacattttattgaaatttaattgaatagttaaggggtgattaaaaatctgaaattaacactctttagaaattaatgacagtcattaagatgtaatggggctgctcaccaacagtgctcagaaaggttgggggatttaaatttgcatgggggtcagagcagtgaaagatgttgtttatagtctcttgagcctcgactgcaatttcagggttggaacaaaagtgactctcttgttgtgttgccaggattactgtatctacagtaatggcagcttgcattgggtgagtctctgtgtcccggaagggtaggcacatgaccataggcagtgccctgggccagctgagctgtgcagtcagcatgcttttccgagggcctccaaaggctacccgaaaagctacccagaggctggctccttccacctgtcctctcagagtaaacggcagtgcattattcatgcgagcttgaatcctgggtctccttatgagcagactaacgttcatgtagaatggactgatatggtgggtaatggttgttttatgtgaatttctactctctggctatgatagtggcttcgccatcaccacctgaccagggtggagagatctaaaaagctcatatgttccctctgtggtactttctggtccctctttgtcatggagaagtgttcatccttaaaatgccctctgatgtttgcttataaaatatctgcagggctggctcacttacttcctgaagttttgggcagataaaaatatatgtcagcattcatattttgaattgatggataatcatggtgttctgcagaaggagggatctagttgtgataacttccaaagcagaggaacagaactctccttttcaaaaatgttagctctagagttagtctagctagttaattttcattgttatggaaaaatacttttgcttgttaaaatgcaagtagtgagtcttctgcgcatcgtgaggatgatggtgttttaagaagatcattggtttggtatcactgaaataaggacttaaggactggaagaattatgtttttgaggcagactttaaataatcatgtgacccgacagaacatctccagtgttggagtgactgtctataaaaccataagcctctgtctcctcctcccctttacacttttattttgctttatcccttgccgttattactttctcctgtaacctctccagcccgtgttctctctgcatctgcagtcagttgtcattccctcactaatactagggaacgcagtttacctccaaccctgtacaccgatgcattttataaagatgccctcatcccacccacacaggagctgtctgtgtcactgtcacttccagcccacaatggaaagcccctggaggtcaagtggcgtagtgtcaaacctttccccacagtccaggcctccacagagagcagctttggccatggttggctacaaaggacctgagctggaattgagaaggagaccagctctgcgtggctatgtgaagaggagaaatggtccaggtcagaggggttacacacagctcaagtaacaggatactcagggcatgactgaggcgggccttctcgggcaaatcaagcagcgcccattccctgattcaccagtgtttttatcacccatgggagtgagcacggccagctggccctgggcctgaaatggaaacagttgtaggagtgtgtacatttccatagaagtggactaaggctccaatagcacccgtctaaaatttaactgtatctgttagtcttattgacatccagtaagttatattgctaaattatcaaatctggtaaatttgggagacctggaatatttcctgagatttgtacaggtacatgtcatcgtctcgcttgagtaaaatgatgtgactaaaaatcacacagcttctgttccctgaacattttcatttgccctttaacaggaatctgctttatcgtgtgtgtggagggcaggggggtcttacatgggtgtgtatggcaagtgtcattcttgagtgtgctttacagctcatggtcagagcttggctcagatgactatgtaacctagagagataacatcctgggcttgcaaaggcagccttgggagtcagcagggtgtattcctgtgggtgtcaaatggaagctggggaacttcacttctgcttcatttggggacttttgttcaacacacctgtcccctctattttttcttatctgttctctactgaattcagtaatgtctctcaccacagtcctagctgcttaggtattgaaaagcaattgaaggatgtaatttacagactgataaatcagctccatttagctctggagaaagaaaagcagagtgggacttagcgaaagggagcaatatccctaaaaggaagtcagtatgatgccagtaagctttgtgaagtagaacctattttgaaagcacaggggtcatggctggaatggaggagagaagcagagtagcatattagcaatgtgggagagggctctttaaacaccatagatggattataggacagtgttcagcagacaggagacagagactgggagagctggctatgtggaaggtggggaagctaatcctagcagtcatgagaaatgaattgcattataatttctagccttaatggacgtgtggtttttttcccctcaaactttaaatgtcctaatacatttgtattttcactttctgaatttgaatctatatatcaagaaacaatttatattattcctaattagacaaaaaaaaaaaaataaccacacaaagtctttcatgtctttctaatctcaccctgttccaccaaaacagatctgtgggggtcctatcaaatggatgtgtcaacttctatgctataatgcttggggagaatagaagctgtaatgctcttgtcacacagaggaaagtaggatgtttattgtgtgtggaaagtttcgatgcagcagcgtgacagtaaacttatcagaatccaccctgccagaagtccgacattgctgtttattcatgttagcataaggtttaattattagcatcattgatttaactctgaattctatatcagtaaagagccttatgttagccccttttttgtgacactgcagtacagattaaaatttcatctgccaagattatatggtgtattctgatttcaggagacagaactaccgtgttctcacgaatagagcagccagcacgaataacctctgactaatcatatacctttcttatggcaaaagctggagtcgaatggattaagttttggtgaaaaaattatgaacctgccaccacaaatctaatccatgccgtggctttgtaaacagatattgaaaagcattgtttcctttgctctgactctaatcatagcacatatttgaaatttcataactttcttttgttccatcagcacacatattctaaagtgtataacattaataaatagaggcataatgaatgtgactaattgattttggcagtcaaagactggcatactttttgtacaatagggaatccattcaaggaagctgaactgccattaagagcaaagctgtggagcggtaatggtttctaatttggattctgtgtgaggtgagcagagcgcagttattcatagtaactcgccacttagggtttttgcttcattagtgacctttcccttaccatagctcattcccctaagtacagatttggtgttctggagcacggtgtgcactgacaagcgcaattctggggtttttgtttgtgtttaggagtgcggggggattgaacccatagccttgctcatgctaaacaagtcctttaccactgagctacatccacaaccctctttattccctttattgagagacaggtcccacaaagttccctgaataccaagcttctaatggatctgtcaactctagagatgacaatataaatgtccccactcctcactcttgtctcatgctagccacacttctgggccgttggcatatttagtcatgggttctgcttgcccggtgaacaaaaccgccagtagtaactggcttcctagatggaggcaaaacaagcttattaacttgtaagcacaaatacccaactacagcatctagtaggagttagtgaaaaattaattccttgaaactccaagggaaaaataggcctggattgtatgatcagccttacctttaaaaatgtgactggctttcaaaagtaattttacctcctttataaagtctctgtgcactaagctatattacacggctgcagtttaatagtggacagaagatcatattgggtgtcactgaggcattaatcaatggagtgtcattacacatcattaacaactctgtgttaagccctgtcatccgaaaccagagatagtgtgcaccaagacacccgtcgtttagtgcaggcagaactgatttagaaggcagagaatggctgttgtaaagaatttgcaagaactaaaatttatattaaaaataactttttttttttgctttgcagtctggcttcccaaaggacagagctgatgtgctcggcggcaattaggggagttccaatgggaggtcgagtcatttccaagcacagtgcaattgatttttcaccaatcagaatagggaatgagatgttctaagtctattattaaattatttatgaagtcatattaaatctggtcactactcctggcatttcaggttagtgaagatttctcaatcacagggatggcaggctggtgaaaggtgcatttcttaccacccttggttgctgtgatttaaatgagatgagcgggatgggagaagaatgggagctactgtagcgtcggcatcttaactaggtggtgctcaccgccctgactataaatttgaggtagcatctcacgagtggaggagtggtcactgctagagattacaccctagactggtgatttgggtaccattagtacgtatggacatatcagtttctgtcaagaaatgtcccactaaggtgcaagaggaatgcatgagtgcaattctgtaggaaatgctcagtaagggaagactggggaggcattataagggctttcttggtccgttaagttaatcttctcttctagcagataaaactactactctggttactctaagcatctcatgtcttcccttactttgcctctcaactcatagtgtgtcttagaagccacattaggagagctggccttcaagaaccatgcaaactgtagacccgagttcatttatagtttaagaaatactaaattctctatccagggtctctgacttttaggtttcttgtatctataatttttaattaattttatctttacagaagagaacatttcaactaaaaacctgactgctttgcacagaaaacccatgttttggttcatggcatgaagttctgtgtctataaatcaggctaccgctgtagcctcttgatgtattactagccgtccacactctgcgcagtgctctcacatctctctgcttcatctgtcagatgggcttgggcatagcagttctgtatactctcatgccactcttgtgaaaatgaattgagaagacatgttatagttatgcaaagcaatagttaaacgttagctctctccacttaaaatgagtatgcttttatttttccttcttcgattaccattggctccctagaaaccaatgaagccgaagttgacttctttgttatagaaatagttggatggtaaaaagagaaagctaaaccacctgaaaaggaaaacaaagtttatagtcagtcttcataactattgtgtagttctaggagaagtcagaatagtcactatggaaactagtccctgcagtatgccctcttctctctcacacacactgataatgtctacatgtgggcctgtggcacatagatcctggtgcatgtgtgcgcatgcacgcatgtatgtatgcacgtgtgtacacacacgggggggggggagggagcagtcaacacccttcctatgagctttaaccactgcgagtagacttaactgattcctggcttgctcatacttggcattggtcagtgggcagtgacttgcgtgaggggtggttgtgtatgtgaggagggcactatgcatgcctggaggatctctcagataagtgggttagtacctctgacagggttcagaagtgaagcaaccatgttccttttgtgtttcgctcctgtggtttactgacattggcaggtttcaaagatctcctttttagagatgattttatagatacttgcctgtcctctccccttcctctccaaattttaaaatcagggtttcactgttgtctattgtggactgcttttttttgttgttgttgggaagtctgtgcctctcctggtatgtgtttgggaccgggtgcacactacaccttttcaggtccacagggataagagcagatggaagaatttgattatctagcagtagaggaccaactgttcagttggatacagaaccgggagaaaagggttgaagagatctaaaatggctgtcgtatgtggagccaacagtttccgaagggaaccaggcaggcactgaggtgtagtaatgcagaatctcttccaagtaccagctggggctttcaggagccgctatccccacagcagacactcagcaggctccgagcagcttgactttaccatatgtggaactttttattctccacctcgctccccagagggacgggccacagggacaccagaggcaggtgaattgctcttaatgcagagcactaaatcactgggttaacatgagaagcctggagagaggaaatggatctgcagaagactgactcggagtctcttaaccttggagctattctgagcaccaaaaaagatgccgcataatgtttcattagacgctctcaccttgtgcgtaccctcctttatgcgggtgacctttccctccttgtacatatttcctaaatgcttttaaaagccattcaatacttcagaatgctaactgtacattttgtattcacacagaatcatacctttaaagtaacaggggacctgaacaacactgcagtctgtgatttgtgggagttccttgctttctctctgttcagacaccccagtttgacagatggggcacaaagccacagaacaatccataactccagtttgtatcataaatttttagtccctgctcctccaccaaatgcctgcttcctggtagctaggattgtcatgtaatggtgctggcatgaattagtattgtgtaagacatttcttcatagtggacatagaaatacatttaaaaaaataaataaaaagacacagggtcttttatttaaaagagatttaaaaatagaaccatctgtcagggcccagttacaacaaaatgggaaaatcaactcaatggaatctttcaaaaatgttagtaagttctgttttgtttgtgccttctgcctaattgtatttattttgttcctaaaatgcccctgccctggtggatggtgctgcctttcaaatcagtatatttacatgccctcaaagacccaatctctgattgcagagtatttttaagtgaaaatgtatttagggttttttttttgttttgttctgttctgttctgtttaattctgtgaccttctagctgactaggaagcaaacacatcacaggagaacatgagggaaatcgtagagaatgagggcacaaatctctggaaagcagaactgtgtttattagcagccttccaggtggactgtcctgaagtcacattggttgtcatttgatgatcctttgcttcctttggagaaactgaggaccaatttcggtgaaggaggtggccttgtgctgatggagaacaggtgacttgatttctctcacacactaggagcttgcaccaggctcagcttaagttaccagaaaaggggtcatgagggatgcagagcagaccagcttcttatagttaacaaaatagggaaaatgcaatcattagtcgaacaagcccgcctctgttaacccttatgaaacacccatcctattagtcaactaatatcttcaaacaaatactaatatataggttaaatcaataggcctgtattataaagtagaaggtacggttgatttcataaattcatgccgtattcacttgattgttgtagtgctcgtgcttaaaagcagggcctcctgcatgtcaggcacaggcgtggtcactgagtcccagctgcagcttcagtgataatctttgaatatatggggctgtctttgcaacaagaacctaattccactgatcacctggttacattttcctgtcgtagtagctaaaggagatgtggagcatttcaaagctgttatcgagagatcgcaggcagaggaatctttgtgtctatgtggggaaaagattttaactgtattttgtattaaacctataccagaaacaaaaagaagaaaacagatgcacatcacagcagagtgctcttctgagactttggtgggtgatacattcatgtggcactacctctctctttacaaaaataacgattttcagtgtttttatgcatggccatggtgatatagtctaagacactgctgatgttaaatttgtatcaaaaatcttatttggaaaaatccaattaacttcaacatatacattgaacagattctagaaaattttaggtttattctgctgctatggaattttgaacatcatgataacaattcatattttttatgcttcccatatgagctgtagtctgtgggtagaggatgaggtacatagcaacaggtttgatttgtggggaaatctctaccctctgtctttttaattatttttaatttttcattttaagaaaaaaagggggggcagaaaaacttgaatgcactaatgagatatagcagctgagtttgagataggaaagttcgcttttgaaaatgatttatttatcggtaaatctgttagagtgaaacttaacctgaatggcactttgtgttgcttgtagactaacctccccagaacacgtttaggggctgaagcagaagaaaagtcggcagcctcgagaatgttgtctgtcggctctcactggtgatttaagccagttgaacacagagtggttctttttggtgtcatttggcagaaaagggtggactggcatcgcgtgataaggaagagccgtttctcctgcacatgtgctagagtctctgtaactcataaattcaaattacttttaaaagctgcccatgatacatttgctcattaaccagatggaaaatggcactcaggaattttctacagtgttttcaaagaaagaatccaattgcaggcagacattccttagtacagtgtttatgcagctgtacttgtgattaaattacaccaacccaggcccacatgtagccacagaacttattgcttagagtacaaagcaccttgtaagagcatgagaactctcattgtgatgtgttctggcctcttggccaccgtatcaagctagcatcaaaagccatgcctgtgctccgaggtctctggagaaggagccccgggacagaagagagctcctctcactgtaggaggaactttgacagtctaccgggggatgctgggattgctgctgtcagcagttccaacagcgcaaacagtgtgaagaagcttccacagggattgaattactgaagacttctgctccgtgtttttggtataattgagagcacagagggagcctgattcctctgtcttatgatttgaaggtgaagacaagagcctgcagggctctgtcagagttatgggcatgctcaacccagacttcaaaaaaaaatctaattcccataaaaccgtacaaggctgaattgcttacctgcatataaaagatttactttcactgaatcatttaacacacaaccatattaattgcattttgaaaaggaaaagcagcccagaatacagcacagtgaaaaacaccatctcgggtgtgttaaagagctctgcgctctgaatgcctgcttgaaagtgaaagtggcagataccaacacgctgacacccgtgaccacacacgaacacacaagtcagagcttctcaaggaacaggccatgggtgttcactgctacttctgttggaaaggaattgatgcccctgttgtagaagtgttgtagctatgcctcactggtggctgtaactattattctggctgtgcaagaaaaacagtaagtaagtgcagagagagagagagagagagagagagagagagagagagagagagagcgagagagagagagagagcgccagccatctggctctcctctgtctggtttagcttgaatagtgagacggcgggggcagtagtgtgatctaccaatggccctacctttgtcgtcctgtttcatgcatagtctgacccaaatgcgtcccttgcacaggagggaagccagcagtgacaatgtagtcttacggtgaaggtacagatagcttgactgctctcccaaatgcaagggcgcgtcagcaccacacctgcaggtagtctgaattaaaccgacgccaacatgcaagactctggatttacctagtttctctcctggaaaaaaatgtggccaaagggctggataaaaatgagactgtattggaatggtagcttggtttctggatgtgctctggactcagagaaggagggttaggtgctccccgtgtgtatctacctctgcctctcaccctcctccctcagggttgactgtgctcgcctcttttgacttctggaacatctttaggcatccactcacctgaaacccaattaacccactatggggacagccctggaaggcacaaaagctcacatgtatttacacagtgacccagcctactttgatttaaccattcctacttgaagcttttgtggaaaagaagggagtaccaccctagaacaaataccaattgtcagctttgctttcacatcgccagccagcagatcttttccaactgggagtaatatcctgttagctgtgtgtaattctcctttcacctgggggattgagagtaccaaatgatttcagctgctcaggcattacatttcggtctgtcctctccttctgcccctgtctttctcccatattccttctgggaccttcttgtcgtttatagaacaggcaagtttctcagaaaaccttaaccagcaggcttcgttcggaaagaagccttctgagatgcccagagacggagagccacacaccttccaccctccttacaccagcactacccatccttcactcagacaatttctttttctactctcaaaaaagaaaaatgcttttgaagaggaacatagacatttgtgtgactttgggctagaggcagtacctttggccacgaactgggcactgtgtatgtgatgttaccacgggcgttctgttcgattgcattgtgtcttaacaacaaagccccccgtgaaactcaataaaattaccaatttcacagttgattttcttcctgctctgctctgcagccctcacactcctggcctgtctccacacactgcaggggatggtgtcggaccaaaccaatcacacggtgctaaaaaggaggcttgttaccaacgaggctgttcttaattctcattgtcatgtccagcaacttttacaaccttttaagcaccttttgtcactagagacatacctgcatcgattagaaacggaaggggagtgttgaactgggtggctgctcagatcccactgctgggctcccgagaagccatggttggattgcacacaatgtatgtgggcccattgtatttctcatgctaccctgtcctgtctctctgatattattgactatgctaactttgataattcaacattcaatcaaagccatagggcctacactttataagccttggatcactgattagaaactgagtattccaggtctacttgagtcactaactagccatatgctcctgaattgaagtcccctcttgtcctttgtcccactagcgagagtagttcaatataagtgggacacttaaggaaaatgtattactcaacatgtttttctgctctttacactaatagtcaacatattatatgtctcaagtgatcaagtcttagcctgataagcctcttattattagctacaaacaataaatatggttgatgctgtctaaaaacacaacctaaagtattgtaactaaattatagccttgctctaagttagaatactatggtcacagagataactaactttgaactattttcattatgacttgatatttttctattaaccacatctaaaccatgaaaccacatttaagttagatatggatttgttattgatttctttggcagttctcttcattgcattcttttaggaaataatagactattctaacagccaagccctgttggagttgtgtacaatctagtttatttttacagggcattttaaaatgtattaatacacagagtaggctgttgaatgggcagttgagtggtagagtgaccataagactggatggaaaaatgggtgggtggatggatggatggatggatggtgggtgggtagatgatgggtaggagagtgatgggtgggtgggtagatgatgggtaggagagtgatgggtgggtgggtgaatgtttgggtaggtggggtgaatggattaatgaactagtgcacttcaatgttgaaatatgcactggtttcatctgttacagaactacatctagtgttgtaaagattgcaaagactgcctttacgtttcaagttgtgtatcacttttatatccttcagctattgtcttgagtttgcttttatttttggcttaagtgaagcttgtctttaccattgtaactcttcacaccaagtatttggggaagattgctttcgggtgtgatggccaagacctttcctctccattcagtttaacttcatcatggctgttttgtgaacgcaagtgcatagtagttctccttttgcgtcctctcggaggaaggaagaatgactcttctgagcttccagatgacccgagcataggcttcctttgggaaaatgtgactcacacaggagacttaactttccttacattttctgccttgcaacacccacctcagctccccggaggactgggaagtttgaaaatcctacagaagacaattcccatgtgtccaggagctactgctgatcatgttgtgacccgccatccttgttaacgaagtggttggggaatttcagaagccagcctccttgtctgtcctttagggctagaaaccagaatatcagtaacagaagaattacgctgcctactggtctggaaatataaaacaaatcgggttttgtaaagtgtagacttctctctgacacccagcccttccctgcgcagactccgtttcccagcctgcagttgcaagcacatgcatactgctcttactgccgtcagggcgtgcacagctctcttctcctttcagtcaggagattccaaggttttctaagcccactcttcatgattgcaagcaaaataagtacagcatttatcttcttcagcattactgacacgtgggcagatttgaggaagtacagcatttcattgataatcaaccctcacccaccatattagccatttcaccacacaccatgaaccttgagactaactgccaaaacccattcccctctctcatgtccataatagtggcatttgcgttttctggtccccagcaccagctgtcacacttgatttccatgagattttgtgtacatccttcccaaataactttaattgcttgaaaatgtatatactctattccactctgtgtgtgtgtgtgagtgtgtgtgtgtgctcacgtgtgtgtgtgtgtgtgtgtgtgtgtgtgtgtgcgtgcatgcgtgcgcatgtgtatgttttaaggaaattattatccagcccaaggcaggtggactgaggaagaaggacacaaaggcagtgtgacatgctatggtgcctggggtttgggatgctcctgtcacaagctttcataatgagaatagttcatagaaccatgagttatcatgactgtgacctgcctcgggaggtcccatgccacatctgtattaacaactgcatctgcttcagggtaaccttattagcttgccacagctgagccaggggcctccggagatattagaccaagtccccagagaagtctaaggcttctgctctccctagatttagtgtggtgtccaaaatttaacatcaggacctgctgaattttattttgaattatctgctatagcaactctagcagaaaacaacacacaccacaatacccctaaaacttggcaagctccccaaatgccagctccagttcccattatggcatatggcttgtgtgtttcacataaaaagcaatggaaatatcaaaggaaaaattctcaccttgatttctgtttgtcttctcactctgggaatgtacaaagtgctgcaaagaacacaaaacccagagaacacagaagtgtgaacttctctgtgcaaattttacttccacattccacagcagaagaagtgaagaaaattcaagtcaatggagtgatgtggtaagaaaatgtgtgtgnnnnnnnnnnnnnnnnnnnnnnnnnnnnnnnnnnnnnnnnnnnnnnnnnnnnnnnnnnnnnnnnnnnnnnnnnnnnnnnnnnnnnnnnnnnnnnnnnnnnnnnnnnnnnnnnnnnnnnnnnnnnnnnnnnnnnnnnnnnnnnnnnnnnnnnnnnnnnnnnnnnnnnnnnnnnnnnnnnnnnnnnnnnnnnnnnnnnnnnnnnnnnnnnnnnnnnnnnnnaacccttaagtgagtttgctgtggcaactaaattcctaaaaagctctttcattccttagttcaaatgaatctgtcagaattaaattcagtcatatgtatctcactcatccatccatccatccatccacccatccatccattcattatctcttaaacagtaagagtaacagaacagcaaagtcacctgagaatcggcatgctaaaggggacctcccaggtacacaggtgactactcacaaggggcattctctgatggacaaaattttacccaattttattttcttgagttttatatccgatgctttcaaaggtctgaaatgagccattggcggttaaatcaaatgatacttagaagaattccagctttaactaatagaatgctcctgacagtgagtgtactggggcctcccgcattttctctctattcatctcagaccctccctgaggtttagtccctccttggtagactgaggagctaacaactcagatgtgtccttggcaccacacatttgccatgtaccatctcatcttccagcatctgagctgtttagtgctacactgggcacaccaagaccaagaggcgccaaatagcacataagctatgtgttgacatacctaatcccgggcctttctcagcaagttaaatttagttaactctcatagaaaagccttatatcttaggcattcaagtgagccatgattaaagacctgctattctttaaacattttgcatcttctttccttgcacaatgctgaggatggaacttagggcctcatgcatgctagaaaactgctctatggataacctagagccccactctagggctcttattttttctagccacattaaaattgccagcttcttttccctcctaattagtttacatgcaaaccaactcatctggattttgcattgggagtcactgcacctaagcagaactctttgccatcttatccccagatgtgattgtaactcgggcatccatttttatgaaccacaaaagttcattgtagtccagagtggcactttggttgttcggtgttaggcatttgcagtaagcaatgcttttgtttcccatattccctggcctgggttctcggctccgcagtggcgctccctggttcctgggtcctaaggctgtctgccttttggacaacacagtaaataaaatcactgggaatgaattcaagagaaaactgtcacagaaaaaagtgttcagctcattttgtaaaatgagcattcaccaggccaagtgaatgaagagtgccggccagtggtcagcatccaggctcccttcagctgctctctccagtgtcagcgtgcagtgtgagcgaggaaacctcagcctgttgccaggccaccaccatgcactttcagacttaagctcagtgcccagtggcgtggtgcacgcctcatcccacaactctgctcacccaagtctgctgttcctgcctttcgtttttctctgggcatcactggttcttcactcttttatcattttgtcttctcccttttcctttccttttgttttcagccccctgaacagtttcctggagttttaatgtttctgtggtttcatgcctgactgctggcctttacccctgcacacagcttccttaatcagagactaaatatatgtaaagcttagttctgattctcaacaatctgtagttttgtgatcaattgggaaaatgtttaaaaggcagaaagaatgtaatgccttgttgattggggcttgatggcctgttccatttggtgtagagctacccttgagctaccttgaggtcctggggagtataagaaagcaaactgaggaaaccaggaggaactagtcaatgaatagggttttcccatggctgctcttagggtcctgcctccgggttcctgccttgagtttctgccctaaattccctgcatggttcattggctactgtaaaatgaagtcaacctgtaccactcaacatctccttcatcatggggtttatcacagtcgtagaagcaaagcaacagtcactgctacagtatcattctcttgttcttctaaataactcaaatactttcctgggtgacactgcagccatcacagattgtctctttgtgataagtttttaatagtaaaaagatgtaagaatgttctcagtgttcttcccatgagctttaaaatctatggcttaaaaacatctcatactgatgcccatgccttttccctgtgagcgtaaccatttctggatacctttggccacactgaaaagtgactattgtttgaattgatatgttttattccaaaaaacttttgtgtggattatagcaaccatttctcattcccgtttccagttttaatatgagtgagatgtacttgttctgtttttttctttttatttgttaattttgaaaagagcttatttctaccttattaccattaaaaattagtgtttgtcattttggtttttaggaaagatttttaaaatttttattttaggtgtgtgtttgtctggtgcctacagtggaggggaaagggtgttgaatcctctggaattgggttgcaggtgggtgtgagctcatatgtagggacaagaatcgcactgcacagagcagagctgaggagcagcagccagtgctcgtgagcactgagccacctctccagcctgcccatgggtacttagtaaagaagtattcacatgctaaaggtagggagccttctgtcttcccttacatctcctttttccaagatttgatttcgtttttgtggttggttggttggctgattttttgagtctggttcactacagaaccctgactgtcctgaaactcactatgtagaccaggctggtttctaactcttagagatccaccagcttctgtttcctgtgtgctgggattaaaggcatgtgccatgatgccaggcctatggtttgatttcttaatgatgtttaggatacattttttaaaacttcctagcaatttaaaagtgcatcatgtccactttattttgttaattttaattttttattttaattaatacatgaaaacacaagaactattcatgtcagtaaggttccacatggctttttgagacatataaacattgtataatgctcaaattgagtcaatatatctttttcatgagaacttttctttgattcatggtgagacattagaacttgttctttctagcttttgaaaatatgtgttctccttaagcactatagtgtgaaattgcacactagacgttcttcctcttgtctgacttagcatccaccaactttcccttccctcctcactctatgaaggttctaggtactatcattcttgcctaaaattctatgaaagaaacagactgtacatacaagtgagctgcttcaggattgtctttctgtgattgctttgtatcacacgggataaggatgcacagctccatccacgttgctgcagaggtcagaatctctctattgatggctgaatagcactccattttatccatgtcctcttctctttttcccgttcctcagctaggcatccattggctatcatgatatgctgcagtatcagtggggatgtcacctccacatgttgatcttttctttttaaatatgtacacattagtgtgatgactggattaaataggcctgattttaattttctgaagagcctccacactgaggggattcatggtgtctggctttcactttcacactaaaagtggaccagggttctccttttcttaaatactcactaattatttcctatactttttttgtgtgtgataatagccacccttactagggtgaatagagctcctactacagttttgatttgcaattcccttatgatttttttatttttatctatttactgaccaatggtaggtcatctgcttttctaaaggtcatttctcattttattttgccatgaatactttgtggtttgggttggtggttaggttggttggttggttggttggtgaatgggttgattggtgagtgggttgattggttgctgagtgggttggttagttggttggttggttggttggttgaattttggcctctttaagaaagagtctttctatgtatcttaggttgatttcaaactcaaaatccttttactctgaccctctgggtacaaggatgacaggcatgcaccagcactctaagccttctgagacttttaccttcttatttactctcccatcacttccctcaggggtatagtttgccagtacttccgtccatgcacaaggctctctccttgatgactgtggcttttagccagtgcagtcagtggatgatgtagggactgccgcctggactgaggctacagactgcatgtcagatttaaaatacctgagtagattgagctgggtacagtgtttctgccttcctcatcagacttttgacatcatgcatgtacatgtgctttgaagagcgcagttcacatggacaaaggtgtcttctcaactaaaaagtatccgtagagatgtgtgcaatcaaacccccagaaccagccacagacatggcctcaaagggtgctgtggaagacctattgagatatttgctccaggtaagaggaggagcccagggactcctactttatcttcctagatgatcggtaaattcccttgcagcttagccttcattgagcccatccacacatgccccctctatccttttttggtaaggatcacagcactgagcccatccacacaagccccctctatccttttttggttaggatcacaactcctgaaaactcatctgactttggttatttgtaagagacacatgtgaattcttcataagtgatttgtcttaaatttcaggatattaatgaactaatagcatttcttttcttccactcctatacttgggatgatactcggccctgacttgttagaaagcttggttgattgaagttcactttgactatcccttccctctctccttcccctcatgattccttagcgcttgtgagcatttcttgtcactgggtccccaaatgcacctatttccgcacttctccaggggaaagcctttcatctagattcaatgtcacttgatcgacttgagtaaaccttagtaattaattcataaagttacagcaagagcccattcatagctggtagaaagagtagcagattcaggtcacagactgttcccaatttaataatttccttaatagttgtataaataaaagctttattggaaaaggtcacgttagagtttggattctatttgtaaatagttggaactaaaatgaaaacagctcttgctatgcatagcaccttcactttggcaatggcactctcggggtgcattcaaattgagaagatgagtagtagacacagaaataaacatgtcgtgggtctgggatcgtgtcacttgtgtgccttatctctgctttccatgtctctggtttactaggatcattgatactacattttggaagataccccagattatataatggagttaaaataattttgtttcttttgttgtgttcttggtattatgaatggcaagattttgtctcttccttaagaactatgccaaggtatcctgggatgagaagcggggagaagaggacaggcttgtaggacaaagggagggaaagtttaccttataaaggcctttgaagtgttacatgatccatctgcctgtttgaggctgaggcttaatccctttttaaaatgcatcaaatgtttgagtgcaaggttcggccctaacagcatctccaattctctgcagagacatccacggtgcaatttcccagacactgtgttcacacgagaagggtttgatccaaagacccagccagactggaaccatgtggagctgaagtagataggtggttttcagcaaagtcctgtgaagtcccagcagccagacctcataaaatcagagtaggaagagacttttaattccaaactgaaactgaagtcatgtgatcaagcttcttgttaccctccttaccagagaagaacaggaaaagggcaggtgagcctgcttcctcaggacttctaaatcctgtttgtgatggaattttaaaggcaaactaggaaatcaacttttcatttaaacacagattttcataagaaaatcacagtaatagggtgtcatttccatgaccaagaacatttcttaaattattaagtgtagacaacattcattcatcttaaggtcgtagctctcccgcagcattaagttatactgagtaccaccacttgaccaaatcacatgacaaacatttactgcaccatttaagagacccaaagaaacataaaccttaaatgttgctgttttgctgttcgtagctgatcaagatatcagacttagcaaatatttgggtcctatcccaatgttgctctccccaagacgcttaggcacaaagaggtagtctacaatgccttgacagtatctccaggcctgcattgttctctttgactcctgcatcatgacagctgcaattaaatgctgcgtctaagaacaggcaaaggagtttgaattcactctttacaaagttagctctggagccaacggcagacctttgtgtagaacatcaacattagccagaagttttctcttaaaaagcattttctgtttttgctttatggcataatatcagaattttccagcatctaattagtaacagtttttaaactttttttaagttaaattcccactagccatagaaaaacatccacttatgattgactagacacttagtgaagaacaccaggtttggggaatagctcaagcatagacatctaaaaagccactttactgaagaaaataaatgcctaaatgtaggtacttcgattttcatgtgattggccttcttgcaatgtatggaggatgccatggtatgggttcatacaaatcagactttcaaatcattgctccctaatactctacatagattgtgcaatcgatgtatattgcaatatatatatatattgagtattattctctcccaagaccagaagaaaggcctggactctgcccaagtcttttgtttgtaaaagccattcactgtttgtgcactatgaaaccccatgttaaatttactctaactttgagtgacaaccctgcctaattcatggggccatttctagtctttaagcctggagccttcggatttaacatctgggtataatgaaagcaagtcctgcttttctgactggtttgctctcctgaacatcgaactccagtacaacatgtgtacagtgcctgccttcactaacccaccctgtagctcagcaaaccttagggggtacgacatggatggaaagccttgggaggtataaccaaagtctactccagcttagcagatgaacatctgaacacttgtcatcctcttttaatgaatctttctttgaagcattaccttcagtgaaccattcattcattcaacaacttactaggcacaaagaaaaatagacttgcatttcctcaaggcagtgacagtaaaaatataaataatataaataaagtgtgctcaagaatgagatagtaggagtaggtgaggcatgagtgggcatcttcaggaccaaaggctttgaagagcagacttctatgggcagggtgatagagttgagttcaatctcccaaacccacataaaagagccagctgtggtagagtacgcctgtaatcctgacagtgggtagatggacacaggtgctagctggtgcttgctaaccagcttttctaaccctcttggggagccaataggacactctttcacacaaaacaggatggaaagcacacaaggaacactgacctccaaaggtgacctctgacctccatgtagatgttcagtatgtgctatcacacacatgtgggcctatgtacatacctctgcatacatatacattccccatacatacaccatagggggaagctgacttgtttcacatttctctgttcttttgttcctttttttaaaacgagacagaatcttactgtgttgtccagtattccaccctcagttccccggggggctgtagctacagctatgcaccaccatgctccccatgtatgccaatgcatagacttttcaggaagaccaatgatgaacaaggttgaatcagagcaaagtatgatgtcatgcttaagagatgccatctcatccaagaccctgttcttgagccagtggtgctgggttttattctgagggccatgggggagatttagaaggaaagtagcctcattagacatgggtcacactctagagagaaagattaaagggtaagagatgatgtacagaatgttagcccatcaaattcagaaaatataaaaccaaaggtggtggcactggaaatggagacaaaataaaaccaagaactatttgggagtcatgacccatggagtataagtaagattcttgggagacttgcctcctcagcagcctagagcagaacaccctacagaaaagcctttcctatatttttactgcagctaatattcctcttatcttgattctccaagatcaacattttctagctacttaaaacttctcattacctcatggtttcaaggccaacgtcccaactctgggttctgctgtcatatgttcatgtcatatggtcattagcacacatatgccagtaaccttctcttactgaagataccaagaaacgctgagcatatcaaagagatcccactgtccgtaggtgttccccattaatcattaaatagggttgggcagcgatttctgtagacaggtggagtagtccttggccttttctcttttcagagagcatagctgaaagctgtgacttatgccatcagtaatggggctcatcaaggtgaaagaaattttcaagaggaccatgatgtgagcacccagaacagggttatagcctgcagtaaccctatcatccagctacaccaggccttccatccctcttcaaagttcagtcagcactgaggacgtaagcaagtgcctgtatttcacccgcagccccaggggcaagagacggagagactcacttgtctctatggggagagtaggtagaacggtaggtatgctgaagacagaaaaggccgcccagcttaggaagacagagtggcgggtttcccgagctccagtgcatcttcaactccgacttcatcaatgtgagcacactgcaaagggacacagcagaagctggccctgtaaataatagatctcctgctatagtttaagcaaaaagctattatattgaccaaggaaaagtaatgtcaaataattgtatctcttacgagtttctgatgctaaacattaaaatactgtgtctcttcaacctcgctgagacctaatttataacaaagtaaaaagattttttttttttttactcaaatgctctgaaaactgttcgatcctggttcatactgaaacccatcactcacaaaagcaggttgtcttacagtctcacagcgggtaggtatatctcctgaagttagtacaggcacgtagcctgacaggaaacaaacctgaatatttttgaagtgtgttttaattaaccccataaagactcacccatcagccctctctgtttccagagtatgtcttcttaactgaaaaggaaaaaaaggaagaaaagcatagaaggggataaggaaggagaagagagaagaaattcttggtttttttttttcaaacccaaatagcatatagagttaagtcagcacacagaacacagatgacagatgtgactagattgtgacccagtactttgaaggagatatttgtatttaatcaggataactcagaagggcataaataagtcctgtgcaaataattatgcagagtccatttctgcctcacattcgtatatgcccgcctaattgaatcgagtgtttaatcccaggattcattatctctttccctatctaagtccttttctcatttatatttagcacccagctgtcccctcttccaaatggtcacctgtagtcctgtaaaagtcttgaggttggccttagaaccccagctttcaagcagcaggttctctcagcagggggcagctggatcttgctgtgtccctgaggctgggttagaatccttaaggagagcaaactgacttggagagggtgaaaatcagaccttcaagcagatatcccaggtagagctggccaaggtgctcttggtcagcacagggtgttgctgccttttgtagtcctcagaataaagcaatgaaaagatcagttaactcgcttgctggaagttattgatagagaaattctttctgcacgaaagattataaacagtgttatctgaagatggatttgttttaatttggcattgatgtatttgatacctggtaggatcaaagaaaacagaatcaaagggagaaatatagagcagtctgcttctccgaatatagccctcctttatagataggaaatctcgggactggagtgctcaaatttatttgtactgatgtttgtttaaagatcaatattaaataaattggtctggaagctatagtcataaagcagctgtcgaactaatgtaatcccacaatgccattttgtctactgcatgaaacctggttaactgtgagctcctcctcacatgtgcaaagcgtatggaagaggaaagagcagaactggatttttctgaacttggaccaatttgcaaacaaatgtaaaaggcatttttaaaaatttaaatttaaaaacaaaattatgcttggtccctttcagggtggcagttgactatttttgtgcacctcaaacttcctttaaaaaccatataaaaatgccacttccctctctgttatgtatcagtatgcaaggtgaaccctaagagccttgttttgggatattctgcctacactggatgttagttattattgtattcaattatgttgatgctgtttgttcgttgatttgcttttgaacagtgtctttggctccgtgtaccctggtatgaatcagtgtgcttagacactgtcagtttcaaggtgtttccaccactctgtatccatcagagattctgaagcagaaacccaaaacccattgcatgaagactatctcctctgcatgatggctgtggacccttaccccactgtctttgacatagtccttgagtgtctggtcttatttttgttctagttactgacacataagaaaggaggagtcctgctgtcagcccatagatttgattgtgagtatggcccatgatataatcatagagggatcattgccataaagaaacaaagaaaaccatacatgcagagcattctagatgctaagtacatttgctctcattgacccatcagagaagatgaagagttgcacacagactaatctgtccaccttacttttggtcgtgagataaataaatatctgttcagcagcagggcatggcttccttagaactgttctggccaaagaacaaaacttctgaaagtgtgtatttcctaattaaaggcatgtttttgaaagtcaaggttctgcaattgcaagtggtataaactggggcaagtaacccaactttttaaaggctcagcttcctaatctcaaaggaggtgaaaaaaaaacccagtatataacaaacaagttgtgttaaagagtggataaaataatctcctgaaaagcatttagaactgaagaggtggctcagtggttagggtgcatactgctcttgcaggggatctgaatttggtttctagcaaccaagccagagagctcacaaattcctacaactgcaggctcctggggagtgtgtggcactgtctttaaaggccacctgtattcgtcctgtgtaaatatgctcatatagatacacacacatacgtaatttaactttataatacactatgtggtacacagataaaaattataacttctgtaattgtgtgtgtgtgtgtgtgtgtgtgtgtgtgtgtgtatgtgtgtgtgtgtgtgtgtgtatgtgtttatatcccacttttcaactaggaactacagacttttctaaaagcagattaaacattagaagtaactaaatagatcatattattttactaagttatgcaagtcaaatatgtctcatgatattgttctggtttctgaaggtatgagaataagcttaaatggtcaaaaatataagtatttccccgtattgactcagacttaaggtgcttaagtctttcatcctggatcatgaggaggtggtgggcctcacataagtggaagccaaaagctttggtgttcaggtgttagtaacacaggtctcccttcatggaggccccaaccatcccaaacgttacaaggtcaatgaagagggggagaagtggagaagtgagaggaaaacctgtgtctcctgaaggctgactggctttgtgtggcaatgataatgcatagcggacaatagccaaagaaactctgcttgacactgaagtgccacccttgttacaaaagtcagggttagcttcaagcaccgtgtggaaaactccatccacaagagggctaccaaggggcttttcagcatgaaagggcacactttcatagttctgcagacagcaagctcttgcctgctggtgaacttacatgtgtgggtcactgtcccacgcctgggggataactgagtggtgtgtgacataaacatagacaacttggccctgctgtgagctgttcttagagtcgaggcctgcagctttagtctgtgtctgtgaaggactgaaaaaggatgctttcggtccatgctttcttgttaatcaaaacctaactttacgttttgaagatgttttctttcaaatagtcttgagaaatatcttctgtcaaagacaaatgctgctcgcctagttggcgatgatccctttttccctggaagctcttagcatgggtaggtcggtggtacagttccgtgcctaacttggctttctccagtcactctgggatgtttgcagcatccaaaaaagattttagttacaatcttgatttaacatctttaaaaaacccatgtacgtgtatccagtttatatatttcaacttctcttaataaagatgtaaaacttaaactaaaattgtagctgattgtgctgacttattgctctaagatagattcatcaaatctcccagctgtataagacagggcttactaatgaagttccctatcaaaaagaaaagcctaattttgatttggcttaggtaatgaacttctttttcctggtgtgataatctgcatggggtggctaaaagagtagctagagagagtgcgttcacagaagcattatgcaaaatgtcttttgtctctttttgctgggatatattaaattttcaatgtagtctatgtaatataaaattatgataatgacttttggcccactgtgaaggcagcttgctggtcctgagcgtgtgtgtctggcttgagcactaggttacactgtgggagttgccttttctattagcaaacctctagatacctaatgatgaattttctttcaccaaatgttctccttttgtctaaaatacaagcattttctaaattgcttttgagaaaaacaagagaggcatagaggtctatggctctaacaagggatagtgaaacaaagccagggactcagttagaatcgttctggtgattagaaaccaaccaaaaggttgcagcaagtactcgtgaaaatatttaccatcttattgactcatcagcatcgcttaggaagaggacaaattgaacagttgtctctcataaaatatgcctattcctttcaatcatgggaaattgaggctttaattcatcagacagttatagaaactttaagagtctatgagcattgtttgttgaagaaatgtctttcactttcccattttctgttctaaaattttgggtaattaaagtgtataaaatagtggacatgtcagtgatcctcttacttggtatatttcttacatggtatctagggaacgctttgtgaggaaatgggcaaacaatatctatttcctgtcacatgtaatttctaaatgatgattcttacacatcgtgatgaaggtgaccccgttgaggcatctctaaagcctggaaaattgttctagacactatcctagtttggaagatgttttaatatttatttctcagaaccagtttgcaagatacacaagaaaatctgtcttaacacgctttctttcttttcttcccaaaggccttcacctgctggaatatcaggacattgacggtttggtagttatgtcctcatgtgttattatcaacttggcacgatagtaaagtctggttaggattcacagttttgctgtgatacccaaatcatagatatgaggcatgctagaaagcctgcggtggagaaagttatttgttacacatgttggaaatcccaaaaaagactgttggtgtagaaactaccatgcagagaacacactgctaccagatgtagatttcctagtttctgaagaactaaatgtctgttaaggaatttggtcactatcctgtgtcaggaaaagtcaatgcatagtttattaataacttgtcaattgataacaatgctcccaatgtttgtagagcaatgattaactttggaaatttgaattggcattacgtattagaaaagtttattaaaatcaccctttaaaaatcaactaaaggactttcagaatagaaatctcatgagttatgatctcttgactttcttttctgaattaatagaaagtattgcaaagcaattttaataaagacttggagcccttttcttaaatattgaaaactaaattagagctatagacaaatgttctgtgggtaaagcacccactgagcaagcatgaatacccaagttgggcttcacttaagaatcaggggtgtgaactggagagatggctgacaaccaaaaatgtaagaattacgggtgtacctcacacctgcagcctttgtcttgggggttcaaacacaggcaggaccctgtagccaattggtacctctaggtttcgtgggagacactaaatgtcaacaagtaatgtggagagagagataagaaagatagttgatataaacctctggtgtccacatacacccccgcacacaaacatgcacaatcatgtattcattcaacacacacacttgcacacacatgcaaaataaaaattagaaaatctctcccagtacctaggctaaaggagatgacaattttatacactgttggttctgccaatgccttgtggcatcttgtccactgctgagctcgggtaccccatatgcccataaaagaaactgttcttgtttttagaaagggtgttctccgggtaaatggtcaggaaatcaggattaagaaaaaagttccatgttggcaagctatgccattggaagccacaaataatgaggccagctcccatgacctgattcccttgaatgtaggtaacactcatggcaactgtgtgaacttctctcttagctggtttaaacctgtgggcagtggtatgtttgcagagcccgggcacagtgctgcatacactttggaacaggcagggatgagtaaatggatggacagttagattggtaaagtcctgacagtgttgggcagacctgcttatttggtgggatgctgtgatgttatgatggttctgcccctggagccaaaaaacaggggtcctttgggcccaagcttattcttccatacgcctccctttggtgtgatgggagagaggactagggaagcagcttttcaaactctttaggctttagatggcacaagatgatgtttgtgtagaagagcgatagttctcagcactacaagtgtatggttttgcctttaatttggtgtctgtgttttatcagctaaaccagacgagctcaaatgaacgagcccaccccacagcacacagcacacagaatgttagaaagttgtgctgttcatccacagccaaatgatgattctattacagaaaaggccatggcgttgtaactggaaaactggggctgattttatttgtactcattagtgttgatggctgaaaagtctgagcatggaggaatccctcacacgctaatcaggaggaaagaaggaccttcaattaaaggcatgctaacctgaagaccatataaacagcattcggaaagctaatgggcaatccccaggtcagatgcccagcaaaggtcactcctcggtaaagagagtaaatcttgaagcagagtcacgtatagggttcagtctctgcctgggaacaataagtcatttgctctataacaagttgccaacacaaaggcttttctctggccatggaacaaataagagaaccctagaacagaattcccctcttctgtgccctaaggaaaatggctcccaaggggacaacgtatctaccaaggagtatttcatttgaggtcttggaaagctcacggatggtgtcaggttaaaacgcactgaattttctagtatcgttttgcaacaacataatatcttttactccgttcagacacaaacatggaactcttcttaaatctttccatgaagggcatttataactctaactcgactaatcaagaaacaaattcctctatttcaatcaaaacacacatctagacgcactcaggctgtaatttcagtatcgtgttctggtcacctactgttggtgcctctttaatcccacgagggccttctcgctgctcagctttcagctttctaattctttggagccatctcttgagaggtcagggaaggccaggctccccttcatgggtccttctgaaagtggcatgaagaggctggaggcatctgtgttgatttagttcaccacactgggtaaacacctcaatttctgctttttgtcattttgctgaactctgaaataacagcagtcattttaaagcagagtatttgagacaggcctttgatttttacctgtgtcatatcccattcccccaccccgtgcatgctgtgtgtgcacgtgtgtgtgtgtgtgtgtgtgtgtgtgtgtgtgtgtgtgtgtgcgcgcgcgcgccccttgtgcgtgcacccgtgcgaatatacatataaggctatcagaagttagcctatgaattttggcaccacagaaactttgttctcctgtgctcagtatcattaggactgtaactggaccagtaagagtgcttcctcccacccacccccccttcttgggcaccctatcttaagaaagcccttgtcattctcatccaaatggcactggccaccttttctgtctctccatgtgttgaaaatgtaaccattattatccagccccgttttatgcatcttccagatgatttaactgaactgaagctatggaggatatgctgactggcacttttcccaagcttaatgtgttaacaaaagccaatggtgtcagttttaacagttttagctaaattcccacgacactcttaacaaacgcagaaacctctgccatgtcttaccctgacagatttcctgccgtcattgcacacttaaaataaatgtcatccccaatcaaaaagttcacattttctctgacaatataatttgttactttgttcctgctttatctttctttggcacaggaatcttcagccaagacatgccacttttccacagtgttggctgttgtcctttgtgtccttccaagtatgagaatgaggccagaaagcaaagctagtttttaaatcccatgcattaacagttagatatgtgaaatgttggcttggagaggacaccatactcttattgcaaatccaaatgtcttagcctcggttggctgggacaacgtatatgacaaagtatcataagcccagtggcttatgagtagaagaagtctgttcttcattacttctttactagagataaagtccaagctccttgcggattttgtcaggtgaggaactacttccgggtcacagacagctgttctcactatatgccctcagctgctatggctgagctctctgggatctctttacaggctctaatctcatctgcaagggctccagggtcttgacctaatcaaccctcctaaagtttgatttttagttagcatcctcctatggaggttagaatctccacatagaaattttagtgagcacattctatccgttgtgcctacatattttgttgacttatagaacatggaggtcttacagatcacaaagaggatcatggttggttctaaggaatgaatatgccctcggccttggtcttggcctacaccattggtactatgtgtaataatggacagagcatgtaaagtttctgtcttttcttgcctagggaccaggaataggacatgtagagcaaagcacttgtcagagcaatattccagcatccctggcatgctttacaacgctttaggatgggctttatgctgtatttacatggcagtgttcttctgccttttgctcatgactctgctacacatttgcttgcttgttagcattttcctgtatttggaggcttggtaaagacacatgaaatgctaacccaacaactgagtcgtgtgactcccagtaagaagagagatggtctcctgtctgtacaaaatgataggcaaatggcccaagccaaccatcatgcacagtgaccttgcttaactgacctgaagaactcatcttaatacctttcagactattgcatagccaggcagggtagactagtggatggatcctggaggacagaatgtagagaccacactcttaccatcaaattggagctgcagaaaggaggtcacgcccattctcactacttccatttccttcactgctacgtcaaagtgctgcatgaaatggcccttaaggttctttcaggataaaataggtatggtttttaaagtatgaaagatctgtcataggcaactgttaattttttgatcaagccttttttgttcattagcttaaagacagtccacagacttctgagctgacactttctctgatctgtcannnnnnnnnnnnnnnnnnnnacacctcctgtctctctttctcagagaagaagagagaggtggcttgcacagcagctggctcatttccctggtttcacactactgtttaatgatccgtttcttgtgtgccacctctctcatctactgaagatagatacaaattgtacctataaaaattagagtatgactcaggttagctttcttcctccctttcaaatactgtatgttaaataacttcccatcatcatttttatcacaaattctttaatgataggtgagatgctacacaaacagatgcctttaacctgttctattgtcttcaagcgcatgatatgaattcacaggaggcagcagcctgcagaacagaccagtgcatgcaccctgtgggaaggactggcttcccaggaagccctggtactagttcatttctgcctttgcccaggtgtgggtgagggcatctctgtccagtccttaagaagagaagcctgggacatgggtggtttgtgagcagagccattaagcagggtctcagagagagcagtagtgaccatccatccccattgtagaaaaagactgtgttagtcagatagcactgcatgaagcccagcctcttacgctctgcttgaggatgtcagatgggccacgtgactgagtgtggaggtcacaaaaaaatccacaccagtaaaagcttctgaatgttcagtgaaaattaatttaaaaccaaatgtgtaatgattgtcacagcatgaaacaccaacaaatggtgcctaaactactatggctgagaatatagactagcacatgtcctgtgctctttaaggtttctatcatacatacaaagggattgactctttcagaatcatataatggttgaactgtggaaaacaaaaggcttgaaatattttccaattgtcattcctcattagtatatctttgcattctattatgttagaatgtttgattttaaaattattgtttgacttgctgacttgagtttcattaaaaaaaggacagaatttttaacaatttctgagatgtccctaaacatacctctgccagtttatactatgtgtttaagcaaagtagtgttctccatattgattaatataaaatcaaaatatcaatcaattctgaaagatgatgaagattccccatgccttgcaatataataaatccaaccaaaatttaattcttcatgtaaatatatcatacattcacctcattaaaatgcatgtttttttcatctttactatatggtgaaattatatgtataccaaagaacttttttagagctaaccttctttatgattcgttatcagtttaaagaaattgtatgcctattttgtattcctaatatgcctgggcttgggtaacattttcttgagtaaaaaaaaaggttgtgagtgggaaatgtttagggaaccccatcctgaagactaatagacttaggagcgggggcccttccaagcataccccagctttccactcactgacaagcaggcatcagctcctcttggcctctgctggtctttctgcttttaaatgaaggtcagtggcttcctgtctatagaagttgtttgcctatgaatttgaaggttactgttggagttcctggagtatgtatgcatgctagtgagtcctgtctgtctgtctccatgtgtgtaaaagggcagggaatctggacaaaaaaaagcaagcaagcaaacaaacaaacaaacaaacggaccatgtagcactttctgtgagcaggacaaagcattcccttccactgggacttccctctgtgagaccaggctttatacctgtgactgttcagtagaaggactaaatgtcacagtacaaatgagctggccattaccagcgagacacatcctggtaatacagtttagaactgtcagctggccattctgaagcaagcagaacaaagctagcaaggtcagcttccttctcagtgttccctccgacagacgggagaacctttgcttgagcagggggagactggaaggagccttgtccaccacttccacttcctacactggaatgggtttgtttcatccgagtcttggacttagtttctctttgttttatcagagtaaaactgcatttatctcagacaccatggctctctgctttgcagtgctttggcaagcagcaggctttgcagtaagttgttcctgggaaaagttataatagatgtgggctgtttcggtaaggcatagacatcaattaaaatttgaaaacatcaaaaaatgctatatttgtttctataaatgtaattatgtacaaactggacaggggcttgcataacctgggagcaagtaggaggcaaagacaggtcctcggggagatcagaggccacagcgataacagtagccagacttctctgctccaagatcacttcaacctttccccagcccagcaaccgtgtctgcatacttatagtaaacacatgtgccatttctggttaatagaattggtgttgggactttctctttgagagtcaacatttcagatggtgcctgagtacaggtatttcttcaatgtaatctaattgatagcatctcagttagaaatgctattggatatatatatagttttcttcattgctgaatccccaaacaagatctgaggttggtttccaagggtccagttatcagtccagtgacagggcgtgaagcagagtgatgaagggtactgcctctgcccttgtctgtggccttggacacattctctgaagtactctttcccttctatgagaatagcaacagtgatggtagtaagtcctcaggcctcataaggaggttgaagaattaaaagcaacaacccacagtagtgtgcctaacacaacaaatgtacagctgtgcttagatatgatggttgttgtgtccttcctgatacttaggataaatggcgaggtagtttagttttgattatatgtgtgcatatatctgtgtgtgtctggggggcggggggggggggtttgcaggtgccagtggaggaatcaggattcttacagctgtagccacacacagttgtgacacccagtgtagattctgggaactgaacccaggttctctgcaagagaagtacactctcctgctgagtcacctctccagcccccagtatttagcctttgagtcagacatggtgctaacacatgcctgtaaccccagtcttcaggcctctgaggctaaagataccagcctgatccaccatgggtggtttctctccttaaagagaaaccactcagcctctctgaggatttgtttttcttgcagacacttaaagggctggactaggggactctatctctgtagcttattaaattattgatgtaaaatattgactatattatacaagcattttaaacaaattgacataaacataattttaacaaatcactctgccctttctgcatttattgcatggcaatgacaacaactttcttttatttccagaagaagaaaatattagaagttctgtaacatttttgtggggtatttttttaaacaaaaaatttgggtaaacttttacccaattttctaatttttggcagaagagcaatgatatattttatcttatacaatcttaaaagcacattttaaccttcatatttttaaccagatctcacatctctttatataattttgactaggctgacatatatattaaaaaacaaccaaggaaaaggttattgtttgggtatataaatctaaaatcatacaccaactggtcttccagcgattaaagctgccttcccctttaataactctcctaagaaacaggaaatgtaatttccctacacctttcctggggctctccaatcagctaggtcctctgggggctcccactgtatattccttcatcaacatggagtcccccaaggggcccacacacactctgttaaaattagctgtgttccacattagtgacaggggctgagtattcctgtgaggggtacacagttgtatggtgctgcttcctgtttgagcaaaatcatatctttaattgcagagaatttttttcattacctgttaattgataaatcatgcttgctcctgctgctgggctcacacaccacgaacctgatcatgagacagcctccggcccaacccccccatcgtcctttcatacccccaaacaaaaagggcatgaagccgcatggccagagaaagaagacaggcaggttgcagccctaagcattaggtttggagagttgcataaaaataaaataaagcgtgtgtgtgtgtctgtgtctctgtgtgtatttgtatctgtgagtgcatgtgtgtctatgtctctgtgtgtatttgtgcatatgtgtgtgtctgtgtgtgagcatgtgtatatgtatgtgtgtacatgtgtgtgtatgcatgcatgtgtgtctatgtgtgtgtgcatgggtatgtgagtgtgtctctgtgtatgtacacatatacatgtacctggcatttaaaagagttccctttctgtttccctccttttgtcattcttgtcctttgattcatacttgtaatctgggtagcaagaagccaccgtcttgggaagaacagtaaaagtcctgcgtacagtgaaataatttagctgataattccccactgtataattttctctgcttcctgctagctgaccttgtgggctcctgtcaggttgctaagggagatccagcagggcttcggctctgttcctttatttttaaaaggtattatagggtagagtggtgtgttggtggcagctgagggatgggactagatgctgagtgcttgatcagatgtgtgaagcaatcctccccaccccttgcctgtctcttcttttcctccccacccccaaccctcactttccatgagaactacaagatagagaaattgctgcaaactgttgagctagaattctgaacttgatggatgtaatcaaaatgtggctagatcccaagaggtgtggcctaaggagtaggccggccaagcagatgacagctaatggaacccggagccttttatcttagagatgtcaatcttggtccagatcagggttgagtgaagaccttgcaatgtctgcaataaaagcattgccagagtaggattgctagagtccctctcccctgtccccagcctttctgagttggactgcatgcaatttgagcaggcagcagaaggcagagtaagcagctggggaaactgtctgtatcatgatgttcccagactaggcaaaagttaccctgctcattatgaatgggaagtaatacaccattgatttgtgtccaagtaattcccaggtaattataggccatcgatctacccaaacgggagctgcagcagttgtattctgcaggccttatgttgcctcacacctggtgactgtactaccattgcacttgggttctagaacagtctcttcctcaatcctcctgtggctgggaagatgcttagaaactatcagatggttctagaaggttgaaggaggccaggtgattccgtgtctgctggcctcagtcccttaaagagtcctctgatgctacaggggaggtaaggttgctttgtgtttgtgggggctatttctatgcccccagcagtgggacagggattgcatcagctggctggttttgtgtctcagctgtcaccagaagagtgtagtaatattcttgattaaatgtcattactctgtggcatagaaatgggaacagtgacatgattttggatctgttccttttcaaatccagcagtagaagcaaggcacgtctactatggattaagcacagctatttttgcgccatcttcaatcgcaggcttggaatttgtatcaatatgtcttcacttcatatcatcaattccctgaggcctttaactgaaatgcaagaaaaggccataagtaaaagaacgttgaacactattgttcaatcagcagctgttgccacatcaaaaaaatgcggttaatgtcccagattaaaataaattggtgataataaaagttgatttggtaacagtaggtacagacgatggtatgagaaaacaaagtttgtttccagtgcactctgactcatctctttctctgattatctgatatttaaagttgaccagcagggaaacatgtagacacaacacttttccctgcctaggaagagttattccttgatggtttataatcatatcttagtgctttatatatttataacaagctgataaatataatgtgagaggaagggggctaggcaccaagaaattgaaaagtcagttctagggaaacagagagaaattgttaatgttcctcaccagaattcaatttgtccaattgcaaaaatctcagtctccaggaaacaaactgcaaagcaagctcagttgtcatgtgatcagttgtctagcctaccgcctttgactgcctgcaagcttataggcagcagagagtggacagaggcagctaagtgagggcttcactcatggtcaaaattacatacagtacttacatgaacgccatgttaatacattcatctagagtagaatagtaaattggagtgtatttgatatcatcggtagatgctattatttgttaaactctggccaagagactttagagtggaacctctgaagccactggctcaattacagatccaacatcagtggcctggtattcagaaaacgtgatatcactaagcaactcttaagaatcatccaaagggcccacacctttcactcagggagttccttggatgctgtgcacaggcgctgctgccgagcaagccaggctcccacactggggcagacagtagaatttattctctcagttggcatctgcatgttaccagatcggggcttttgtctcttcctcttactagataagttgaaacattgacaggcagcgtgttccttttctcccccttttattacagtaatttataagatattttagctaacaggagaacggcccaagggggcattctcatgttaattaccaaatgtgggcttgtcaaaatcaaatagctccaggaacgatgcaagtagctctgcatcactggcttgtttggccctcaacccagtattagctacttttaaaaacccgggttcattaggcttttactgtagaagaagaatcactacctggggctttcagtggaagctggggctctgtcagcagcttaagggtttaatgtaaatgacattaaaaaaaatagtttcgtataacatacttggggaaacgaaaaacaaaacaagaaaaatccatgcttcgagagtcaagcactccttcctggtccctgcaatgtgacactgaggataattttcagtacatcatactttgaggagggggcaggtcctgttttatttagaaacatctcatcatttagtattattgggctggtgagttcaaggcaattgaaaaagttacgatttctaaaactctaatcctgacataaggttctacacacacagagatatgtgacatttcttctaacaggccctaaagcctaacccaagattgccctgttgggatgaggctcacctgagctgatccgccttgttcctgagtcttcccatgattcctttcatgatctcctttttctatctgtagcttctctctcccggagcacaaccttgtgcaggagtagatatttaaaaaaactaaacacctttctcaccagctccaaccctgctcttgactgcctaagagagtcagtgttggtgacaatgtcatggaaggacgtaagcaaacagctggtgatgtcagcaggaaattagaagtaagatttgctacactaaactacaatgtgggcgatccccctgtgcataatcaagagctcactctatatacaagtgagaattaatccaagaggggtgagcggttaaggctcagggtgttcccatggaatagttcctatctatggtatagaggaaccaaatttgaatgtgcaactggaagttaccaaactagcattttcttaacactttctggatactgggatctgtatatacactaaggatacagaaatacgtagagcacaggagtctcctaaaatagcaaagttcactagaagtgtcaggcaggcaaatgagcagtgtagtgttggtctcctgcagatgatggtcagtcttagctgtcagcttggtgagacttagaatcacaatggaacataggtgtgtctgtgagggtgtttccagaaagatttccagaaagggaagacccactctgggtgtggccagctgtgtcctgcatgggctggggttatagtgttcatctcctgactgcagaggtgggctagggttatagtgttcatctcctgactgcagagacagtgtgtccagctgtttcaatcttaaggcttcctgttcatctgagacgaacattctgaagaggaaatgtctagccaaacatgtagagaaaaggccattgtcatgtgtacaggactccctggaaatttggacatgtggtaggctaagttgacactatataaacagagaaatacatgtttttctggaccattccgggacacaccaaggactctgttgtatcttgctttatatgggttctcttaaggaaactagaaaagcatgttagagtgaggtctccgtctggcatccagatactcgctcactctagcatcctgtgcactggtgggtgctcctgggtaccagaatagcatcaggcagaaaacaccttccctgtccttcatgacctctttgaggtgcttggcagacttctgacagttctctttattcttctgcacaggtctgcctccacccatttaccttttaattttttaatgaaaatatttattttggtgttgtatttttaaaaatcactattaagatccaaacatctagattttccctttgttttcttttgaatgtttcatttcttgcattttacagtttagcccatgaagaagagtggggctgtctgggcccctgactctaaccaggctattctctcataggtacctgccatctttatcccctgtagcttgtagtttcaggcagtgccagttttctgacttgatttttaagagtctctcaatttttctccatctttatccttctcatggtgtagcctttagaatccctctgtctaccctacataccattcgggatttttattgggtttctcttaagtctatagattcatttgagaagatgacatcctaacaatattgaacatcttcatgaacatgaaatgtcttattatttaattattttaattacattatgtacttatttccatttgcttagtttatctttattatgagggtgtatacacctcacctgagtaagtcagaggacaagtttcaggactctgttctgtccttctgccatgtggcttctgagaattaaactcgggtcctcaggtttagaaacaagcacctttctctgctcagccatctctcctatccccattggttaattcctaaaacatttctctcagcagagagatacaaactatagtgttaagtctcataaaagacttatgtatatcttgttagattggtctctatgattttacccatttttatataaaagtaattttaatgtactgtagaaaacacatgcaggtagtttttctagtcatcactccctaaataacacatcataacaaaccaattattttaatgattggaaaaaactaaaatattaaaataatataattgtataatatacctaactgttcaataattatactgctaaatactataattagtgttaatcaaagattacatgcagtaatgtacaattttatataggaaaatgactgtagagcttggtaaccccttagatactgagcttgatgctgtggtcctgtatgctgtgacctggtcagcatcactggtgtggtcatgtctcctgtgttgtggctagcatcacttgttagttgcaggagtcttgttgagtcttcaggattttggtaaaatacataatcatggggtgatctgtaagaggcacagtgtggtcctctcttctgtatcactgtctttcctgggatgtttggtgtactgctggttaaaaatgttagaggggacctcagttttttcctagaacttaagggggagtgtgggttactatcatctgtgtgttcataactgtaggacttctgtgcatagtcttgatgaagttgaagcaaaccgtctcggtttctagctggatgagaggcttctatctttctgattttatttcctcccagaggatttcgtattacacacagtctccttgtgttttaatcatattctcaccgttgaacttcacacagggctgctgtacctgctgcacttctagcgtttgtcctctttgttttggtgacacggtcagtgactcattttcagatgttaatcttactgcctgaaaaattctagatagccaacaaatcctagactgctagagtcaatttactattttttttttccttcagaagcctgtgtgtttatgagataccaggtctggtcattttcctcttctacagtagccttgtctggcttgggaagtagggaactgttgatatttagaatggattggaaaattgccttctcttgggtttacagaaactctgtgaagttgtacattgttctctaattgtttggtacagttctccacttaaagggcatgccacagaccaaataattcatgtctgttttgaattcagagaattttttattttaatttattttttagtatatgtgctcttctagtcttacaaatattacaataaaatgatgcatgtatgcttcttcgaaaaataaaacttcactgtactaaatggcttgtcacatttaaaatgtggcacatacacttcttcttaatacaataaatatttcccaaaaatcagatttctgaaaatcagttctgacttgtgggtcctaccaaatcatctcctattcacaaatatgttttccaaaacatttcgtgttcatgggtagactgcttaaattcttacctttatcggtttccctcttttgaatattaattttattgattgattttgtccttgggcagttttatacatgtagatgatgttctctgggtaatactcaacacgtggattagaatgtcacagtttaaacaagttgctacatgtaaagagtctagagctatggctggcatacactaagtgcataggaaaggccagctactgttattaatttcttcactgtgctgaagcttctccagatgccctcatcgctcttgaagctccttctgcctccatcattgaaggagggaaatgagcccctgatgccccttgtgttgtttcctgtttattcctacaaaaaaaattcttcatgtttcagactcaatgtgcacttccccaatacaacacacacacacacacacacacacacacacacacacacacacaaattgctcacccaaacccttgctcaaggctggcatgaccagtctttttgtttgaagtatagctttataatacttgtccgtctgaatcttattacagtattctctttcaataatccagtcccgtggcggttccagatctggaacacatcttatgagtcacttgcctcagatgaataaacagagtcctagagaggtcataggcgtctccaagttcttgccgctggaggctatcagaatgagaagccctttcttagtgtgccaaaaatcacaagtgcactgattgccataacttaattctttggggtgtttttttttcaatttttaattttatgttatgttccaaatgctcattaatcactgtacatattaggactaaatttttctcctaatttctgtgatttatcttgctgttattattccccaagaagaaaatgctggaatagttgtgagtggctcctagtctgccctttaacaagcccagggaggtaaacattacaagtcctgacttcttccacacaacagagcagcttcttttgtgaaatagtggcttgtaaacagtgcacaggtatggaagtaaataactgtgtaagtaattgaaactacaggggaattgaaaaaatcagaatgcggttattaataatccctctatttatatgaaatgagctcttcatttgaggaactacaacactgagtggatattgcttcgtttaaatttataacagctttgctgagtgcaagcgatagcatcagcctgacttcatttctgagtttgcagcctacaaagttaggagccgtgtaaaggtgtgctctctggtcagtctacttggaaagcccgcttctgacattagaagaaattgatgctgtgctatccagtgtggtttgaagcacaggtagtcatttatagttcccaagctacgttctcctgtaagatacactgagaaagtctatcctagtgcttaactctcatcttaggatcttagttagattcttaactttgacatttatttacaggcaaaaaaaatggattcataatggtcactgaagaggaatataaagcagaaataacctgttacaaagcttactagaactaggaatagggtaggaaataaaccgtatcatctcctaattcacatgcccatttaaatcctaggtactgtaggtaataggaaatatagtctatagaaataatggcaaaatcacaactaagccatgcatttttaagtagttttaaaacttaaattttaggagattttctgtaaagaagatgtatgaggccaacacgcacacatatcgcacacatgcacacacatgcacatgtgtggcttgattaggaagactgtctggttactatctcattctaggagaacgaggtgcaaacttcctatctttatatcctgaagtattggaccaaaactctttcactatcagttgactctgatgttgctacccaaataattttgcaaattataatatgtaaaatgccaaactcttgacctgagtgataccctcactcatttcattcagcaaataaattagaagaacagaaaatactgcttaacaatgggctattgtgggttgtactcccatggggctggttaagattcaattttctttgtaaatataaacagaagaaaacacattctgtctcagaggtaaaaactgttaattatgggaccaaataatgtttggacctgaattcatacagaagacaaacacactggaatcttcatcctcttatgattcaataaaggtagatgtataaaaaacacaaattgaagtcatttttgcacatgctgctcatatgtagtatccaaaaatagtttcaaatgttttaacataatactatagtaaaaaattccataagcgatataagattaactgaagtagaaatacttgttacaatgactacatttggattcataaacccagagtgtttgtgtgtcttctttaaacatgtcattcaacttggccacaccgacaggtcacatgcactaaactgaaccaaatgggtcataaacaaaaccagagctcgtgactcttgtacatgggcaaggtgggaaggaaaagggttgttgctaggagctggggggtggggttgggatgaaaggggttgttgataggaactggggggtggggtggagaggaaaggggttgttgctaggagctggagttgggggtggggcagaggaagcagaaagggaagggaaagggaaccagaatcaaagatacacatgaaggaaactgtcaaagaactaacctaatattaaaaatggaataaaaaggctaaagggaagcctcacaagctatattaataccactctccttgatatgaatatttaatttgttagagaaaaccgtgtctgcttctttgatgtaacttaggtgggtagaattttgactgggggtagcaagaaccatcagtatagttacataacttcattccaataattgaaataaaatcagagatggttacaaaaataagaatagcctgtaaaacaaacgccgaggagaaaatgcaggtgaaagttcaaaacgttcagtacatggaaagcagcaaaaattcgattgctctgaaactcatttatgcctacacagtaggttcataaccatccatcctaactcttcacctcttggcatttctctactctgctcaccaaaaacagtctttgtgggctgcagaggtggtttggcatttaagagtgcacattgctgttacagaggacccaggttcagttcccagcactctcatggattggctcacagtggcctgtaactccagctccaggggatccaatggcttcttttttgcttaggcatctgctcccctagacatatcgatatacagacactcatgtgtacacataactttttaaaaccccactcatgtctttacctataaatgatgtttctgagtagctttactgtgggaaaaagtgagcctggtcctagcaagtaaaaaataagatgtaaaagttacgcctgttaatttggtcttgcctcattcccatccaatggtgtttcacagatctttctacctgtggtgggtacagaacaggaatgtagaggtagactcacttaatagacacgagaagtctaggagtctagacctgcttgctctccccacgcctgcagctggaaatagcagaatggaaagttcaggaaacagagactggctcctgcccacttttgctcttcattagacacctgagagtcatagtgacccatgacttcctgaaggcgctccctgcagagtttgagcaaagatacagagttctttacattcaagcccttgtgtgaacctgcagaagaggctggaatgacagcttgtgaaaattacaatggggtgaatttcagtcgcctacagggctgaaagcaattagccaaacgactaaggaaagcatcttttcatttttatccattattcacaaaatcgcgtctcagttctgagaattccaacctgacggtgactaaacatggacttcaagtctcatataggaagcagttgaggtcaaggcaagtcagattatatgatgaagggtattttatagaagggttaatatgctctcttattatacaggcacgatggtgtatatctaatctcaacatttaagagactgaagcaagagagtaggtatatgagccacccgggttaccatagtaagggcctacctccaaacagatttcaagaacatttgggtcttctgtaaaatccaagttcaccttcctgttcgtgtcaccaccctcaggaaggagactggtgaataggtaattcagcagatttcaccatcatcccttccattgcacaagcagccggatcgcctgggttgaagtctttgccattgagcatgaggtggctggatgacaattctttagaggatactagcgctctttagctgagctgtttatcaagcagctcagaaccacctgtatgtaagtccagctccaggaaagctgttctaacaactttccctgatccctcttctggtctctgtaagctctacagtgcctttaaagtgcctttagatgggttgtttctcaatgggatctaaatcttaccagtttgccattctcctttgaaggccccatttgtactagaagttgtagttttttttcctctgcagctaacaaagttttaagtttcttgcttttcctcacaccccaaagctatcttttacccaagaagaggaaatagctccctcagcttgaaaaacaaaaatttaacttttgtcagcaacaaatcagcatttcaatccaaaacagcatactgcctcccctgatccatagtgctgggggctacaggtgtgtgccactgtggctcagctcacacctccagtccagtgggtggaccttagggcttcctgatcacagagccacacccacagccctcccatgccagtagacttgcttgtcctacacacgcacacgcacatgcacacacagagagagagagagagatgcacacccctgtactatctaatgaattaaacccatttgtgtatttttagtcttttagttcaatgtgagtctttctatctctttctcatccttgttaaagatgcccggtgttttctacctctccaatacatgtaatatatgcaatatgcaatgtgatgtatataatagaaaagttgttagaacagctttttaaatgtcctagtctactaatattaatgtctatgtcgtttccgggttttgtgtgtgtgttgagttttttttttttttaattgaattctatctttgtttcatgcttgttattttcctttttgatgttttcttgcttactttttcaagacaggatttctctacctgtcctagaactctattcttagtccaggctggccttgaaatcagagatctgcctgcctctgcctccttaaaagcatgtgtagtggcctctgccgctaccatcatcaccacccagctatgcatggtgtgttctgcatatttacagatttggttttgtgcttttttacatgttgagtgctttgtagttgtgtaagtattctttgagctttcttcatagaagcagttaagacacttggtcataatatgcttttttttttttttgaggaatgtattgattgattgattgattaactgatcctgagcaacctttgagttaggtctgatcactgacgcaatactgaagcagtactctgaatcatctacccaatgcaagggggatgctcaaatatggaatgttcagttctggtcttgagcaacacagcatccagccagaacccttaggtagctttcaggagcctctgctgagactccagccagatttcttagctccttcctcagcaagggtctctacagtgttactccactccaccccccatttctcactgtggacagagagtaaagggaatacctgtgggagaggacccccaaagtgattaaggagtcaagaaagctgccagcttggtttttatttttaaagaagttgttctgtttattactaaatacatacaaagaagaaaatgagaaacgcctcttttgtttaaatccctttaatttttacatgccgcgaattcctttgttgtatgaatgttcctgggtgtagctagagtaatagtgtgactttttttcataattattttctgaacgatttttaagttggcattttttcccaccattactgttagaatgtaccaatatagccatctaaaccacccgctccccttccttcctctgaatccaattttcttataaccaggaagctctgtcagtcttttgtttagctttgtgtcagatctgtcagcagagttgtcattgtctttctttggtgacatttggatccatcaggtatgtgttggtgctcttgcaaactcgactgctccttcttcgcgctggctgatgtatctacctaagctctccaggtcgtctgagcttgtctaaggatagacatttagttttattgattctccgtggttgatagctaggtttacttttgttgtttccttccttgtgctgactttaggttgagtgtgcttctcttccctagccctggttttcccttttgacaagtgaagtccttagactttgtccctctttctcatataagcttttaaatctgcaaattctcttttcattaaccataccccataaattttgcaatactgagttttagtatcctttggttcaaattctattctaattttcaatttcctttttttttttttttttttttttgacccatagattatttagctgtgtgctttttcatttcctgtattttagatttttttctggctatctaatggttattaatttctaatttgattctgagtgattatagagcatactcagtatgtttttggttctattaagtttacccacacttgttctgtgggtgaacatatggtccatcttgatgaatggatcatatgcacttgaaaacagtatgcattctgcagatgttgggtataatgttctatagctatcaattaggtcaaggtggtggagagtgttgttggatcatcttctgtctcaagagatcagcaggtaagatagaaggggtgcttctatcagttgctagagagaggtgctgacatatcatctgtgacttaacattgcctatgttaattgatgattcccgactgtcagctccacttccccttgcgttttgtctgtgtggacttcgcacagtttaagcactctttaggtgtacatttgctagtagctgtttatatgtttcttgatcagtttgcccatttttcattgtgaaatgtcccttttctctggaaatagtattctgaaatctaccattaatatagccaccctgtctttctcatgcatatattattcatggtgtgtagtcccccatctatttccttttaacgtttatatttaatctctagctacatagtcagcttgtagttaaagctgccttttgtattcaatcaaatggtctctgtcccataagtaatgttcagtacaatttattcattgctatagttggatttaatcctaccattacttacttgtgtgatctttgatctccaattttcaattatatttcttcctgctttccttcctttttttggattatcagaatgttatgaaattccattacatctgcaggcctttgagctatgccccttgctattctagtgactgtaccaggaattaccatctggacccttaacttttcactgtatatctagtaatgctgtacaccttttcatccaaggtgaatgtgccatgagtgatggagagttctatgtcttctgtctgaagtgtgcagcaaaccccacaggacaatgttgtgatgcttctattaactgctcatgtgtatgataaggaaatcaaaatccaaaatggccttctacatttaccagacagagtttacaaactctgatgttcctcacgctctcccaaggacctgaggtttgacttgatctaactctccttcatgctgacatcccttaatttcagtcctgttagcagtaatcttggtttctttctacggaggtgtttctatgtcatggaatgtgacaggtgctttggcccatgtggggcattgggttgggtaaacacttcccatgtgagcttgttgccctctgtagttcttcctgtactttcacctcagagttccttaatcccctactggaggacattctcacccactgcctttgggttgtttttttgtttgtttgttttgttttcgggtggggtgatgttgttggttggttggttggttggttgttattgttggttggttagctggttgttggttggttgtttggttttgttggtttgaggcctctgtctcaccaaatggtacaggctgcacttgaacttgcaattcctctgccttgtccaagtgctggaattacaggtacaaactgcgttcccagctcagcaatcatttcttaaagcccagcttggatttcaattatttgaacatagcttgtttgtttcctttactttcttcttgcttacatctatggacttgtgctacttgctaagtctgtgacagttcacccattatcttaagaactcgttcataaacttatccatttgcttaaaagaatgctctgtaaaccaggctggcctgcagctgaaagcagtgcatcaccacgcctggtagggcgattattcttaagccttgctccactgcgacatgagcatacactggtactgccccttgctctactgcgacatgggcatacactggtactgccccccatgcgtccctcaagtgctgttcacttgtttttcccatgtgaattacttaccttgatctgtgtttatgtccattgtccgttgactctgtcatatgtgtcacgctgctaagcccacacagtgcttcattatcatttcttcagcaccctttgtggtgctgctttccctctgttgagatttctgagctcccatttacaagacgtgtcctgcctttcctgtcaatcagcacagtcttgatgcttgctttaaaatcacgggatgcaaatccatttgaattattgccctgaaaatgaatcacattttccattttcctactttgtcccataattttatattgtatcttggacgtaatgaatgagtgttctggattttgttaatttccttcaaagagaactgatatttttaatttaacagcttggctttactcaggctggaaacagtctctaagattgcaatttgaatgttgcgataccatataaaatctttcctgagtgcaatcagttctgcactcaggggtcagacagggttgtgggggaagtttatatgcagtttactgtttaccacaccacttctagctaagctttgtcttctgggtttctctgcttagttttcagtgcttatacttaatttaaattctgtcctttcttcaaggcaaagagttttagttatctattgatatactagcatatacattcacataaaaatactcatttttcctagaaaaggacattgatcttgtgtgattccttttcaagcatttcttctctctagactcattttcattcctaggacagcgccttcaagctaattgttatattttattcaatactttatccaaaatttataattctcatctgctggaggcttaatctaataggagcttagtctgccaatccaaagttgaccccttctcccacaagtttaaaactattagcagatagaaggattgtagacactgtagtggtttgctggtctctaaattccattctaaacttagctttagacattgctttttgtgactatgaggacctgctagcttcagagtcacaatgacaaaattcctgatagaagccacttccaggaggaagggttcactctggatcttcagcctggtcccttggcctcatgcacttaggcagaacatcttgcaggaacatgtggttgatgaatttctttacttcgtggtagacatgaagnnnnnnnnnnnnnnnnnnnnnnnnnnnnnnnnnnnnnnnnnnnnnnnnnnnnnnnnnnnnnnnnnnnnnnnnnnnnnnnnnnnnnnnnnnnnnnnnnnnnnnnnnnnnnnnnnnnnnnnnnnnnnnnnnnnnnnnnnnnnnnnnnnnnnnnnnnnnnnnnnnnnnnnnnnnnnnnnnnnnnnnnnnnnnnnnnnnnnnnnnnnnnnnnnnnnnnnnnnnnnnnnnnnnnnnnnnnnnnnnnnnnnnnnnnnnnnnacccacaccacccccccaaaattgtttttttctttgtagcacattgtcccaaggagctccttctctgacttgagctgtagagtctgttggcagctctggctgcgtactgcaggatcatttcaggttatttccaatggcacctcagactgccctttcatgcatcttggagtacctaaaatacctagcagctgaatcttattgtacccagtgactctggggaagaccacagcacccattgttctccagtcaccttggtacctaaaatcacagaattatgctgagatcctgtgtaagcatttgaccttttaccaccaatcctaagggcttggctgcattaacattgctaaatcgaatgctagggtgtgtggtcaggatgacaaagacattaagtaaatttgctaagttgaattctttgtgattccacaggagtcaggttctgcttgaaggcaaactgtgtctacataggctccaggcttctgagcatccaaatgttataacaccacttgctttggaaaggaagaagatgtggaattaatgtgggtcattttttcagtattttagtacctctgtactctatgggtatacagtggagattgtagagtgtagcacagagtgttttagtgctaccagcccttgatgtctctgagaataaacacgtgttatttgtgttcactagttagagggtttcatgacaaggtatggtcagtaaaacccatgattcacgcatgaattctgtaggagtaagaaccagctaataaaatgtctcatcaatttcttttttctgtatttttgatcatcttatctttaaaggaaagagagatacattaaattccagttctaataatagcccaaatgggaaccaagtacctaagatgatgaaaaaagttatctttcaaaagcagggttttagggtttgctttgagcctgtatgacattgaccacatcaggtcattgaaggaagtcagtggtctatggctcagtgtcatcctatctccaatttatattcactagcagccattaaatgaccagggtggtattgcgattaaggaaatttgctaggttgaattgtttgtaaatccacaagagttgggctctatgtgaaaacaagatgtgtctacacaggctcccgagcctccaaatgttcctaccccacttgcttacattcagctaccactgggacgggtgtgattccgggatgcaagagattgagttacacgccattaaacttccttctatgacctgatgtcactgaagaacatcatcatgaccgacttcatttaggctgcagatacttccgaggcagagctttgcaaagctccacagttgtctgattgtaatgcccctgctctgacatagctttgatatcagcctttgtgcatcagcagggcaccatcagaaactcatacatttatcaaggaagacacaatgctcagaatgtagccaaaaggaagagagtcgaatgctgtgtgcatatctgtaagagcagagagctgtgtgcacatctgtaagagcagagcagtgtatgcacatatgtaaatagcagagtgacgtgtatacatctgtaaagactagaatcctgtgtgtgtgtctgtaagagcagagtgcagaatgcatgtctgtaaagaacgtagcgctgagttcaagtctgtagagcagagacctctgtgcacatctgtaaagagcagcactgtgtctgtggatgtggaaggtagaggttgacatttttctgctgtatttcttaagatggtctctctggtcctgagccttacccactctgcctacactggctgtccagtaagctccagggatccttgtgtcacagcctctcccagtctaagtgatggggacacagcactatgccccactttttgtaggagcgcttacaatgactctcagctcctcacacttgtgtgggaagcacttcacttattaaggatcctctcaggccctgccaggtattttgcacatatattttctgaaataaaaactagaacttaaaacatggacttctgtgatgttgttgaggtaccctgaagaaccagggtccttgtaattagtcacattaatcgtgagaccaaatgtcttctcagcttctactgtgtgctaagggtcgagatgtttacccaggaagacagctaacatggcgctcctgtatgcagccgtaatttccacttgacagagtgtgtgtttgtgtggaggatgtttgcttttcatttacccacttagagctttatcatccttttggaaatgtattgatttattcggtgaagtagaaagggaagagaaagggaaggggctgagccacctgagtggcccgtatacttgccgatttaccgaacctgtcaccagtcctccaccgtgacctctgacagccagtcattctatactgcgaaaggcagataacctgaggtttgcttcacttcacggtctatcaaaatcatctccatttgtaagcactgtggatttcagttttccccccgttttgcattagaacactgcgtgtttggcctctcctagcaagcatgtggagactatggaactgtgtcctctgcgaggaaagatgacacatcgtcttccctcccggcatcgaggcattggaggcaggtgagagaggtctgcactgtggctctccacaggccgctttgccaaagggtaaataaaggacacccatccatcagctttcaagctgccaccctctttccttcccccagcccccatgtctccctgaaaccgggaggagggagcctctgattatttttgcccatttctagcagagcttggcatgaacaattaaatttagggcttccctgtggtctgtgaataacaatgcacagtgctaaccatcagggcacaaaggcagacaacaccgacgacaacaacagagagggtggtttcatttcttgtttacccttcaggacactgtttaccttatcatcactgaaggcgactttctcatcttttggaaatcgctctgggtttgttctctgactcttattctcaaactgtccagtgatggactgagcatgtcagcctgggactaagggatttgcaggaggctccactctcccctacccttacccctgaatatatctgtcagtctgtctgtccatccctctgtccacatctctgtctcaggcttctgtcttgattcttgtctctagagcatacacgctcacttccccatttctcaccacctctttccttttccttaattttcctgtcagacttttcctctctccctttcaacccgaatgatttcccctcttttttttcccttctctaaatttacttcacagcagattgtcttgtagtaaatcaccgaaaacccaaatagcactaaagcattctgatacaacattagcatttgcttaacaagcacaagataaacattaaacaaagaactgcatttctttattagaggctgcaagatacataatccatgagcacaagaaacatgggacccagtggatatgcagatgtgtgttatttcattggcgctgggcggccttgttagaaaaggttttcatctgaaggcttgggggtggatggttgactgtccctggtggggctgtaactagatacagagactgttgcaagctaggctgggctccctggtggacctgctgattggacagcctgaggaaaacttgggaagcatcgggaagtgaactcagtcaccttggggatgatagggtagagccagatgaaggcatttgacttcttttgtgactcccactaaggacagattgccagtgcgatccagcctccgtaactgcaaatcaggcccttcccctatgccgatttcattagaatggccagcatggtgcaaagagggagagaggaaaaaaaagaaagggaaaaaaaaaggttagacacagtaattttacaggcaggcgggtacaaaaaaaatctgcataattaagcagtcaaggctgctaataggggagtttatatgctctgggaccaggcaagggcagcacatatggatatagcgctggatattaaatctacggcatgcagacttacttcagggccctcagagaaaaggctaattatagagagaggaattgtgtttactggtctgtcttgggcaaagatggtgtaagaagtgcaaccaagttttgcagttagacatgaacaggctgctaatagagatatcaaaatatgtgttcctggttgtttcctacctaatcaacataacattatagattctgcggacactgccccagcccccagctccccccgcacagacaaaatgctgggagttacggttcaggcagtcaatgcatgccgagcgccaccaggtcaggctaagcgtgtgcttcctatgaaaggccaccatttaatctagaccaggctctttagcatcaatacactcttctttaggaattgagctagccctgttttaaaattggcagtgctccttggaatgggcccgaagtcaagacttaacccagatgtggagatggtaagtgggagctgccgtgggcaggggtaagccgtgccagcgagagggcaagcttctcggagggctctgaggggatggacattaacatttcataatgcggatcaaaggtactgagaaaacccacaggcccctttgtcacaggcccctaacgacagcctcatccaggagcagagacgatttcttcagattattaaagagatgcatttcatatttgtatgtatgtatgcatatgtgtatgcatgcccctacttatttatttaattccatacaaagagcgttttctgaagaggactggagtatgggccatttgccccaggctggatgtgccgaggcatgctgggttgtttcatgggaccacagcctcctgcagattttctttccagagaagcagtctggaccctttgtccttcaggaagcttcccatagaaaacagcagccctctcctagtacagagcagcggctgtgggcttgggtcatttgtgagccagtcgtgaattccattacttagccctgacgaggaggaccagaggagaatcccactgcctcggctcaagatgtactaaaacctcaggcttatgaaagtaaacagccagatattgggtcaggctcgaccgacatctgggcttctctcagaggcagggaattcagtgctaatgagaaggcatgagcctctgccttgaaaagcgagagtcgcagaggctaatgaccaggcacatgtgcccctgaagagcacgagaaccacatggcacaaagggctgggcacctttctctcgtcccttgcattgttcactggctggccagaggagttcattttcctagcacagctgcctagacatcacaaccattgattaagatgggaaaggccttgagagaccagtccattattgcaggtacccaatgcctgtatttcctacagaactttgtaaatttatatttcctgagcaattattgagttcttaacataagattgatcctcaaaattgtttttaatctggtcccttctaatatcttctaacatttctagaggtcgcaaagaagtggcattctgaagagaggaagcttggactgcccagtgtttgtcagaaacagtgtgtggccaacagaaggcagtagctttcaagcacttattaagaccattctttttatcccattctctctactggagacttaaaaatgtaaaccaatggtgatctggcaggactaaggagagatcaatacctgggaaatgctaggaactaagcaaagtatgcatggggcaggctcagccactattttgtagcttgtcaagggaaaatgaggttgaacaaaacaggcagaaagcagcctgccaagaaaaaggagtaacgtattattgtttctctagatggaaataaatatgagggacaggtctgaacacaaggctgcttttctttttcaactttgaggctggacagaagtcagagaactgggcacaaggcatgtgctaggactgctgggaatagcaggcctctctgctcattgaatcgcatacagggaagacttaaccacaaagcagatagtgggaagattcagtcacaacctccagtccacaagtggactgcacatccatcgtagcccagggagtttatcagaggatctcctgccatacctgcttctctcttccagtgtcattcattcatgtaaaaaccaaccacaggtgtgttgtcaacaactcttggaatcaatcaagataaacaggaagcttgagagtcatttgctgtgtaggggaagatgaaattcgtattgataaaatgagaatagtgctggaagaatcctagatggtacggttagcattcagggcaaagataattctgtgtgaggagcaaaggctggaaatgtaggtcataataacagatggccaccctttccatataaacttggtagggatcctcatgtctgaaccgaccttctgtgttaactcaacaagtgtgcatgatgtgtgtttttagttaatgctcagccctggcacacacacacacacttagacacaaatgcagtctcacacacatacatacaaattctctgtgtctctctctgtctctctctcttacacacacaatttggagaagaaggaaggaaaaaaatagtcatagctgctgttggctgtgccttcaggggaggggcttacaaaaggggtaatttaacagcatcaacatcttctgggtattgttttaaagcttatcattaccatatgcctagacttctcataaatgtctgggttacatttaaaagctaacaaaaggtctttgctgcttttccccaaatgatgccacatggtaggagccaggtcagtgtgcaagcctcagtgatagggccaggaaggcccttctcagcaaacagctggggctgcggcggtgccaccagatgcatcctgctctggacagttcctgtatcagtgtctctaccctgtggctactgtaacaggtctgccactcaagtcctaaaaactctagagctgccttgaggaggctgccacctggctacagaggggacagtggattttgtgtagccctgtcttctgtccttctggtctacaaccacactgtaatcccggaccctctctgccccatgaaacctagctgtgtctccctattttgactgtatgtggcgtggaggagggaaaatggagagatgaaactaacagatgaatgttaaggactaagagcaattataaaaatactccaatacataaaggaatacttgctcagtgcttagaaccaacaataaataacactgactgtagtctctatagaataggcacttgatagattagattagattagattagattagattagatagacagacagatagatataatagatggatagatgaacagacagatataggcaaataatttcatttttcataattgataacagacaaacagacaatttcactcttcgtacttgatgttgcttgaacctcccccccacccccactagatgtcctaggtacttgttgttcccatttcattaatgtttcagctaaggcatgatgaaggtaagcgcacaagatgacaacagccattgatcagcagagttgggtaccagtgaataatcccaaagtctgagttgcttaatctccatcaagtttcatgaagaaaggcctgtgtgcaactgcctatcacaggctttatagacactgcgttaccagctacagtggcagttgttttaggcttgtggtagaagtctatgattgcccatgtgcacatgtgtgtacggttcctcagtgaagcactaggaaaagtgacagattacaaaactgaacctaggaataaccatagtccaagtgctataagaacccaaaccctgcattagaatgaaaggagtttttttttagcatattgaggaaaataaaacagtatttgaccactcagtatctccatgtttatcggagatgtacatgtaagcaaacaggcaagtgggctgaattgcctctgtgaagtgctttctcctgcgcttgggaagagagatgtgaagtggaaaacacatggtggatgctctgagctgccagagtgggagtgcacagccgcagcaggggaggtttcggggctgtttgtggattgttactattgtgacttaggaaagaaagcaatgtgccaccgctggccttcattttcaaccattttttttaaaacatcaattaatgcaatcaagcatagtgcagggaaatctaactttttatttatatttctcagggccagggagggtttgtttgtttttattcaactgcaggccttggagcagcacggtctatggttttcatggtattttccaaatcaactcagtaagttatatttaacggtctatgtgaaactctccgcgtgaggaagagaaaactgccttgtaactggtaccatttgtgggaaaacaaacgagcctgcctagtttcatgcagcttgaaaataacagcatccttggttgtagaaacagattgtttgttgttgtaatgaaatgaatcatatcagttttcttacccacaatagcaaaatcgcaagatgtcatttcttctagaattaatctgattctgcagtgccacgtgttcagctaattttaatgaattttaaaaatagaagaccagtgacatgaaactgaatatcatatttttgttctcaatttaactttagaaattgagatgaatgaacaagatagccaggaaggtgtaaaatggcagggtgcttttgagagcattgttgtgtttcactgagtcaactaaacattagcacttgaagctactcacgggtgtcctgccttccaccccaagcatcccaggaaaccaccactgatgagtttaaaaaaaaaatcttgactgcaaagtgacatttgcttatttttcttcccctcggtctagggcctaaatgcagatttgaaccatgctttaccagtaattactggtgtggctgagcaaatcagtcatgctcttcctgggaaacaatctgtcctctgaagattaactggcatttgggtttacaccctgccctctgccagcccaggtacacacttagagaagaagctgagtttgacttgtagagaaattgtattcagcatcttgtgcttaaaagttgtgttggcctcccagaagactgctgctttcagtagatgagattatgtttagaactaattgagtggctttgggtccagtgtgacgactttgatttggaatttccctgatgttaccacattaatgataacagcattgttatctccatgacaaaggagatatgcccagattctgagtcctgtgtctctcctgtgctgctgccttctcctcctcttcttcctcttcctcttcctcttcctcttcctcctcctctttcttcttcttcttcttcttcttcttctttcttctttcttctttcttctttcttctttcttctttcttctttcttctttcttctttcttcttcttcttcttttcatctgcctgggctttccttttgagagttaccctatgatgtcatctatcatgtgggttggagaaggaggaggggactgctagacccatcagtctcctaagaaaacaattaaattgagtaggattctcttctctgagactcctctctctctctctctctctctctctctctctctctgtcatttcaccttcccttttccccttctccctctctccctctgcttgtgtatgcttgtgtgtattcatgttgggtgagtatagatatcacatgtaactggctgtcctgcacatgtgtgcaggtatgtgaaggcccagaggaaaagctcaggtatcattcctcaactatgccatcttccctgttttccaagctgggcagcaagttcagggatcctcctgtctttacctctcctatgcttggttgatagtgcctgacactatgcctgccttgaatgggttctggggatgcaaaactgtgccttatgcttgcatggcaagcctttaccaaatgaactgtctccccagcgctattcttaattctttgcagtagttggaggcaacatttaactaagctctcttcctattcctgagaatgtattgtcatagagtagtttttctctcaatatacttaggtatattcagtaatggcgattagtttaagatcgactgaaaatattcattcagtttagttttctacacatttgtataatgcatgtaatctgtatttgtgactctggtttgaatgtttggactgccttttcgccaaccttcaggaatatgacaattctgcttgttagtccagttgaggtcttaccagaagtattttgcaccacaaccattctgccgccaaattgcctaatggaatagctttcctttgagttgtcaggtgtgagaactctcatgctgatccctgtctgtccaagacttttgtcatgtgcttttccaagaaggaaactgttaagccaaccaaatatggcatactttcaggaagaacctgaacttggtggttgctaacacccacattcttctttagattgcttaagatggcattggaattctgtgctgattgcacaatgcatcctgagagcattgtggagcccataaatatatatataatgtgtaaggccatcaatagacagtttagtgacattatctcaatagagtccctccttatgtgtggagattcattctctgcttccattatattgacacagtatacagtatttaaatttttaagacagatcttgaatgagctgtttccagttttagaaaaattgtaataaagagagtggattaaaaatttattgtgcccaaagcatctttataatttggcattatgatctgagaaatatttaatagctttgcagaaagtaatataagaaattatatctaagaaagagctactcgtaattatgtctctttcttcactgaacagattaacacttgtaaccagctaacccgcgctttctggtgagctctagtcctcacagtctttagctttagtttttgagttgagaatctgtccttcctctcctgcctgcaccaccctgcaaacaccactcccgcctaccaccagctctgtcctgtacattactcttgactaatggaaacagcagaaggaaactgaagttagtatgagtcattattatgccagtaataacatcttgccttcagtatggagttcctaggtatgctgtgcactaattttccttatatacgtgaaccacatgctttaggaagtacatgtattcttggtatttgcccaaatactcagtttagaatgattcaagtacttgagcaagtacatgtaggtatagacattcaggcagtctccacatccaagtaattctaattctctaaaggagacctcgcgctcagcttccacagagattcgagtaacagtttaaccaaattgttactgccatttagggaaaacacaagatttgcccgctaattcacaagttgtacagtcagaaatgtttctttcagagtcatagatcagacccggttggggaatctggaggtgctgggggcggggcagagtatggggcagaatgagggtgggagatgacacagcttcaactctccattatcaaggttttctgttctcccacaggtcttacctactagatttcatttctggtaggagaaaggggactcggagacatggttgcttaggacaagtagctcagtggggccacggagcatagaaatatcaacagcttttgtgcacagcaataatagaattagaaccctagccctcaaccctaatcctagcccctagcccctagcccctagcccctagcccctaacccctaatccctaatcctaacctattgtttgataaacaacacaaacttgtctacttaaggagcagagattgtgtgtatgcctgtgtgtgtgtgtgtgtgtgtgtgtgtgtgcgcgcgcgtgtgcgtgtgcgtgtgcgtgcgtgcatgtatgggcataagtgttcacacatggatgtaagtatgtgtgtaagcatgcatgtgtgtgcatgtgtgtatgttgtatgcacatgtactcattgtatacaggtgagtgtgcatacacccatgtatatgtaggagaaaggcagaggttgatgtcaggatgtgtttctctgccatccttgtctttattttttgaagcatgaggtctctcactgaacctgaagctcgatgtttcagataagcaggctatcaaggcccctggaaccatccctttcttcaccatcccacatctccatccctagcactgggcctggttataatatagatgctggaaataccaagccaagccaagctctaagcttgtgttgtaagcactttctccaatgacccatcttcccaggcctaaattcctttttttttttttttttttttagtaaaggcttagtgaactgttggagtcctgggtttctgggtttggtgatgtttagattcttttgttagttcccttcatgggctatactagatattgtctcttgcttcaataatttctcatcatctagacaagtctatacttgtccttaaggccccttccaaccttggaatctcccattttaactaagtagatgagttgattctcttagattctccaatgctttcctaatttactgagtaaccaagattttacttcaaaaagcaaaaatgtactagagtctctcaaagtccttgagccagcagctgatctattgtgaagtatttattagaatatttcttagtaaacgtatgatggcaaagaatttctagccaactatgctctgtctttacaattctatttgacacattgcatttctgatttctctgagcactgggaacagtccttggtttttgggaagacactaagcaccttagagtagttttatgtcatcctctatttttctcaagtataaaagccccatctaggacatgacctgcacaaagatactgccgtggattcccatcccacacaccagttttcttttaagtatgtggctgcagtattttcctttgctaatatattttgacatctccttgttgtaacctgctgttctctttaattgcttattgttattaattatatagtggtagcatagctggctgcttgagccacttggctgtaaagaaatccattcttcattattgccgttggagcaacagaaaattgccagcattctgcccagagatgaatactgtgtgctcacatccagtaacacctcccagtctgtctgtctgctgcagctctcatctgtgccggagacacctctctttgctctaaccctcttgttttgttcatttctgtttaactccttggtcacctgccttcctaatggaatggatgtgttctctgtactccactctgtgtcctatctgagtagccagcttttctttcctccccatccccggcccccaccaactttccctctccagagtttcccctctcacaactttgttacatatgcgtctcaatttaaactgttggtgctaattgggcagtaccttgacccccacctttctgaaaaaagagatcatgagaccctttaaaacaactctaaccccccttctcctcacacagtgatcagatgtacttagaattgaggatatgaatgtatgagtgagtgagtgagtgagtgagtgagtgagtgagtgaatgaatgaagtacatgtgccaacctgaggctgtgggattacccacatcctgtcacgtctgacagctgcagcatcttgaaatctagacataatttaggatatccaatcccacagctgcctgtgccatggaacaaccagaccggtgtgcccctctgccttctggcagcgtgacattaaattcacactagttaagctaacttaaattgagcctccttgaaccttcctaaataaaactagtggccttaattacaatcaggcaatttaaaggttatggagctctaactagtatcacagtatatcactttaataatgcacaggaaaatttctctgaggggtggcctcctctgattaggagaaagcaggcttcacatttccaataaactgtttttagaaatcttactgtgtttatggcgcattaccttcttctgttcttcaaggccaagtttctgaggtcacgccaaaagaacaataaaaattccactcatttgcaaataccatacaggactgtgactttttcctccacattttcttgcttaatggtttgcctgccaggaggaagaggaaaacccatccccttccaagcacttgtgccatcacagacacaatttgtagtttgggataaagttagattctaaacaccatcgtaaggcaaagatgtcagctttgcactaagtaatcaatcagagagtttcttatgaaatagtttcttacaaggacaattagcttcaacaatgccaaagcagaggccagagagatggctcagcagttaaaagccctggctgctcctgcaaaggacccaggttcagttttgaatggcaacacggtgcctcacaagtgtctgtagctccagttccaggggatcggacagcctcttctgagcaccagggacaaggcacgcgtgtgatgcatggacatcacacgcaggaaatccagcaaacaaagtaaaagcaattcattcaatgcggctggagcgctggcttagtagttaagagcacttgctgctcttccagagaggagcagtgtttgctctccagctctggtgtggctgaacattcacctgtaactcccacttcagatggcacctgtactcatatgccacacacctacccacagttgcacacacatgcacataattaaaaatgtaaaaatgccctcttaaaaatgcccacctgtcttcattccttaacctgagggtattcaggaagtgtttgcagagactgtggtccctcgcttcatctcctttgtctggtttatatttctttttctgtctattttgtttttaatcatccgcagtaccaggctgtgctttctaacaaagacaaacagcttttcagtgtttagagatgttttccacatagctagtggctttacgccaagcagcagaagatttcttcttcttcttcttcttcttttttttttttttttttttttttttttaagaagcataagaaaaggccctgacccttagcgcaaacccaacacccaggcactgcagaaacattcctgatagatgccgtttctgcccccagttgccacggctgcccactgccatgtgggtgagtactgactgctgcacttcttggttctcaaggatgttttccccacagatttcacaacccagcaggttgcatttagtttattatgcatgaacccttccaatgttatcagttatgttttaggcttgtttttttttttgttgttgtttgtttttctttttccctttcctttccttttctgttttgctttgctttgctttgcttagcttggcttggctcagtgcttgaaggtgaatttacctatgctgctacaacaaccagaagacctacaggcaaagacattgataggaatttgatgtcaaacaagagaatctgcgtgcaaacggcatgataaatccatatgactgttttaattaagagaatggcacattgtattttaggaatatcaactgttgggaaagcttgtttagaccctggaagatagcacactggttcttttgtaagcatgaggatctgactttagaccctagaacatatgttcttaaatagatgtgatggtacacccttatcaggactacagagctctgggattagctggccagccatcagtcctgttgttagtcagaaaccctgtctcaaagatcaaggtacatagagttcctgaggaagccaagggtgacctctgcttacactcgcacacacacaccacacaagtacacacaaaggcatacctgtacttgtgcacacagatatacacttgcccatactaacacacaccacaaaagaaaggatccttgtttttctgtcatggaatatagtacagagacttccctgtgacctatggcaaaaagtgtcctgtttatgtatggcccatacatatggttgtcaggttgcagcatggatcactgaatcaaagcgtaccgtgcccttctgcatcttgcagttttgtatgaattggtaaaacatcactcccatgacgccttagctggaagatcccctcgctcacaagagtctctcctgggcctagcaggaaaatggagaagagcattattgagtagtgaagagccctatctctgatttcacaggacaccaaactcactctgcaaaatgcaggtcagggttttgatcttgtacttgtgcccttaggcacaagagagagatagtgacagagagagagagagagagagagagagagagagagagagagagagagagagannnnnnnnnnnnnnnnnnnnnnnnnnnnnnnnnnnnnnnnnnnnnnncttaaaacaaggtaaagagaaacttttttcaatagagagtttttttccagtatccttcatggaaactggatgttttccacctgatgcagaagtagacttggccaaagctttgtaaccagaagcaggtttctgagagcaggaaacatttctgcaaacctgtcaggtgcctttcaagcttcgctattctccattcccacttctttccttgcacatttgtttgcattgagcttattttactgtacaactgtgtgggtggggccgggggggaagatgctcgtgagtgaggagaccagaggtcagccttagatgttctccaggaactagtcaccttgtcctttgaggcagggtgtctcactgggactaagagcaaactggcctgtaaactttaagaatcacctgtttctattcccttagcactggggttacaagtacggtctagcacatccaatgctttttaaagaaattttaagtctctgtctgtctctgtctctctcggtctcttggtctctctcactatctgtgtgtgtgtgtgtgtgtgtgtgtgtgtgtgtgtctgtgtgtgtgtctgtgtgtgtgtgtgtgtgtttacaagagttcaggtgcaggtgcccactgaggtctcaagtgtcagattacaaactgttgtaatcctcctgatatgggtacaagaaattgaacccaggccctctgcaagacaagtatgggctcttagctgccatgtcctctctgcagccctcgtgcctgccattgtacccggttctgggaaatgaagtcaggtttgctcatgaagcaaacactgtcaggagctgtttccaggctccagtgtatcggataaggagtgtgtcctgatttcttcttagcttgctttagcgtgcttttgtgggggcggacggagggagctcactacaaagctttcatggggctttttccagtaacttttgctgtttaatcaaagcatttaagagtaaagttttctccctttagatctcttttgtaactccatgtttgcaccaagactttggctgtgagacccatgtttaaatacacaaagaggaaaagaaatcactggcaaggccagggcatcggtcaggttgggaagtgatctttcttggtgtgcttgttcttggcccccatttctgccaaaacagcactgccaagtgctgagtacggcaagctttgagcggagctcccgtttcaatgtttctttgttttgttttattatagtttaaacaacatcccaatgttttcctcctccgtgagaatattctaattcgtgcacacaaatggtaataacagccacgacattggacagcattgcatctcagagcagctaaaatcccccttcctgccttccctgccccatccacctggaccccctgcgagtttccaagctgctgatgtttatgggtccctgggcagcctctgggctctcgaattctgctgggtactgtgcagcctacccctgttgaatcatttcctgctcccatcctgctgataatgagaagttcaagacaggaaacaacagtgtcagaaccagtggctttgcttaaaaagtctaaaagtattgcaatgtttagactactggcaaacaaacaaacaaacaaataaaatcctcaggcatgagtcccacggacgcttgcaccttgcaagtctcctcgcagtatgatgtggcttagacataagggatacatagtgttcagctctccttgagacgcccgtggcttaggtactttgtgcatagaagccactggtgtttggttgctcggattctccaggctctttcctttatgtgttgtcagacgtcctgtccttaatatttcatgccctttctcaatggcttgggaatactgacagaagcaaatctcaccatattgccagtgaaaaagcgttctgaaagtaccggtcaggcaatgttcattttcatcttaaattgttccacagaataaataaggccagaacttcctaactggtgtgacggaaaaagaaacactcatatactgttcggttctctcctattctgccttacttcaggggcttaatgactaatctaccagcggacttgaaagcctaggccgtattctccactgccaaattagcaccttggtgtgtttatgttacagttgtgaaatatgtgtaatgtgtaatgcaacaaattattgtggccagagtgccagggacccgagaaagaatgggatgactgtgtgcgtggcaaattgcagttctggctgcctatttttctagccctgatttccagggtgagcctgtttagccgagggctgggtttgtcatgtatgcctttgctttgttagtcctcagacccctggcttataaatgtgtgcttggaaattaactcagggaagcagcaaggcgaagcatggtggggcgacagcgggtgttgggaattggtctagggcatggttttctcggattttaaaaaataatgtgtgtaagcatagagtggtgcgcacatttgaactgggggcacaaattacaacttcggggcatctggtttctctgcttggattctgagggctgagttcacgtcctgtcaggtcagagcttttcaaggatagcccctgtcatgtgataatggggcatggggggtgattttagcctatagatttctgtagtagaagaatgtgaaaagaatccttccagccagggtcaagggtaaatagaagagttccccttataaacccttacaaatcggccctcagcaatggtcctggtatcggtgagataggtaaaccaggttcccagaggtttctaagataccagcagcatgtaacgcagccactgaacatttgcttacaactgctttagatttttggttttttattggaggaaagggggtataaactcgagcacatggtctgtaagctgctgaggaggccgtcattgtgtaaagctcattctaaaatgtcagagtcctgtgttagactcacagtggccatggtggaacctataacttgaggtgtgcttgagcagccaaatggtgactgttagatctttgctgtggcacaactgattaagagtcacgtgggtccaggatagactttggagagaaagaaacacttgcctttgagctggctctggttgagaatggagtgttttcttggagcagaaagttcactataattcttcctgtttctccctcaggcaatgaggtagcacagcaattgcatatgcagaccccttccttggaacgtttaatgtgggaataaatatttacatgagtatgagactcttttgtagacttgattcttgtttacatttatgttccaggttacacaaagattagcaaatgaaaataattgttttagctccgacttctatacatgtgacattatttctcaattatgcttaagcatccttggtactaccttgcactaggtagccagcatcagcctctagtatgtgctcagtaaggagaaggccactctgacattttacccatgtcactgggtacccacacaactgccacagtgcaagctttggggaagctctgtgccctgtgaagtgagccaggctgaggctgatccctcttctttggctgactaatttgcactctgtggtcttattttccctttcctagcactgatttacgctgtcatggtttttagactagaatatcttccagtcataatgtgcaacacttgtattttttttttagatgccatcattttgcacattttctatcaaccttttagctgtgaaaagtccaatgttgtaatcgatctttattgataggacacagaaaggccccttctccctctccctcccctatcaccctccttcccttcctccttcagagtaacatacagagataaactacaagtattgtagaaaatctggagaatatagataagcagaaaacatggatggaagtgtctagaagtttcatccagagatcccacctataactcttcataaaaaaatagggctgtgctagcctattatagccttaatgaaatattgtaatggttattaagtcaattgactctgaatctctttttaataaatgaggcaggctgtattatccaattactgtcagctgctacctttccagagagaagaaatggtgattttgattgaatttttaagctctttggcacctttaagggggaggaagcaaggtgcaagttctggcttcagggcacatcccacttgaaattgaaattggaggtgttgctagtatcacctcatgagcatcagctgctggaaggaacagctttttgcaaggaaatggcctttaatgcagatatactcctctacactataggttttcagctctttaacagtgagatggagctggtgaccacatagctgaacccagaactcacgagggcaaatacagcagggcctctaaatgaagctgcttttgcaattctccttatcaaggagttgtattggaattctcaaatctctgtctccccttcttagtaaagaaagaaagtgtttagccagcagtagacatagttgtttgggtccctgtcttgacttcctaggctcttgtgtttggattattgcttctcagctggtgatccagatttggagaaattgtggggactttaggacaaagaacctaactatgagcaatgggtcactgaggagctgggtcactaccaccagctcagctccagccagagcctctacttcctgattcccccaaatggaatcagccagagcagcaagcttcacagaccctagctgtcttggtttctcagttatccactgtgccccctttaaaccacgatcacccctggagctgtctgcaggtcacgtgacaaatgagaagtgtatttaatgcagcccttacctgcttgccctagagccagccctgtgttgatgccctagagctgcttgccctagagccggccctgtgatgatgatccacagtgaggaccacagtggggggtggggaggaggaactgtgatgaggggagagaacaaagggacaggtaaggagtcttttatttgtttgttttgggttttttttttttgtttgctttttcgagacagggtttctctgtgtagccctggctgtcctggaactcactctgtagaccagactctccacaaactcagaaatccgcctgcctctgcctcccaagtgctgggattaacagtgtgcaccgccaccgcccggcacgggtgaggattcgtactgtctactagaacatcgattctggatgaggtggctgaggagtaattgatgtatttttctcctagtcagataacttggagatccatttattggggaaaaaaaaaaacctcactgtttaacctacaaataggaaattgaacttgcaatattttttcaatagtgtaatgtgctttaaaactgtaaaaatagctctcaagaatgcttgctatgattgctgtcatgggtattacttaatcagtccgcaaacaaagggtagaatctgtgaagaatgagtctgcgctagtgacacagaagtcactgcacgactgactgtcgccattcttgtttcatttgactaaatttaaattatttagctttggggagactgctttactctgggctagaaaaaaagagaagatgggtgaggacgtgtttcttgcactcaaacacatcttttgttttgttaattttacatacaaagcgtgagtagtcaaaagggggactatcacattcaaaagcatcttaacttgccgaattccctttatgtccacacacacagtcagcctgttctcaatgaaagactgcagcaagactggtcacgtgacttaacaggctgattgtcaaggaacccaggctccatacaagcctactccttggctctcatggacaaaaagaaatgggaaggaagaaaagtattaattgctatttttcccgaatgtacttattggtcacaatgtgaaaaagtagacgtaacttttaattggtgttgtaacattaaaacttaaatattctcttactcttcaacatatagttatacagtattcaagaaattttaaaacttggcaaatacttctggttatatttgattcagttctctgcaataaatagtgttctttatatctcttaatgactgaaatctaggaaatttttggtgactttaagatttaaaagaaaagaagggaattaaaaaaagaacaattgatcttacataatccctaaagctttttgtataaccccttgtcatgtcagtaggcacaattaaacttcttcttacataattataatcaaggagtttgctgtgccacccaaatacagagtgggtttttatctcctgtgaaatgtagactgtactgggggcttaattagtgctttgagttctccttgtacaaattcttgtcctctgcttctgaagactcacacttgtgtgagaggaaagattaggaatacaaatagcatgatttcactcctagttagctaataacaattccctttgtaattggaccttcgtactgtcagagctcaactagtgaagcacctacacggagattagcctttgagtggagggaaatgcctttgttttcagtattttggtttaaatttgctgttccctgagtgtaaatatatctcctgctcttggtcctagcatgtctacctcttatgaacatctctaatttttacagatagaaggtagacatattgcctaataatgggaaggtcagagtatagcctctgacccttgctcttcctaacaagtcatcttggggatagcaggtgtgtggcatagcttgtttataagttcatgaacccagagacaaaactgccgatgtctaagttctgactcctttaattgttagcctctctgactcagagaaaagttctacattctctggatcatgcctttctcatctgtcaagtgggcataagaatagcattactcatgagttgttgcaaggttgcatggattcacatttgcagacatgtagaacagttcaggaaccacagaaagctggatcgttcgccaggctgtgctagttttagtgaaggcaatgctccctcgctggactgggaactcttaatacagcaattgtcagccaatcagaattgttcttctaccaacttctgatgtctaatgatctaaaacttgtcaaaagtgagccggatctcagaaaagtggaaatgagatagacaggtgaagagaagcctgggacaaaattagacctgtcaagcaaagctaaacgaacagtgacctggggttggatatgatgggctaggactgagaagcagagggaagaacgtccataaagtgaagcgttctgctacagactcgccagagcaggctgccccagtaaggtctgtttcagaagtgtgccacagagatcctggggtcaggggtggaagcctctctctacagtcttccaggcaacgcagagaagcactaaagaagaagccattccactctcctattggttctttattttaggtctttggaaatatagagcccataaaatcatgatcattaaaacagaaacctttgcatcgacacactaaaagcctcaaagtaaaatctgatttctgacttttggcttttaaattttaatttttttgtaaatttctataaactccataataatgtaagaaatcactattacacatatacggagcaggcattacagggtgtgtggctacacatgagtctgcatctatatttggctatagcaagggcttgcgatgagaggtatcctggctctatcacaaagacggtagatttgacctcttctgtcaatgtgctttcctcaacagatgaagggctgaaccatgagtgcaaactctgcagccagacctttgactcccccgccaaacttcagtgtcacctgatagagcacagcttcgaagggatgggtggtaccttcaagtgccccgtctgtttcacaggtaaggaacttcttaaagcaaaatctcagcctgtgtgtgtgctgaccccactgtgtccttcctccaagcgtacttcccactgcttggccttttacagcaacgactgctgttcaatttgggggaagatgtttgatttctgctgattagcattattgattgcagtctgctttagagactgagccgggcgggaaggttaactgtcaggatgaacgaatggcatttcgagttcttgcccaagtttacactttcccactcggaaaaagacatccactttgggttcactcctcttcctctggatgttaaaaggttaccaaagtctggctgcttttgagtcactcgatattcaattaaaatatgtggtcccagtgcccccacatatgtgacctcaacctggataattttataacttctttataaaggtgtgtgtgtgtgtataaataaaatacttctttgaaatagtatacagattagagatgtttattttttgtgagattggattttaaaagttgatagaaatatatgatcctagaaaatttgtatcagatgttacagtggtacagttgtcagggttaaccacacacatgagtgtgcacacacacacacatattcacagaaacattaacacacagagagaaagagagagacagagagagatagagacatacatacactttagaatttattcctcaaagcccatgagcgctgaaatatgttcacacattttctgctgtcaccctaaggtcaaggctacttatgatcctcagtgatcatctcacctgtgtctggcacatggtggccaagcacatcaatggaaagaaggaatgtgtagatatcttgacctcaaaggaaatttctctgtctgcagattaattagttaccttcactgaattcagcctgtagatttgtattctatataaaatgggaacatgggccataggccctcgtacctctcactagtaacaccctaagtatgtggatgactatatcgttaacactggccttcacgtactcatcccatctgctaatgtttctctctgttgagtttgtttactcttccaaatttttattttattaaagctattgttaggctctcaccatgtatttaagatgcacagagtcaagagtcaaggtcctttgtctaggtacctggtaattctgtttaaaagaagagtaggccaaaggtctccacaattaaatcttacaataaaatagttctttcgtgttgtagccagagccccataaaatataggatgttatatggacataagttgcaaacctggataaaatcccatttctttttgttgagctagtaaggaaacaaagccacatcaggaaccgcctggatctctgtacaaacagatgtcaattgtttgattgtatcttggagtcatttggaaataacaattaggaaaaataaaaccttccaatgtaaaacatgtcgggaaaagaaaagctgagaggtttctttaaggtaatgagaaatgttattaaaatgtatgactcacaagaacaatactgtaatatgatgttaggttggctggcaattagaataattttaatgatcagagtggagtcaaagtcaaatgccagcatctttaataaatcctctccctgcctatacagattaatattgtagatgcaaacttttttaggtcacagtgcaccaagcatccgtcagaagtcagctctgccagcccaaacagcgcctctggcatatacaatttaattattaatagtatgtctcctaggtaaactgttacacagtcttagggccttgttttgtagtcattaaaattgaacatgtttatattattgaaacccttgcattccatgtgtaggccgagttgatcttaaagtatccaaagagaatttacctgccgttctgttgcacatttatagacagtgccccagagtagctgtgggatatcatttttagcattaacacatttaaatagagaactgtttgctagctataactttaggcaaatacaataaacagggattgagcagtcatgatttcttaacctgtgggttgctgtgaagtaggagtcatttcttatgagacagagctatgcatttgacacacagcttttatttgcaaagatttacaaggagcagggactctgtgaaccattactctttgggctgagctaggtgctaggtagagtgcatcttaacggaagccagagatccaaccatgagcagctatgactcttactctccccaggggtcaggagccaggcatgcctggaggtgtgcccttcaccctgttgtctgtgtgtgcagaatcatgagcacaggatatagcggaactcagtaacccaagctcccatctctttgttatttcagtgtttgttcaagctaacaagttgcaacagcatatattctctgcccatggacaagaagacaagatctatgactgcacacaatgcccacagaagtttttcttccaaacagagctacaggtaatggcctggtgaggaaggctgagggttgagcctacttgttactcttatgggacattttaactatggactgagaatctctcttcccctggaccaccatgatgttcttgtgtttgggggcaaaggggaaattagagacaagattaatagacaccaaaataattttgcctctggctgctgtcaatcataaaaagaactagaagagaactgtaattggaccttctgacccagtgtgaaggatgtaggggttgggttactgcactgtgggatcattcccctcacttgtctgagctcgctctcccaagccttgttttattcatgttctttccccctgggagccatgctggatggatagccagccatcgttatccagaaggttgaacactggaaagggtcttttgtccaggatgtatttgttccacatcaggcagctgaataattagtactgaaaccacagctttagagttgaagtctgggcaccccaaaaagttagcttggaccttgggtgtaccttttgttagatgtaaaggtccacgacttctctgaacctcaaatgtgaagaaaaagaaacaaactttatactcacaggttgtcataaggtgaacataaaattataggtataaatataagctataaaacaaaacctatggttgcttgaatgactttcagaaataatagttaaggagtcagggggctgaggctgtagctcagcagtggagtacttgctgccatgctcaaggcattggattaatccaggcatcacagaaaatgggaaaaggagagagaaaaagatccaaaggataagttgacacatacctataatcccaatgtcacaagttcaaggccagcccaacaaagaggaaatacaaggtcataaagacaccaaaaaagaagtaaaaacaaagacaaagaaacatggattctattccagaaatttcatttagaagaacataactttttcaataccttttgcatcttaaaaaaaaaaaagagtaagaatattatcatgattaaatttttttaaatcttgctggttcctatggaagaaatggagccacatttgaaatctcttattatgaatattactggttattgtttggcttgacatggctgtgggcttggtttctacacccagagccaagaccaagcaatacagaatttatctgcactcctctggctacctctatggtatctttatgcccaagaaaaggggaggttctggtaaggcaagatttaaaggagctatgtatatcagaataaagaagctatggttattctactcagttattgttctaagcaactaagttagatggaatttaggagataaatgaacctactgaattgtattattgttagtggaagaggactaacatctctttttcacattttgttcctttgaaacactggatcctatcacatgtgtctgccaataaacatggaatacagtccaagtcatacttttcctatttcttttttttttttccaagacaggtttctctgtatagccctggctgtcctggaactctgtagaccaggctggcctcgaactcagaaatccgcctgcctctgcctcccgagtgctgggattaaaggcgtgggccaccacgcccggccccaagtcatacttttatcatactaaaataaccttccattcttgctttaaaaaaaatactggttttattgcaacttgtgtcagagaaaagatcataggaggtttggttgttctggcttggtaaaagattagtatgtaaaatttgaaacaaatgaagtaacagtttaggatgaaagtcataggctttgtgcagagactggtgccaaggtggcatctaaatgtttgtatcagacttctacttgggcactgtatgcacagattccaacctggtgtgtctttcactgagaaagcttatagtgaatgatcattttaatataactatacaagaaattaataaggcagctgtatttctctgttcctcaatagtgacacaggtactaagatttattttcaagcttcacctcaatatcctggcagtctaccttataatcccctaaactaatctagctacctcccagccaacatcccaataatacgtgcattgagggcacttccatgatccaactgaactcttaccaactccttttgccctgcctcaaggctcaatctcctctcttccccccccccacctctctctctctctctctctctcccttcccctcagtggtggaagtcccaccctattctcttttctgccatacatcgggtattcagctcttattgacgaggcagagaatatatgttaagaactgtttacataaacttgtgacaggaaatacttgacataagcattacaatgtgctgtcagattgaaacaatgtatgggggtgggggacagaaatcagcatttgaataacacgaggctaacctttacacagtgcacaaaacactttgtctacagctcagcactgtggtgggagtgatctgtgacctactctagatcagacacacttaaatgcatccttaaagacaagaggtttcaagaaacatacagtcttcactttcctgcagttaaacagttgttctccagctctctggtcctgggaatccttaagaaactacttgaaaacccttccttgtaacttgtgcgttactatctattgatatttcctatagttgtccattactttccctaacttcaagataactgtattaaacaggagagggggccaggcagtcagtacacctccttgtagcctcttgaggtgaggagatattttttatacaaataatattaaatactataatgaatcgttttgaccttacagataaccaacaagtatctcagagaccacaggggtccctaggaggcagatgttctcgaagacactgctctctctacacccaccctctggatctttgtggccgtatgaaatcagacttaagacgctaactcagtcactgaaactaggatgtgagtccagagctggaaaagatgtatgtctgctcttgacatcaatactcagcttctgtgtgtaccagtccttacatgagaatagtcccgatggctagtaaggataattgttgcaaatctgagataaaatactgactttatattcagtagtttggaaagctgtaatccagtcgtgggaatatctgaaagtctgtgctctaaaatgctcagtaatagctgtggctctagttgtagggacaccaggagaaaacgggtcagaagttgacatttctgagttttgatggtatctctatatttttacatttgactctagaagttcatgcatctattctttcagcacccatattaccttagaaagtgaaaattgtgtgtttttaaatggtgattaacttcctgtattgaaaacagaaagcaaagttcctctcattgccaggatgcagggtaattgaactgaaattaaggtgacagtagaaatactgtcctgacaaaagcatgcagccagtgtattgggctgatgccctttgtaccttgatatgtaaaataaatgtaaattttaggccacttgaacctacctagatttttatggcattaaagttatgaaggagtgcatgaaattaaatctccaagaattgaaattatgttagagatcttaaatcattcaagttctctgcctctaactgcaggacaggaacactggggcaagtgtagagtaaacattctgagttgctcactaaccactgtggaatgtcccttagtggtacagaaatgatttttgcgacatctccttcactctttcacagttgaagtatgaaaacagatttggaaaaagtcattactttttagatataaaaatctaccttcatgtatgtttctagttatccttgtaaataagtatgtttcatgtgtgtgactagacaagtaggtaactagtggaggagccaatggtaaacaaagctgcatcccaggttgttgtgtgagagtgcagttacattgacacatctgtatataaatacaaagcgtggtgtgtactttgactcacaatacatacaaagccaagtcaaatgtaagtcattccttgtcactttgtttagttaggcaacatgaaccatccttctctggagtccccttgtaggaccagggacgtacactacttggtaagtgtgaaggtctttggtcaaccctgttgtcttgttgatcgcaagtccagagatagagatacacagtccttcagtcttactgcaatgttatctttgtcttttcctggagtgctcaccagcagccacacacacagacagacctgatatgttagtcaaggcacatggcaggaaggcaaaggtatctgcgaataaaagctcattatttgaagaaatagaatattttattatttggaaaataaatgaatgtgttcaaggcctcacatgtttccccatagatctcagggggtttagtatgatttcatttggtgggggatagttttgtcttatttttttgttttttctagttggttattttttgtttgtttgtttttgtttcgtcttgttgggtttgatttggtttggtttttcgagacagggtttctctgtgaactcttggctgtcctggaactcactctatagaccaggctggccttgaactaagaaatccagccatctctgcctcccaagtgctgggattaaaggcgtgtgccaccactgcccagcttttgtttgtttgttaacagaatttgtggagctgaagagatggctcatctgttaagagcagttattgctcttctaagaggactgagtttggttcttagcaccggtatcaggcagctcacaaccccctatatgtaactccagattccccttcaatacacatccatatccaagtggttcatgttgtggttgagtattttaaagctctgtcttacagcacagaaatcgctgttctgttggcacccccccccccccctggaaacctgcaattgagtggcagtgttggagtctccctcctcctcctgcatgtcttctaaggaagttctatcatgttgagggtttagtggagactgggaaagttcttacagtgggtagaatgaatcagcctaaactctggacgatgctagcatttcagctaggtgtgcatcagagattgcagagtctccacactgggagagcagctggtgtgttgggggagatgtagtaagacttcgggatgccaccacagtataacttgtcaccgtctctgcagctgtttgattttcctctcaaatcacttttctagcatgtcaactaattttaatgcgtatttttcacacctcagttttattagtgcttgagttttatggtcacatttctgaaagaaaaattaattgttgtatatgagacaggacaccaggacaacagcattgtattgaaacatggctcattgggtcccttgctaactggccatacgctggtctttcagggttgagatcatatgcttcggatgattaaagtaggtagattggggcatttaggagtcttttgttagtggtcagaatcacaagttcactaggcccagtgacattattggattatagttaagatagagattttaaaatatttattaaaacacaattccatctcttaaatgtaccatgatgccaattaagagataacaagaataattcaaaatttattttctgtcaactttgaaaggtatgatgcagataaatcattcttgcatgacatggtatgtaagctattgtgggaagtcctgggaagtaccttacctgctgagagcttggtgaggaaggcagacatcacacagtcagaccaggtcttctctagcatcctgcatctctaatgctgacccaagaaagcacaatcaagattgaccaattatatggaaagaaaatctctaccctagagctcagaaacttcccaagttgtcttagtttgctggaataatttttcagtcaatcatattttgctgagggttccctgttagttggtttctaagtgaagatacgtattattaagctctcttttcacaagtgtcaagcatcttgcattagattttgttttcctttttagcttcaaactcgacaagtaatggtgctggctttcaggaatcttatttcaaagctgtgtgccaactcccttcagttaaggccaagacagagggttcttgttgccgctctgtaaacagcaaggtggggactggctgtggttcgaagaaaactttattcactttgttctcatgtttccctccacctgaacctgaaatttctagtgagcaggaagaatggaacctgtttttagcaaatctaaaaaacgtacttgtaactctgctttggccttccaaaagctttcttaataaaactacatctagaaattaagcaagcacgaagaaaggaaagtgctattgtcacatctcacaactctcctgtatatttcaagtgcttaatttttttgtttctcacagacattaaagttttttgtcattatccctactcatactataaaagtcacagtcccccacctgccttgtctcctttcagagggccccagatggaagtgttggccccgcgctcggttgagacctggcacatctggtcctgcagtgatcccttaggactgtctgtggaggagagcaggctcccctttgtgctaccctgggctgcatcccctgaagccacagagcctctgcatagctctggtcagcccttgaacatatcaggaagacgccaagatttgcaagagtataaattgtgtcaaatgagtgcatgattcgggaactggcctacccattcatcgcttcatctctgctgtgagcctgtgcggctttggaagcaaattggtgctacagtgacttgcacttaatttgctccgtggctaaattgatctatctcttttatttgatcggatcaccaggaaccgaatcatttgcattgatttattgattggtgctgtgttttcaccattagttttgatcactttcagctgttaatattggataattcaatcaggattgattggccttaccagtgaaggcagaaagttaatcaggtcagacacaaaaatggggcagaggtaatctaaccgtggcttgactgtgatattattatattccctctctccagtcctctctctttcctcctcctctctatccccctctttccctaagtcactctcctctttgccacccctcccctcagtctttctctgccatgaatgcaataaaggaataaaggagaaagtttaaaattatctcatattcgcaatgcatcctaatgtgaggtccttttatttggctttttaataagactacatctagaaattaagcaagcatgcagaaaggaaagtgctattgtcacagtgaacttatttgggttaaatgccttttcaattacctattttgtcccaataaatgtctaatctgtgtgtgtgctccgaaacacaacctgggctcacctgtttctaagtctggcccttactgcctcaccatgtgtcctggtagccagatttttccagaaccgagtggctgatatggccagaatcggggctgcaggagtagctgcagtcagtggaaaacactttatttgcatctgaatagtttctactgccccacagctcagttttcaaaaaaattctccatccattaatttcttgatgttcgtatcgatggctgacttccctatttaaagggagcaccacctcttcgttctagggcccgctcctcctccaacagccctgttgtaagcaagctgccattacattattttctgtctggcccagagttgacgacagatggccatctctgaactgccatcagctcagctttatggagcatccagccagggcagcctgatggcactatggccagttcggcagcccctccctccccgccccctggaagtgttcatcacctctgccacattctgccttggctgggccttgttggctctgttggcttccatgtcgccaaggcagcctgctgccacagcactgggagagttgccttcattaagaacaagagactgcagacacagttgtcctccaaacagagttctgcctaggcacctttgtagtcagatctattggaactatctgaaaacccaaatttctagaacattctgcaacccagacagactcatggaattcctgcatgtgttcctattttagatgtttgctctacacgtgggtggatttcctcacattagcagagactgtgtgccaagaatagacccttggtgtttacaaactctcatctgactgttggaaaacaccacgtccggacccaactgttgtgacaattagggaaagagagatggcaatcacagactctaactatcaatcccctgaaatgagcagagaatccaggccagcatcttctagatccctggaggtgatgctcctcgcactgcagcccagcaatgagctgttctgagcatttgcaaaagattgataggctacccttgatcgggtttgctaaggcaaggcagctccagagccagccatgtattttaggaggacttcacatttgtatcctttattgttatattttcagtgaatctacagctcgtaacaggctgtgccctgcagctatgaaggagtaagttccccttattggagggaaatcggtgttctgtaaaagcctgagatggggcggggagagatgaatggtgcttaaaagcactgctggcggtgccgtcatttagaacagcaactccgaggctccgaagagagtgaaaagcagggaaaggagtccttttaaagtggtgaaatttcaactgcctaaaataacaggtctccttcattgattacttcgttgaataagcatgggaggcacttaagaggcagggacagcttctgcatgggagaggagagcctgcaaaagttaagcatcttctcttcctcttatatgggaaggtgggagccacccgccatccacttccttgcacatccctctcctgcatggaatcagcacctcagctagattggcagagcccttcttttcccatgaaacctgactccaccatcaaaggcttcctattctttatcagcaaagcttgattttataattagccaaaccacaccctgggtacatctgctaagcttgggtgccttctaaccatataaaaggtgactcgctaccattaaatatcagcagtgtgctgagcgatgctttgagtttataagggtgaaaggtcactgtgcaggaaaatggaaccgtatatttgctgtgagacaggcaccaagacctcactcccatactcagttataattcatgaggctgctggtgggaagcccttttccctctgtggagttaacgcatctccactgaagcctgctgagagcaccctgcatccccaccaccatctgtgtgctcacttctgaggggagagggagacacagagagagagagagagagagagagagagagagagagagctccccccatacaatttccaagtgtacacactgtccaattgctcctgatttgtgaaggtttccagaataaagcagggctcttacctgactaagaagagaagtggatggaacaaactggtgaactctcatttagaaaagactagttggaaaagggagacacagcaatgccttaagtccacagctgacttgcgagcctgaaatctgctgtctgtcatcatttagtaagaggcaccacaggcaacctgggaacccagagatatggtgcccaagttcaccctgtcctcaggatgccttcagtcagcaggaggaatcttacatagtctgtggctctgagatgcattttctgctctctccacggacttgagccagctagtggcatgaatgcagtcctagccacacatagacagactgtgtctgtggtgacataccacccattcttgggaaccagcactggttaccttagaactacctagacctcatgtcaaagagatcggctttcttacaagcagagtgtcagggcgacggaaaagaactgcaggtcagcaaagggcttccaggcatgttctgaggtggtgagaacagggacagcattggctgtgtcctgagccacgtgctggcaggcctttgggggttctctgctctcctctctttttcctggaagcccagaggtaacaggacaggagaggacagagtatgtgatcagacatcggaacctagacccggttgttgctgggtgatcgcacatttatttataatgtttcctgatcgtgtgcctgatgtgccactgttgtactcccgtttaaaggataaatcaaagccagacctggaaaaccagcatatgattttaacagatcgggtgccatagggaacctactgtgttatagaatccagaatggtctttggatgctcaggcgccagctaatttcagaggctttggaagggccatggcaaggttagaggtcacccatgaagacagtggtacccaggggccaccttgtgtgtaattggcttgccatcccattcggctgcccgggggtgtttgtcatgtgacctctttcaccctcccagggaaaaagtagggcaggagtggctgggctagctagccaggttttcttgggtgaaagatcactttgagatgacacagccgagtagtcagcctgaattcctggttggtattttattaattttgcaccaagataaatcctgaaattctgacaaactccatgacaggtgaaattccttcttgcagaatcttctcagcgagagactgctcatttcgttctgttccgaggcaggcaacaggagggcagctttataatcagccctcaaaggacccccagccgccccagagtctcggactgattgaataactcctgggcctcttcccctaggcctccatcagcgggggtcctgtggaaagcaatctcccgcagactggcactgaagtgagctttaaaccaccattttctgctctccagaggagcctggagtactaaaagatagatggactgcagatattttatgagaaactgtcagaagaagagcagagtaaatgtttttttcttcttctttgagtcacacactccatcactgttgaatttctcccagcctccttttacatttaaagtacgaaattaattggttgctaacctttcgttcccccttccctcttcgtcgttgtcttcctcctcctcctcctcctcgaggtttttttttttttcttaaatattcacacagaggccctttgcttaaccacagttgtagaaaatcagtaccatttgcaatgaaatatttataatgacagaatgaaaaattggattcattttctggactgcagccgaacagtctgcaacttcgcgcaagtaccgttgcctgtccctccttcctccctttcacaggagtcatttctaaaacatagctcatgtccatttacctatgtgctggaggggtgcctaccaaagcacagagcctggccccactcttaaaaatacagagaggaaagagcagggcggatttgcgttagggctgctgcagagggagctggaggacttggcccacacgggtggagaggatttgagctcccatctgaaggaagggcagcaagtttcccagactagggaagcggtggggcttgaactttgtagcacacactgtcataaggatcagcctcgatgtcttatcttggggcagatttaaagggatctatcttgttctcctcttttagggttagctgtgacccacacctctcagggtgactctctgtttgctcgctgctccaggcctggccctttgcctttcatccctcagaagtcagagacaaagggttgtgttagaactgccccagattacattgcaggacagccatccctgcctgcgctaatctgggtaggagaggggtcatttcttctgttttcaggatcccattggctgtatatcaaggaccctgtagtgaatcccagtctcccaaataagttttcactccatacactgtatagaatcacttagctgtctcttcaggctccattgctaggtacaataagggattacagcccatctaggcaacccttcccaggctttcagcccagccctcaatgctggccttgaattcattctcttttggaagactgggcttaattagttagcagtgtttcattttgatggttttccacaagtgaaaacagtttctagtactttcaaaacatgaataaaaacagctgtgaattgagatcttcaaggtttcaggcccttcatcacgcatcactggctccacaagatcaataatccatattttattatataataaaggctgtctataattgaattagctcattcactccatttgattagccccagttcattcatggagaggataaaaagaatgcacacatacctccatatattatattatttggatgcaaagagcttgagaattggtttcaatattgtttttccagggggtagtatgactcacagcccatgcatgtggggatggtagcgttaagtctgtcctgccgataacccaacgtgggtactgtataataggtctcccttcggaccaagatcaatcccactctaaaattctgaaagacaattgagatggtctttgtttggggttttgttttctttttatctacaatccttccccctaagatcattttctcttatccacccgaagactgtaatttggggcctctgtgattgcttactctgaagcaaaagttagcaccagtttagtaagagcacctagtgggaaaggtgacctgtcatttactcttgggctctctcaggacagggctctagtacaaccgtgtgctctgtccgctctcgcagagtcttgctgtttgtatataagctacaagatttgtcttcacattgcttttcatatatatacattttatacatagagagagaatatatactagaatctgctgacagttcagcaccagatgatgtgtgctgtaacacaggctgccttgtagctctagaatctcgcctgaagatattttactgtggtgtttcctggactttgattcagcagcgaaaggaggttttcttgcgtgtgtacattttaggatgctagtgccgttttcttcctgcaccgtgcgtgaatgtgaaaaattgtcttccttgacccttatttctcttccccccttaggggccaagatttaaggggaaatcttttttaacattaacattcgttttgaaacagtttaaccaagtctaagtatatactcaagtaaatggaagctgtaatagtggagtgtagagaatcaatctccttgcaggccagaaaaggaacattgaacagtgttcattcatgtactgccagatgtatttctgcatgtgacacggcttgcccgaccgctttgagtgattttcagtgttactaggcaggctggcaagagcaccaggcctcctgacagaagtaaagagccgcgcagcccaagtgcttggtgaaggaaggttgcacagggaaccagagtatcagaaagagaagcaccccacctcagcctccatgtcagtgcctgtgatcacaagcccctgtgtctatttcccctcctgcccagaaccctctgtgctgtggctggtttgcatttgtgtttgaagtgccaggcagtttaatgaagttattcttttataaattttgcaacactgaagcaagcatgagggctttaaattagaataagtgccacttgtgtgtggcaggtccctcggaggactgatgagagtgaggcctcccggtgcctgggcctttcttcatggcggtgcggatctgttgtgcttgtttacgaggctcacctttgaatttgtgtgagctgctctgtggctgctgcctagccctctgctaagagactgtctttcttccaggatcatgttaaatacttcacattaaagagtgctttttttaattatattgctttattgtaatgaattcaaattaacttggaggagcaaattgtataaggacgtgaaggttatagattgctctctccatagttacagcacacctctgtgtgaagggattaaagggcggcctctctggtagctcagaatacttggaggggtgaggagactgtcacagaccaagaagcaaagcagaaaaggcgcccaaaagtggcatgagaggaggaacgtcacatggtgttcttagaaaccaagtctctttggtggaagacactgctgtcattttaatgatcagaaataccctagcagaagtggtgtgcaagtgacagtataagaatactatacttccttagagactaagacagaatggccagatatctctcagtgattgagggtgcttgccacagagcctgagggcctgagctccatccctggggaatgcactcggtggaagggagaagcaactccacgaagctgtcttctgacccttagctggcctcctggcccactagaggtttcttctcttggtttctctgtgagctgtttaaaaacaaaattgggttcagcggatgcaaaggagacttccagaacggggtcctgatgctgtcttaagcatagaaaaagatacagagaagggaagagagacaggggacgatgcaaaggagacttccagaacggggtcctgatgctgtcttaagcatagagaacggtacagagaagggaagagagacaggggaggaatgagggtggtgggagcatgacaatgcagaccttcttaaccaggaatttttgcttgatgtggaaaacattcaaatattacactggggctatgacatgtttgcactttcaaagaatttgctcacaatctcaaataaagcctcttttgggacttccttaagtggcacccccatctcagacagttccagaagggctgaaagatctgaagaggaagcagagcccatgcctgaatgtaactcattctctacatagcacaggcttgcttgcttgggcatggaaatgcacacataatctcagggtatggctcacattcgacactgcttaacaatagcagtcgataagttatattttgacatactagacagctgtttggttgctgatggtaagcaaacagattttctgttatctttgatgaattatagtgtatttgactcacacttagagagtgtggcaatgttataattgagaacaagagagggctggagaaatggctccctggcaagagcacttgtcgtgcaagcatggtgatgtgagttcagctcttctgctgccatgaaaaagctggtgtatatctgtgcacctgtagccctagtgacagaaggaggagcctgaggagcaccagcctggctgaaaagaatggtgtgccctgagggcagtgagacactgtctcagaggtatcaggctaaacacctgatgtcactttctggcttctgcacacgctggagcacacacgggccttggagccttggaaccttggagtgcactctcaagagcgcacacacacggggggcgggggggacatactttgcctcctttttcacaattactggaattcagtggaagggaacccctgtcctatgaaattgaaaggcagagagtcacggcccctccttctcaaaaaggttaccctttgaatataaattaccggagcgggtgcctttccttctaatcagatgaccttttgaaactgatgaaccagagtttaaatcctaaggctgccagtcagtttttaaatcaatgcctggctccagcacccttcagaacctaactggatctcagtggatcgcttacgcagaagggccacacacggagcttggaggaatgttatagctgattgtggggcagcccaacttgattgtaagatcttgggccaaggagagtgacaaggacttacttcaccaagtcctctttttaaaaaaaataaaaattagaaaacaatccttccaggattcaaaaacctaaaaccagagggagtcaccacatatctgcaatgcttgtaagagggcatttctgagcaattatcaatctaagataattatttgttgctaattactacacaagcctattaaatattcagcagaagtttgtttaattgtgttggagtggggaagaggtgcctgagcatagctcgagcgtggcgagccagtggtgtgcactctagagcctggtagagaggaaatttgtgtttgcccaagattaatacattaacatcaggcaagcctctccccctccttgcacagttatttatctttgaggtattaaaattgaagcacgatgaagggggcactgttcacggatgtaaacttgggaagaggtcattcttaatcttgtttacagatgctctggtttagaagggaccagtgtgataaattaaacattacagtggaaacaattaaagcctagctacaagtggtacatgcacacatctgtgtgtgaagagctgacctaatccctgaatatcttactagacagtattgcccattaaagccttctgtcccctaacacactgagactgtcattccagaggggaggcaaaatcatcatagcctgggccccctcctttctgctttgtatactatgattgcaatttcctgttggcttcttgcatgtaaacaggtagctcaatttgttgattgcttgcaaaaaacaagagagagaaatgaactttatgcttttaacatatttcccagcgaccacttttgtgcgtgttcttccaatctggaactttctgtgaatctcaatgcaaactattgtgagttcaaaagagaaaagtagttttttgggttttattttttaatttttttattgtgttgtgttagagaggcacagacagatgacagacagacagacagacacttccatgccatggtgcacattttgggatcagaggatattggttcatttgagacatggactagtttatcacaggtggctgcttcagggtttgggtatcgaatttgggaactcacacttagaacacatgcaaatactcccaatgcatctatatctccagacctacaaacagtcttcaggcctctccagaatgcaaaccaggtagaaatcagcattaaaccaaaactgtacgattcttttaaaggtcttcctggaaaatggaattgtgatcatgctaacattgcccatttgtagcccagcaatataatttggccttttaggtggcttgttttattcctctatactgtttaattgtcaaaatactggaaattattatatgttctgacttcaaagttgcattatttaactaattagtctttgcttctgaagacttacattaaactaagtcccaaatgattagctgtgtgttcatgctacattataaaccactgaaattttccagattggttaaatattgcttgcttgtttgtttgttttaaagaaaaagcaaaatgtgagttcatgcagtgatcccagaatttaggaggcaggatcaggaaggccaggttattactgtcagctgcatagttttcggccagtctgagttataagagacccttcctgaaaacaaacaaacaaaaaatgtaatgtgttgaacatcaccactttccaaactgacagacaccttacctgtccccacagcagtttaagcccaccaaatcctgtgatgtctaagagctctgggtttttctgtggcactcatttttgcccgtgttccttgccctctttaccacttcaagccacaggtatgcgtagattctctaaaaagtcagcttacagaccctcacagaaggcagagggtctttgctctcctccctttgaaccttgtctccctgataggcggtatgagcaatagccagatgaacatccttagtctcttaagagacgcccaccaggcactttctcttcggtcctcccttactggaaactacactttcctttttatgctacatctcatacacaggtacattaatccctaccagcaaaggtaaaaccagtggcagtggttgctctggggtttttttcaaagcagacattcattttcacacccaaaatagtaactttcacagcttcattcccaaggcactttagacactgtgacaacctgagcatccggaagtactgttgtttccttgccctagtgtgaaccatctttgctgtttgtagagtgaacatttctggagtgatgtagttccacccactaatagtgccacttataatatatcctcaaaggatcctttgcagaatttctggacacttgcccacactcatcctgtggcactattttaaaaagtcatgcagtgcagtcctgtatatttgtgtgtgtgtgtctttgtgtggacatacgttattttcataagacgaaggacatatcccacagactgagagcaagtagcacacctgaggatggacagacagcatggcagactcatatatttcaggacagagacaaatcaaaacccccaacttgatcatatctcagtaaacttctctgtgcaaatacaggccaacagcaagggctcttagtggccactgctccacactgcatcaagacacaccaggaaaggtaagctctgaaggcagaccaatacaaaaatcataaacgtaaaacatcggggagctttcttgtgatgtgggttttgtgacttgattatgtggatctcaggcatgaactttagacattacagcatcccctctcagtatctgaatgtgacacaccataggccaacatgtctacatgtctcctttgcccatggatcaaaggctttcttcttgaaagttaacagtagttgaatactagatcttccttttctccaactctctcatttattcatgcacaaatgttttccaaatagcatgaggcaatggtcccctacgaagagggatttctcccacttggagaggtgtagtaatgtctggggacaaacattgcagtataaactaatacactttctatggtgaccagtaacaccatgactacaaccagcaaagctgaggttaaaaaccttgtagtaaggcaagccatattggcgttatgggatcctctgcaggctctttcatatccagcataggaatggtatctgtccatctgtccatctaacaggaaagacttctctgcctcatctccagcttcctgcacacacttctgagcatcagcacatggacttgttgtttctcccatactgtaggatcagcacaactcagctctcctaggctcattaacactaacctccaaagagcaacacaaatatgtccttcagtcagtttcacctgaaagctaactctttttctatgaaaaatatgattaaaaactttagtgccaggattgtttgaagaacaggcctaaagcctgaggtcaatgaaacaattctccccttgccaggttagacactctcacaggatggtccttttctgtctgttatagcatgtttctgatcatttctggtgattccatttcacctttgttttactataattcaatataagtagtgtcacccagaggtgctctgagatgtcagcccaggtccatgtgagctgctaaatctcaaaagaaaaggcagcagcatctctgcatgttcatggtgataacagaactgcatatgaaacaatagagaacttctgtcactgcaaacacggtcagaacggcagaatctgtggcattaaagaggggcagaggcgggtcgtgatagatgggttcagaaatgccacctccacgtgacaatagaaaagtagtgcctccttatctaataaattcttcaaatgagttcatgagttcgctttcttggtatgagaaatctactttgtgtgttgatacgttgtcttttttacttactttctctttggtcatcaaatcactgagggaaaaatagcacatataaaagaacatccgctgatatatgtcatgaaaatgtgcaagctcaccaccatgttcctgatgtttcccaggtagggtctgtgaaaacactatgctgtaggctttctccatgtaggaaatgtacactgaccactctaagtaggcaaatgggtttcaaagcaatgttggttggttctggtctttgatgcaactcttagtacattctgttgctactcccagggttaagggggattgattcattcagatttaaatgtataagaatgtctgattgtgtgggctctgaaggcatttccttattaacattcctcccctgttgacctcattaacatatttgaggggcaccctttgcctttgggactgttttttccctccatctttcagggtctatagccccacaccctgtcatcactccctgtatacacgttcaaaactattttactagcagagaagaagttaggaatggaaaagagagagggtagaaatgtaaaactcttgattagaaagtataatttaatagaacatgtattgaaccaaatgtattgattaatgtagaagatatagtacttatattgattcgacccagagatttagtactaaaagctctaagccaaaaagctgttgcagattgctacaaaagtcagtttaatgctgtccttggaatgccttcagaaagaaattcttctaatgtttgaggactaggtagaatgcggtatatgtcagcctgatcccacggggttttattctgtactctaatagctgttacgagcctacattatatccaaggagtaattttccttagaggtgcccagctcgctttgtgtcaatatgctagcattttaagtcacgtacagtatatgcttctgggaacagggaaggagccagccagactcataaaggcctgcattcattaataaaggcagaggcttctgtccctccattgcccactgcagggaaggctctctggccttcggggaccctgtacagacacatttaaaggaagctctattttgagtgggcaggagatgaaatgtatgacttggaggtatttcttaagccagctctgtgcccgagcacaggggtgaccttctgggtcaaagaagaaggcaggtcaaaaagacttattatcctgcctgttggaaaccaattgcttttgttttaaaataaataaataaataatgaaaaagcaggggtgcttaaaggtggacagtgatatagaattcagtttaccacctgaaaagaaagctagcaaccgtgtgtgtgaaccggaacgtgcttctaagaaaaatgggaggatactgattagcctctgtgtttacagataaagggccagcccaagtgataaagggaagagtaatataattagttaatcagcgaagattgattgtaatgtttgtgttctccaactaaagggaaaaaaaccaacatgttaccacagccttgtcaccatctgttgaagacacagctacactcgatctttacgttcctgtgggttttttatttcctgccttgctttgtctctgagctctgattgtaccagtctgaaagcatctcatttaaacagaatccaaccatggtgtaaactgactgcgcagggccttgggggagagaacgctcctccttgtctttcttctttcctcctcttcagtcccttttttaaaaacataatatgctggctctctcccagcccttggagcttgcctatatttgttttggcagaaaggagccataaataggtacgtcatgctttaaaggaaaagatttacatctttgaatcaacagattttttttttttttacacaaccccgtcaaatgttcttcccttactgttgccacgtacctttgcagtggtgttgacaccactgagagcagagatacagcacttgctgagaaccagtgaagtccagacaatctgggggcatcgcttttttggggtggaaatgaaatttttcagattctcccttcaaagggtgacttttatcatggttctaggcacattagatcatctcagaactgcaaggtgaacagcttcagagggtcctggggggttatttttatttttattaaaaaagaataactgttttccttggaatacgtttaaaataggattaaacagtttgaccagcaaatgtggtcagctcttggagttaatcatttgttggagtgccaagcctaaaatgagaattccagtcttctaaaatggaaggctcacatttaaaatgtctcacattaaaaagacatccatggtgctgggggtggggcactgcttaaggccatcatctgttttttagcttcttagtttaatttcacattcacgggggtgggagggagaactcacacactcctccaaacaggtcctttacaatgaggagagtgttctagaatcctttctgttaaagtatcaggcctagatagatcttcttttaggctttaaggtatgtcgtgagtttgactttttttttctttaacacaaacccccctcgtgtaaaacaactgttcataactgggattaatggttttcaatttccagttacttagacatggggtctccaggagatggctttttgcagagtagagtatggctctctgtgggattgtgcaagttttcttctcttccacttccttttctgtcaccgcccccccccccacctccaccaatgtttctctgatgttcctctcgattatgtaaaacactttgccttcattggaacagatattttttctcataacctgtcattgcattaaagtgctttggggactgtgaattgctgtgtaaaattggtgagattacccattgctttgttctagtgaagtggtttcctcagacctatggcgctccacccgctgcacaggagacggggctgttggggaaggctgcgggtgctttttcctctctggtcttcatctctgtgcctcaggactagctgtgccctgtggccccgcttccagggcagcaatgcaccatgctgcctggcctcccctcagctcccagcttctggcgtctacatcacatctttccacttgcttcttggaggtcttgccccgcacacagtgtctagaattttcttaaaagcacgaaagtcactgagcacttacatgggaagatgtgtttcccttccaaagagacagccgaggccacatctggagactgactttgtgtttgtcttcacccacacttacaagacaatcgaatgaatgtgtggctcagacacaccatctgtccttccgcctcacaccactcgtactttcggtggacttgggacagggtgcgagtgcaggaagcagaaacatcccagggattctcaaaggcaatcccttgagtgtaacagaaacatctggaatctctctcccccactccaacagaaatatgcccatttcccatggacctctggggatatgcctccttccctctatgagaattgctgtcggtgttgggcagccaggactggaggaaaactttattgggctggagccaaaaaagggaaactgactgtggtagtcaatattgatgtcaagttgacaggtactaaaatcacctaggagataagtgctggacacacctgggatgggggtgggggtggggatcgtctagattagcttaacttctgtgcatgcttatgaggcattatgtagagaggttaattaaggtgagaagacccacaggaatgattggcagcattattctgtcggctgggatcctagatgggatagaaaggggaaagccagctgagcacgagtattctattcattgctttctgcctcctaactatggatgccacataagcagccaccgcaaaccctggcttcgaggagttcctagtagtgatggactgtatccccaggctgtgtgggagccaaaataaaccacccttccttaagttccttttgtcagtccctttacttcagcagcacgacagttttaatatggtgagggtgacagttttccatgtgttcaggcatctccagctcgtgtttcttcatctcttctattgatgagacacaccatggatctttatttggtagacacttgtatttccccaacctgcttttgtcccgtttcaggaaatgtttttttatctgcttctcttaaccttcagagcataagtcctttgtatcaatgacttcgatatactgcaataatgtgattaaaatatatatacatatatattttcagaagtgtaaatatttagtgtgattgttagcaactaatctgtacctctgtctattggggggtgggggagtatgagccacattaggaaacttaggaataacatgataaagataagactattgacttatttcttttttaaaaaagatttatttttattattatacataagagcactgtagctgtcttcagacacatcaaaagagggtgttagctctcattatggatggttgtgaaccaccatgtggttgctgggaattgaactcaggacctttggaagggcagtgctcttagcccatgagccatctcgccagcccgagtaatttcttttttaaacattaattggaggaaaaacaaagcactaaccatcgcctgtcagtagcccgcacttagctacctagtgtcctggcttcttttagttctttcacttcataattctcttttaggttctttttgttttgttttgttttgttttgagtccagacctttctctgaaaccacttttgacttcgagataacaaaagaagcagtatagtttggggttttaactttttgtaatgtatgtaaccctctaatcatagctgtgtggatctttaagaaaataggaaagctttttgttcccaccagtatttttaatatgttttcagaaaaacacctcccagacatatttaaaatcaatacccagacaaaaggtttggcatgaaaatagtttactcttaaatgcacttttaggccaggactactagagagaaagccatccttttgatgagaatgtagcaaagatgttctacataagctcacaataaaacaaagctgccttctctcattttttgcagtttgggctctagcccaaggtgggtaatgccagacccccccccctcccccagtcatgactgtccatcacacagtaattgtggtgggaagggacctagtcccactgtccatctccttcaccagaagctaaatctgaaacagggaagagagctaggcccctccatccctctccattgcctcgctagtgtgacagcctcaggatggcgttatcagcctcccagcctttggtcatgcagcctgaacaagtggctggctagccatccatcctctcagggatggatgctaaaggcaacaaagacttcacaaagtgttctgcttcaaatactattttaactcctctctgtatgtatgaccaattctgaacttgttagtgatgttttaaatcccctcataatattgtctaaactaccattcatttgtgtttccatgcagtagtcatgcttctaagccctctaaaagatcttagccagtcagaataggcacacatgcacatgtgcagaaaacacacaggctcacacacacacattcttgctttgttgtcttcaccatggcctatgcttcagcctacagtgacctcctggggtctctctcatgtttttagcctcagtgaaaacattatcttactacctgctgcagcaaagccttccctggtgatgaggcaggcctgggaaaagctgtggcatttctgtgtttcttcccattattttttgatcatatcactgaattgtcatatgcctacatggttttcttctttggatcatgagaactttaatgagctcaagacagaagctatgcctcttcccatatcccatatacagttggtaaggtcctctctactgagcactaagtgctgtgggccctaccatgtattgatagcagcattccacaggttcttatgaagatacaacaaaactaccatcttgaggccaggaggctttggaaagtcagagaaaaaggaaatgtgttttaggatacccatttgaggatgggtagagccctaccctggcaatcaacatttaccatctcttagagattagactaaattgtggtttttaaaaaaaaatgggaatgatgcacaggtcaagacactgttttaaaactgttttaacagtggtaccctggtgattgaagcatgggtggtgttaaagaggtggtactgggtgggagggtatttggagaaggcgtggcaggtagagaaaagttatggtactaccaagccctcccctcacagaaccttctggtccagcctctcctacctcttcatggagaggagttcacgtcagtgtacccatactcaccccaggcctttcacctcatctgaatctccctggtgccgtaaagcaccaatgcagcatccatccctgtgcagaaacagcgcagttcacggcaccggggactaccagcatgtatctctgctcactccaatggcaagactatcactgaagctttctccctcttttttctccacagaatcatacgatgactcagcacagcagttagttcatgtatgcacggcctctcaaggagaaggacttttgtggcacaaaaagggaacatgttttactctttgcacgaaactcccattgttaatgtatactcttcagaagcattgtattgtatcatacaacgtgtactatcaaaactgttggatgttcatgtgttggaacttttgagcaccagatagacagactccttgtatataaagtgttgcacatgtattatgtcgtcgatgctaaaatggtcttataaagacaagtggacttgggccctattcaggcaagattttcaaagtgaacaaaatggcttaagagaaaatgttttcaaggaagacagaacttaaatgaactgttctcatgtgactatggttggacttccttttatgtacacttaagcctagaatttctcttttggtatatcaatggttaaaacccaagactattttttactgctggagattctcgtgaactatgaagagacattctcacagaacagaaccccacatctggatacggcccatatatatatttgtaagccttgcagtgtgacaggtagcctcaccatatatgcaatagttgttatgtagactgtcaaagatttttttttcctggctacatttgaagctttgagtgttcaaggttttccttaatgatttcacacagccaaattcttgaatcagttgaactaacctgtatgttactgctctcaatgtttaccctgcggcctgaacctggagattactggaattgttttccaagaggaaataaattcagtttaccatcagctgtgagtgtatttgtgtgttttccttttctagttagtcttaccattaagaaagaaagcaagaaaaggaaatctaatgcctgcacccttggctatgaaacttgctccagagctgattgcaggcatagcctcaatcatatttaaccttagcacaccgggccagatgcagctgggaagagatccatcatgcggcacaggaagaaagcagacccagtctatttgaactgtcttagatctaccaggtcacattgtacttgaagagtctgacatcacagatggatgtgatggctgttttctgcataatttgcagcccaattcacatcatgctgtgcagatctgaactcgtggtggatgactgcaattggagcggctgtttggcttatgtgtacttaagaagcagcgtcgttccaaagacaaagtgcagagcatcatcgagtcagagggctgttagttctgcttctgctgccgactcccagtggagccttctccaaatggcttcatctcctggcctgggatcacccgaccagggaaggtaatggaacttggtcatcagcctttcgacagggaggagatggctctatgagatgccttccgcagcctaccacaaaatgctgaaaaagagaagcccctgatttcagagctttttgtgcaattttttaaagatgagaagggtggcattgtgtgccctggaccttgatagacgtcattagtctgagtagtgtaagtatgaactccacactcacggagcgcattcatggcatcgtgcttaaaatggttaccacactctgagtcctatgacctcttttaaacttggaagatctcaagcaaatagcaataatcaccacagaactttgaggtaagaaaaatgcaacctggactgatggatgtgtgaccccttgtcaccaatggactagcctgtgacagccacatctccagcatcacaacgcagggtcactgccccatggttctaacccttaacctccttgacattcccttgcaggacttgcttgttacatcttggcgtgctggtccctgaagcctcaagcttgggctctcctaagaatttctgggtaatgctggttgcagaccacactttgagaaccactaccctacctcattcacaagtcatggaatgaaccaagtgtgaataaccaagcacatgatattatttgttgtgttttcaataaaaaaatttttttaaatcttttgtcaaatttgaatatcattcatgaatgagtattttgtagtgattaaggtatgcacacctgctataaagtttcatgtgagtgtgtgtttagctttttaattcatgggaaacctacacctatacctttcacaatggattgccagcatgctatttaattaaaaagctctttcactggcgacataaataatgaagtatgcttagaatatgcaagtgcatccataattaaaatactcagctatatttttaaaaaaattaagatctctagcctcttcaggattttgcgcttaagatgaaatagccacacgtaataatgattttttaaaagctttacatttttgggttattaatgagagggttatatttttataaaaggaagctgttggtttatggaaagcaggtgatgtattatccctgggttgatcctcagttgcccttaatatcattgcctttagagaccacctaggtttgtggcaaaccccagggcttggaattctcgggaagcaagagagacagagatatccactctagcagtacaaatggctggctgtgtggcagcctcatcacaggcatgggtcagcctcccatgagactcagctgggaagtgagatgggttgtccactgttcatgccacaaaaactggttgatcctccaaagactatagtgcactttctatcttgtagacccttcttccttggagccagtcttctttagatgataaatgctaaacagtgctcagacaatcacttccagccagctttgataagttatcttctttatatttatattcttccccatcccataaggctggaatacaacatgaagattaataagaataccagtgtgtgcattatttttatgtagctatgatcaaatgactgatataaagacctaagcgagggaagaaagatggatttgagctcttggtttcagagtgtttgttttgtgtccatttggtctcctgtgcttagacagatattgtggtggacagggtgagtagcagaggagagctgtatacttcctggctgaccaggaaacagaacgagagtagaagtagccatgaatactgtgctcccaagagtctgcctctgatgtcatacttcctcagttcagtcccacttgtaaagtttctaaaacctcccaaagtagtgccatcagctgggctgaggaccaagtgtctatagtccccaggagtctataggcaacattgcatactccagccataaaagccaccattatgggaaatctcagaggagaatgggggggggcagtagttgcctggtttatgcttcaattctgcttttgaggccatttcagcattgacttggagcttcctggcagtaaaggggggaaacaacctgaatgaaaggaatgtattagtttctcaagagaacctgttttcctagtacttaataccaaaagagatttctaaaaggccttagatctgggtaggggaccaatataatggccctctttgtgactgtagttctgtgacagaaggcagtgggttttgtgtggaaggtggctcctgtatgtgtgagaaaccaggatgtgactacttgtcctccagtacacaagacaggcacagaacaaagcatgacctgccccaaatgtcagtcagtgctaggctgtgaagctgctctaatggagaaggccatgtgatttttgttccccgactcccatggtctctacttgctttaagtttggaatcacaggggcatgtcaaacaaggctattgttggagtcccatccctgaaagtcaagctgggtgtcagaagcacccacagtgactccaggagtcaagtgtaagaaccacgttcaagcatacaacctcaggagagtgggttgagctcaggactataggagtagagtgtggaatgaggcctatgtgcccttcacttggtgtcaccttttacaactaagcatcttaactattgttttaaccctcaattaatgtagcaactaggtaacattgtaagtgtaaagggaagaaatgactttggagtccattattcttatcctggtccagagattacgaatttggccagtaagatctagtcccctgagatctctgacagcctgggaggtcctgttcagggcatgggactcctgatactggattgttcatgtctccagagccagcatcagctgtggtggttatgtgctatgttctagtttccaaatattgacaatcccttctgcttcttgtaattccgactgtattagcccccactgtgtggaccataggagatacactgcatgccaggcctgatttccaggttgctagctttgacctctagtattattagcctttttcctaattctcgttccatctctctttagacagtcatatgagttgcgcatgttagcattcgtatgatgctgcttttatagttattatgtgcaaatttgaagttgccgtgtgactttcatcatcacacatgagtgtaagcagcagttaactagatgtgtgttctgtctagcctgcttccaaccctggtcaggaaagggttcaagtgctgaatggtaataacagaaattaagattatctgatgcaagtcaaatctgctgtcttctaataaactggagacccatttgtgaatctttggaaatcaaacaaatgggtgatagggtcaaaattttaccttgattcctgataaacataatgggtgtctcagcccagatggactgtcacggcaccatctctaagcctggcttctcagaccagtgctgagtctgtttcagaactggactaaggaatctagggaaccctcaactgctactccacagagtgggacagcgttgacttggtgtctgtttatgcctgttgggcacagcgcagcagaaccctggagaaaggaagtgtagaaatccagatcccattaccgaacacctgcaaaccctcctccgtttagcatcggcagcccaaagcctcttacctcctccctcttcaggaggaagtttccactaaaggcactaaaaacaagagttcaaggaagagggatgtgcctagataaaaaggacccagcaggagtctctggtagtggccaaagtgcagctccagtaagcacctcatttctgggtgagagcctcagaggcaggagtagcctccaccaccactccagattcctttgtaatgaagtcagctgtcaactcctgagggggaaaggcacagagcccctttatttccaagcaggtgttgcagcatattaaaggttgcattccatcttgcgctcacatcctgaacgagccagtttgcaggcaagctcggttctttctgcaaagagagaaacttggcaatgatggaggctgaatacttaaatggcaatcaacttctggctcgtatcaattaattccttcatggacttctgcctaagtatagcatcttgaattcccagctgtggacgctatgaaaaacaacccgagcaacacatgccaccatctcggaaaagccacaccagtaaagggaagggacgatgggcaagccacctctgggtccccatgaatgctgatgtgggactcttgtcttttgttcacctgtgttgtacagcacagtgcatatactcattcctctgggtgggaaatacatcaagaaaaagtttagtaactttatgtgaaatctctcagaagccttatcttggctctgaaatttgcagatccaagcggaatgtgaggttcagaaatgagtagaaaatatctcctcacttaggaaccagagaaacctgtgtaaaatagttttcatcttgagagatctgccacagacacctctgcgtctatgttctgtgatctaggagcactttaatcaggagccatggcaggctgagggtgagtgtgtacattgcccctgagagctgccaattcttcacttcatctggcacctgcagacagtgcaatccagaccacaccatctacatcggggaatgggaatgttagatgcatcataactcaggtaagctctccacaactaatgttctaatagtgagactggctacagggtgcaaccaatggacgtcaaggtcacagagcagggcccctagctcatcatcctgcccctgccaatgagtcaccactggctttctgatgtccttgcctgaatcagaagaaacatagagttgcctcccacagaaggcctttgattttatgagagtcacatcctgtcgcatcctgtcagaggtgggagccttccagactatttaagtgtcatggaatgatgaggagagatacttcatttggtaaagcacatgcatgactagaatttgatccccagaaccaaagtaaagaagtagcatgttcatgcacacacttgtaatcccaaagctacagaaggggaaaggaaaaatccctacagatctctggccagctaacctcacctaatcggtgagttcaaggccagggagggattcttttttgaaaaagcaaggtgaattgcacttgaggagtaccagagtgaccctgggatcctgtacatatgcacatatatgtgaatatgcacacatgcacatatgtatacatgtacaaatagaaactttagaaaaagataaataacatgactactttaattagcttaaatggagttctaaaatttagctctttactctcactggaggaatacttcatttgctcagttatcaaaataacattcataactcctatgtgcccacacagactcttgttgggcagttggacagttctaatctatccctcccaccttcgtcccttcagtatataaaatgcctcttcagctagctcactcttcctgtctcagtatctttctcctatcttcagctttcattctgtatttatgtatttaaatgtatgcacatttacacaacatacatatatggatatatatgtgtgtgtacacacacacacacacacacacacacacacacacacacacatatatatatcccatatcctcccaggacttttttctgcttgattttcttccaaatttctgtttgtggtctgtttccacttcctccccttcctgcctgttgcctctcctgcagtcttatgttctttagtctatcaatattctttactgagagtgtgtgttccaaggtcacttgtgatggcctcagcaaccagtcattcttggtcattttgtttattagttgatacttctgctcccatcctcctgcctagctcccagattctttcttgaaaacactctaattccaggtcgttcacatacattaacattccacttcacttcacttcttagcttctagccctgctctattccatcctatatatggccatcatttactcaacaaaaaacgtatcttatatcactttctcatccaggaagtacctaaggctcctgatgtaatataataaagggaaaagatcaacctgaaagttttctctgctacttaccagtcgtgtataccaaatcccttctcttcggacgtgacttcgcccagctttagtttgagggataggtaaacttacaagatactgcagcattttttctagtatttcatcaagggctagaaatacttgaaacaaaatagatgtgatgtactagagatgtatttactccagactctccttaggccagttttagtgtcactgccctttctacattgaacttcagaccactcccattcctctgtgtctttcatttctaatcttttctaaagagactctccttatcaaattgcctgccttgagaagcttaaataataattgtatccaccacaagcagttgaatattcctttgactttctggaggaatagcttaattgctggtttagttactgctctatcactgtgacaaacatcatgaccaaggtgactttcagaagggagaattcattctcccttacaggtccagagggagagtccacaatagtggggaaggcgtggccaaaggcagccagaagaggaagcagagggcacatctcccaccacaagcagaaagcagacagagcaaatgaaaatgaggcttggctgtgaattctccaagtccacccttcagtgatatccttcctccaataagtctgcacccctttagttcccccaacaggaacagcagctgagaaccaagtgttcagatgcctggactaagagggacctctctctttcaaacaaccatgtttgctctcctcaactttcccaggctggtagctcactcaacctcaacctgtttcaagctttggcagagtgagttactcttttcactattcccacctctctgctctcactctttcttccaccctctcctcttacctcaggtctgtcctgttttctggacccagattaactttctcttcctccataaagctcctgctaagctgccttggaaactagaaatcaagttttttcttcctatctgtattgtttttctttaaaaggtacaagagatctctctgtacgttgtcctctctcctctcccttattgtttgtgtggttgtttggtttggatcaacaggatttcacataccccagaccccaggaccttgatatatagttgaggaagaccttaaccctctaagtttccacttcctgtgtgtgccaccataacttgtctgtacagcgctgaagataaaaatcagagcctgtccacattgggtaggcattctgctaattcaactgcatctcaactctctctgtgtcttaccccacttttgggggttccacctcatgcaagagcaataaaacatcgatgaattcatattttagtttatcaccctcagttcaccaaagttcaacacacataggctatggtgcctctccagtccaggtccagatgacagagaaatacttctccatcctctgccaagtgcaaaggacagggtttgggtcctgtgctgtgtcttgtgctgatggttgatgataaatgaaaacataggtgtgttgttaccctaacaattacacatccctgactgggtcctcttccctacaccatgacatggagcagaacacattctaatagtcacagggatgattaaagttcaatatgtgcataccatttcatatcaacttcaggttaaaaaaaatcattaagttgagccatgttaagtcaggatcagttacgtggaaatttagtctctgccttttctctgggtctgctacttgcccctgatcttctgaatatgaagaagacatgtgagtaagcacagataattctctttaagatcatagagcagcatattcaaaaagccttccacaggctctatgccccagtgtaggggaatgccagggccaggaacgggaagggggtgggttggggagcagggggatggaggaggggataggggcgttcagaggggaaaacaggaaaggggataacatttgaaatgtaaaaaaagaaaatatctaataaaaaaaactttaaaaaacgaaaaaagaaagagccaaaaacaaacaaacaaaaaaacaaacaaaaacaaaaaacaaaacaacaacaacagcaacaacaaaaacaaaatgccttcctctttggtccactagataccaatgatttcatccagggagtttagtaccaaaattctgcaatgatctcctccatgatcagcagctggctgtaggacagaaaatgaactagtcatggcccacagcagacagaacactgtttcttctatcaccaataggaggatcttgtggtagatgaaatcaggctgcccatattcaatattcagcacagagattaaaacagcattcaaaaccaagtctaaaaaagtgctggatacatatgtaaatccgggcgttgttatcccattcctttctcaaagcaacaaaaatgttggctgtgattgcagataataagagctttccttctgatgaaatgagagtatactgaacagagcacacagtatattcccatgacaaatatatttacactcaactcagaacatggagagaaaagaaaatgtcaatagttgacagcttcttggcctatggggtgtaatccaggagcataataaattcatttaagcttggtgttgaataaatgcatgttacagccatgcatttttttggcctttccctcgacacattgtttgaatacaatgtcacgtttctcttcatgttacctgatccttgggttgctgtcagcagagacatggaccaagctaatcttttgggtcaaatctgcagtaatttcccccaaagatgggaacaagaaaaggataccatgaaagaaaatattttattgccaaatgtaggtatattaactatttcacatttaggatatatacctcacaaatgccagctgatgggaggctgcagagttcaaaagcaagatgtattgtcacagaagatcttaatcacattgataaacagataagaagaaccaagagaacacaaactgcatgaaaggacacctcaatttagaagctaaatatgtatttctccctgccagtatatctcttgtctcatacaaattggatgtgaagataatatccctccctggcagacctcagaagctatcaaacattttaggctttgtgtgtgaaagcatgacatattggttaagactcaaaatagcatgttgctagtagagttcaagtgtgtaagaaatactacaccccactgttttcataagctctggagttccattgagttgagacagatggtagcaggcaaagacgcaatcttaccatcaaaagctaaaatatgtcaaaaatatgttagcaagcaaaatagagcagatcacttgcttcgcatgtcgcgacagcttgcaaaacatgttagggtattgaagctctggttatgtaaatagaaagaacagcaagcagaacggcagcaaatggcatgaaagtgtgtgtattaattgtcccttcact

SEQ ID NO: 3275 - DNA, 4637 bp, Mus musculus
ctctgatggccatgagtaatgctgtacagaacatatacctggtgcagatccgtgttctacaaccccttctgtttctcttgagtgacttcccatggattgcatggttgacagttctaaagtctggggtctcatgagccttgagatggcgttgacgttgaggacgaccccagctgctcttggccagcctcctcgccttccagtaaggaccagacttcccccagccatggagaagggtgtgatttcggagaggaagaaggtggccctggactgccttacccatgccagttctgtgacaagtcctttagccgcctcagctacctaaagcaccatgaacagagccacagtgacaagctgcccttcaagtgcacctactgcagtcggctgttcaaacacaagcggagccgtgaccgccacataaagctccacactggggataagaagtatcactgtagcgagtgtgacgcagccttctcccggagcgatcatctcaagatccacttaaagactcacacctccaacaagccatataaatgtgccgtctgccgcagagggttcctctcctctagctccttgcacggacatatgcaggttcatgagcggaacaaggacggctcccagtctggctccaggatggaggactggaagatgaaggacactcagaagtgcagccagtgcgaggaaggctttgacttcccggaagacctccagaagcacattgcagaatgccaccccgagtgctcccctaatgaggaccgagcagccctccagtgcatgtactgccacgagctgtttgtggaggagacgtccctcatgaaccacatcgagcaggtacacgggggtgagaagaagaactcttgcagcatttgctcagagagcttcctcacggtcgaggagctgtatagccacatggacagtcaccagcagccagagtcctgcaatcacagcaacagcccttccctggtcactgtgggttacacctcagtgtccagcacgactccagactcgaacctctcagtggacagctcgaccatggtagaggctgcaccaccgattccaaagagccgcgggaggaagcgagctgctcagcagacctccgatatgactggcccctctagtaagcaggcgaaagtcacctacagctgtatttactgcaacaagcagttattttccagtctcgcggttctgcagattcacttgaaaactatgcatttagataagcctgagcaggctcatatctgtcagtattgcttggaggtcttaccctcactctataacctaaatgaacatcttaaacaagtgcacgaagctcaggaccccggcctgattgtttcggccatgcctgccattgtttaccagtgcaacttctgttccgaagttgtcaatgacctcaacacccttcaggagcacatccgatgttctcatgggtttgccaatcccgcggccaaggacagcaatgcgttcttttgtccccattgttacatggggtttctcactgactcttcacttgaagagcatataagacaggtccattgtgacctcagtggctcccggtttgggtctcctgtgcttgggactccaaaagaaccggtggttgaagtctactcctgttcctattgtacaaattcgccaatattcaacagtgttcttaaactgaataagcatattaaagagaatcataaaaacattcccttggccctgaattatattcacaatgggaagaaatcccgggccttgagccctttgtcccctgtggctatagaacaaacaactcttaagatgatgcagactgtgggaggcgggcctgcccgcgcctctggagagtatatctgtaatcagtgtggtgctaagtacacgtccctagacagctttcagactcacctcaaaacccatttggacaccgtgctgccaaaactgacctgccctcagtgtaacaaagaattccccaaccaagagtccttgctaaagcacgtgaccatccactttatgatcacctcaacctactacatctgtgagagctgtgacaagcagttcacctccgtggatgacctccagaagcacctgctggacatgcacaccttcgtcttcttccgctgcacactctgccaggaagtgttcgactccaaggtctctatccagctgcacttggccgtgaagcacagtaacgagaagaaggtgtaccgctgcacgtcctgcaactgggacttccgcaacgagaccgacctgcagctgcacgtgaagcacaaccacttggagaaccaaggcaaagtgcacaagtgcatcttctgcggcgagtcgtttggcaccgaggtggagctgcagtgccacatcaccacccacagcaagaagtacaactgcaggttctgcagcaaagccttccacgccgtcatcctgctggagaagcacctgcgggagaaacactgtgtgtttgaaaccaagacccccaactgtggcaccaacggggcctcggagcaagtgcagaaggaggaggctgagctgcagaccttgctcaccaacagccaggagtcccataacagccatgatgggagtgaggaggacgtggacagctctgaacccatgtatggctgtgacatctgcggggcggcctacaccatggagacgttgctgcagaaccaccagctccgagaccacaacatcaggcccggagaaagcgccatcgtgaagaagaaggcggagctcattaaagggaattacaagtgtaacgtttgctcgagaaccttcttctccgaaaacgggctccgtgaacacatgcagacccacttaggcccggtcaaacactacatgtgccctatctgtggagagcgcttcccttccctgttaactctcacagagcacaaagtcacacacagcaagagcctggataccggaaactgtcgtatttgtaagatgcccctgcagagcgaagaggagtttttggagcactgccagatgcaccctgacctgaggaattccctgactgggtttcgttgtgtggtgtgtatgcagactgtgacctccaccttggaactcaaaatccacgggaccttccacatgcagaagacggggaatgggtcctccgtgcagaccaccgggcgtggccagcacgttcagaaactgtataagtgcgcatcttgcctcaaagagttccgttccaagcaagatctggtgaaactcgacatcaacggcctgccatatggtctgtgtgccggctgtgtgaatctcagtaagagcagtagcccgggcctcagtctccctcctggtgccagcaggccaggcttgggccagaatgagagtctgagcgccatggaaggaaaaggcaaggcggggggactgaagacgcgctgttcaagctgcaatgtcaagtttgagtctgaaagcgaactgcagaaccacatccagacggtgcaccgggagcttgtgccagacgccaacagcacacagttgaaaacgccccaagtgtcacccatgcccagaatcagtccctcccagtccgatgagaagaagacctaccagtgtatcaagtgtcagatggttttctacaacgagtgggacatccaggttcatgtggcaaatcacatgattgatgaagggctgaaccatgagtgcaaactctgcagccagacctttgactcccccgccaaacttcagtgtcacctgatagagcacagcttcgaagggatgggtggtaccttcaagtgccccgtctgtttcacagtgtttgttcaagctaacaagttgcaacagcatatattctctgcccatggacaagaagacaagatctatgactgcacacaatgcccacagaagtttttcttccaaacagagctacagaatcatacgatgactcagcacagcagttagttcatgtatgcacggcctctcaaggagaaggacttttgtggcacaaaaagggaacatgttttactctttgcacgaaactcccattgttaatgtatactcttcagaagcattgtattgtatcatacaacgtgtactatcaaaactgttggatgttcatgtgttggaacttttgagcaccagatagacagactccttgtatataaagtgttgcacatgtattatgtcgtcgatgctaaaatggtcttataaagacaagtggacttgggccctattcaggcaagattttcaaagtgaacaaaatggcttaagagaaaatgttttcaaggaagacagaacttaaatgaactgttctcatgtgactatggttggacttccttttatgtacacttaagcctagaatttctcttttggtatatcaatggttaaaacccaagactattttttactgctggagattctcgtgaactatgaagagacattctcacagaacagaaccccacatctggatacggcccatatatatatttgtaagccttgcagtgtgacaggtagcctcaccatatatgcaatagttgttatgtagactgtcaaagatttttttttcctggctacatttgaagctttgagtgttcaaggttttccttaatgatttcacacagccaaattcttgaatcagttgaactaacctgtatgttactgctctcaatgtttaccctgcggcctgaacctggagattactggaattgttttccaagaggaaataaattcagtttaccatc

SEQ ID NO: 3276 - protein, 1085 aa, Mus musculus
MQVHERNKDGSQSGSRMEDWKMKDTQKCSQCEEGFDFPEDLQKHIAECHPECSPNEDRAALQCMYCHELFVEETSLMNHIEQVHGGEKKNSCSICSESFLTVEEKHMDSHQQPESCNHSNSPSLVTVGYTSVSSTTPDSNLSVDSSTMVEAAPPIPKSRGRKRAAQQTSDMTGPSSKQAKVTYSCIYCNKQLFSSLAVLQIHLKTMHLDKPEQAHICQYCLEVLPSLYNLNEHLKQVHEAQDPGLIVSAMPAIVYQCNFCSEVVNDLNTLQEHIRCSHGFANPAAKDSNAFFCPHCYMGFLTDSSLEEHIRQVHCDLSGSRFGSPVLGTPKEPVVEVYSCSYCTNSPIFNSVLKLNKHIKENHKNIPLALNYIHNGKKSRALSPLSPVAIEQTTLKMMQTVGGGPARASGEYICNQCGAKYTSLDSFQTHLKTHLDTVLPKLTCPQCNKEFPNQESLLKHVTIHFMITSTYYICESCDKQFTSVDDLQKHLLDMHTFVFFRCTLCQEVFDSKVSIQLHLAVKHSNEKKVYRCTSCNWDFRNETDLQLHVKHNHLENQGKVHKCIFCGESFGTEVELQCHITTHSKKYNCRFCSKAFHAVILLEKHLREKHCVFETKTPNCGTNGASEQVQKEEAELQTLLTNSQESHNSHDGSEEDVDSSEPMYGCDICGAAYTMLLQNHQLRDHNIRPGESAIVKKKAELIKGNYKCNVCSRTFFSENGLREHMQTHLGPVKHYMCPICGERFPSLLTLTEHKVTHSKSLDTGNCRICKMPLQSEEEFLEHCQMHPDLRNSLTGFRCVVCMQTVTSTLELKIHGTFHMQKTGNGSSVQTTGRGQHVQKLYKCASCLKEFRSKQDLVKLDINGLPYGLCAGCVNLSKSSSPGLSLPPGASRPGLGQNESLSAMEGKGKAGGLKTRCSSCNVKFESESELQNHIQTVHRELVPDANSTQLKTPQVSPMPRISPSQSDEKKTYQCIKCQMVFYNEWDIQVHVANHMIDEQHECKLCSQTFDSPAKLQCHLIEHSFEGMGGTFKCPVCFTVFVQANKLQQHIFSAHGQEDKIYDCTQCPQKFFFQTELQNHTMTQHSS

SEQ ID NO: 3277 - DNA, 4723 bp, Mus musculus
cttttaggatgtctcgccgcaagcaagcgaaaccgagatccctcaaagaccccaactgtaaacttgaagacaagattgaagatggggaggcagtagactgcaagaagaggccagaagacggggaggagttggaggaggacgctgtgcacagctgtgacagctgcctccaggtgtttgagtcactgagcgacatcacagagcacaagatccatcagtgccagctgacagatggcgttgacgttgaggacgaccccagctgctcttggccagcctcctcgccttccagtaaggaccagacttcccccagccatggagaagggtgtgatttcggagaggaagaaggtggccctggactgccttacccatgccagttctgtgacaagtcctttagccgcctcagctacctaaagcaccatgaacagagccacagtgacaagctgcccttcaagtgcacctactgcagtcggctgttcaaacacaagcggagccgtgaccgccacataaagctccacactggggataagaagtatcactgtagcgagtgtgacgcagccttctcccggagcgatcatctcaagatccacttaaagactcacacctccaacaagccatataaatgtgccgtctgccgcagagggttcctctcctctagctccttgcacggacatatgcaggttcatgagcggaacaaggacggctcccagtctggctccaggatggaggactggaagatgaaggacactcagaagtgcagccagtgcgaggaaggctttgacttcccggaagacctccagaagcacattgcagaatgccaccccgagtgctcccctaatgaggaccgagcagccctccagtgcatgtactgccacgagctgtttgtggaggagacgtccctcatgaaccacatcgagcaggtacacgggggtgagaagaagaactcttgcagcatttgctcagagagcttcctcacggtcgaggagctgtatagccacatggacagtcaccagcagccagagtcctgcaatcacagcaacagcccttccctggtcactgtgggttacacctcagtgtccagcacgactccagactcgaacctctcagtggacagctcgaccatggtagaggctgcaccaccgattccaaagagccgcgggaggaagcgagctgctcagcagacctccgatatgactggcccctctagtaagcaggcgaaagtcacctacagctgtatttactgcaacaagcagttattttccagtctcgcggttctgcagattcacttgaaaactatgcatttagataagcctgagcaggctcatatctgtcagtattgcttggaggtcttaccctcactctataacctaaatgaacatcttaaacaagtgcacgaagctcaggaccccggcctgattgtttcggccatgcctgccattgtttaccagtgcaacttctgttccgaagttgtcaatgacctcaacacccttcaggagcacatccgatgttctcatgggtttgccaatcccgcggccaaggacagcaatgcgttcttttgtccccattgttacatggggtttctcactgactcttcacttgaagagcatataagacaggtccattgtgacctcagtggctcccggtttgggtctcctgtgcttgggactccaaaagaaccggtggttgaagtctactcctgttcctattgtacaaattcgccaatattcaacagtgttcttaaactgaataagcatattaaagagaatcataaaaacattcccttggccctgaattatattcacaatgggaagaaatcccgggccttgagccctttgtcccctgtggctatagaacaaacaactcttaagatgatgcagactgtgggaggcgggcctgcccgcgcctctggagagtatatctgtaatcagtgtggtgctaagtacacgtccctagacagctttcagactcacctcaaaacccatttggacaccgtgctgccaaaactgacctgccctcagtgtaacaaagaattccccaaccaagagtccttgctaaagcacgtgaccatccactttatgatcacctcaacctactacatctgtgagagctgtgacaagcagttcacctccgtggatgacctccagaagcacctgctggacatgcacaccttcgtcttcttccgctgcacactctgccaggaagtgttcgactccaaggtctctatccagctgcacttggccgtgaagcacagtaacgagaagaaggtgtaccgctgcacgtcctgcaactgggacttccgcaacgagaccgacctgcagctgcacgtgaagcacaaccacttggagaaccaaggcaaagtgcacaagtgcatcttctgcggcgagtcgtttggcaccgaggtggagctgcagtgccacatcaccacccacagcaagaagtacaactgcaggttctgcagcaaagccttccacgccgtcatcctgctggagaagcacctgcgggagaaacactgtgtgtttgaaaccaagacccccaactgtggcaccaacggggcctcggagcaagtgcagaaggaggaggctgagctgcagaccttgctcaccaacagccaggagtcccataacagccatgatgggagtgaggaggacgtggacagctctgaacccatgtatggctgtgacatctgcggggcggcctacaccatggagacgttgctgcagaaccaccagctccgagaccacaacatcaggcccggagaaagcgccatcgtgaagaagaaggcggagctcattaaagggaattacaagtgtaacgtttgctcgagaaccttcttctccgaaaacgggctccgtgaacacatgcagacccacttaggcccggtcaaacactacatgtgccctatctgtggagagcgcttcccttccctgttaactctcacagagcacaaagtcacacacagcaagagcctggataccggaaactgtcgtatttgtaagatgcccctgcagagcgaagaggagtttttggagcactgccagatgcaccctgacctgaggaattccctgactgggtttcgttgtgtggtgtgtatgcagactgtgacctccaccttggaactcaaaatccacgggaccttccacatgcagaagacggggaatgggtcctccgtgcagaccaccgggcgtggccagcacgttcagaaactgtataagtgcgcatcttgcctcaaagagttccgttccaagcaagatctggtgaaactcgacatcaacggcctgccatatggtctgtgtgccggctgtgtgaatctcagtaagagcagtagcccgggcctcagtctccctcctggtgccagcaggccaggcttgggccagaatgagagtctgagcgccatggaaggaaaaggcaaggcggggggactgaagacgcgctgttcaagctgcaatgtcaagtttgagtctgaaagcgaactgcagaaccacatccagacggtgcaccgggagcttgtgccagacgccaacagcacacagttgaaaacgccccaagtgtcacccatgcccagaatcagtccctcccagtccgatgagaagaagacctaccagtgtatcaagtgtcagatggttttctacaacgagtgggacatccaggttcatgtggcaaatcacatgattgatgaagggctgaaccatgagtgcaaactctgcagccagacctttgactcccccgccaaacttcagtgtcacctgatagagcacagcttcgaagggatgggtggtaccttcaagtgccccgtctgtttcacagtgtttgttcaagctaacaagttgcaacagcatatattctctgcccatggacaagaagacaagatctatgactgcacacaatgcccacagaagtttttcttccaaacagagctacagaatcatacgatgactcagcacagcagttagttcatgtatgcacggcctctcaaggagaaggacttttgtggcacaaaaagggaacatgttttactctttgcacgaaactcccattgttaatgtatactcttcagaagcattgtattgtatcatacaacgtgtactatcaaaactgttggatgttcatgtgttggaacttttgagcaccagatagacagactccttgtatataaagtgttgcacatgtattatgtcgtcgatgctaaaatggtcttataaagacaagtggacttgggccctattcaggcaagattttcaaagtgaacaaaatggcttaagagaaaatgttttcaaggaagacagaacttaaatgaactgttctcatgtgactatggttggacttccttttatgtacacttaagcctagaatttctcttttggtatatcaatggttaaaacccaagactattttttactgctggagattctcgtgaactatgaagagacattctcacagaacagaaccccacatctggatacggcccatatatatatttgtaagccttgcagtgtgacaggtagcctcaccatatatgcaatagttgttatgtagactgtcaaagatttttttttcctggctacatttgaagctttgagtgttcaaggttttccttaatgatttcacacagccaaattcttgaatcagttgaactaacctgtatgttactgctctcaatgtttaccctgcggcctgaacctggagattactggaattgttttccaagaggaaataaattcagtttaccatc

SEQ ID NO: 3278 - protein, 1305 aa, Mus musculus
MSRRKQAKPRSLKDPNCKLEDKIEDGEAVDCKKRPEDGEELEEDAVHSCDSCLQVFESLSDITEHKIHQCQLTDGVDVEDDPSCSWPASSPSSKDQTSPSHGEGCDFGEEEGGPGLPYPCQFCDKSFSRLSYLKHHEQSHSDKLPFKCTYCSRLFKHKRSRDRHIKLHTGDKKYHCSECDAAFSRSDHLKIHLKTHTSNKPYKCAVCRRGFLSSSSLHGHMQVHERNKDGSQSGSRMEDWKMKDTQKCSQCEEGFDFPEDLQKHIAECHPECSPNEDRAALQCMYCHELFVEETSLMNHIEQVHGGEKKNSCSICSESFLTVEEKHMDSHQQPESCNHSNSPSLVTVGYTSVSSTTPDSNLSVDSSTMVEAAPPIPKSRGRKRAAQQTSDMTGPSSKQAKVTYSCIYCNKQLFSSLAVLQIHLKTMHLDKPEQAHICQYCLEVLPSLYNLNEHLKQVHEAQDPGLIVSAMPAIVYQCNFCSEVVNDLNTLQEHIRCSHGFANPAAKDSNAFFCPHCYMGFLTDSSLEEHIRQVHCDLSGSRFGSPVLGTPKEPVVEVYSCSYCTNSPIFNSVLKLNKHIKENHKNIPLALNYIHNGKKSRALSPLSPVAIEQTTLKMMQTVGGGPARASGEYICNQCGAKYTSLDSFQTHLKTHLDTVLPKLTCPQCNKEFPNQESLLKHVTIHFMITSTYYICESCDKQFTSVDDLQKHLLDMHTFVFFRCTLCQEVFDSKVSIQLHLAVKHSNEKKVYRCTSCNWDFRNETDLQLHVKHNHLENQGKVHKCIFCGESFGTEVELQCHITTHSKKYNCRFCSKAFHAVILLEKHLREKHCVFETKTPNCGTNGASEQVQKEEAELQTLLTNSQESHNSHDGSEEDVDSSEPMYGCDICGAAYTMLLQNHQLRDHNIRPGESAIVKKKAELIKGNYKCNVCSRTFFSENGLREHMQTHLGPVKHYMCPICGERFPSLLTLTEHKVTHSKSLDTGNCRICKMPLQSEEEFLEHCQMHPDLRNSLTGFRCVVCMQTVTSTLELKIHGTFHMQKTGNGSSVQTTGRGQHVQKLYKCASCLKEFRSKQDLVKLDINGLPYGLCAGCVNLSKSSSPGLSLPPGASRPGLGQNESLSAMEGKGKAGGLKTRCSSCNVKFESESELQNHIQTVHRELVPDANSTQLKTPQVSPMPRISPSQSDEKKTYQCIKCQMVFYNEWDIQVHVANHMIDEQHECKLCSQTFDSPAKLQCHLIEHSFEGMGGTFKCPVCFTVFVQANKLQQHIFSAHGQEDKIYDCTQCPQKFFFQTELQNHTMTQHSS

SEQ ID NO: 3279 - DNA, 279781 bp, Homo sapiens
  misc_feature (1)...(279781): n = A, C, G, or T/U
tgttttcaaattatttttctttttaatggcagtttgattcccagtttgacagccatttggagctgctgaaggggaaaaagaaagaaaaaacccaacattttttcatgttcctgggtgaaataaatctgtttagtggaatattaaatgcccaaaatgtttcgattaattttggcaaactttagacaaatccaattgtccttgtctttcaaatatatgattgcagttaaggagaggaatttcctaaattaaaaaaaaaaaaaaaaagaaaaaagcaagtccaaagtcactagtaaagagaattgaatgataatattgtattgatttttgtgaatgaggttggggtttaccttctcaaaatgtgaaagtgagtattgctacattgcagcaagccagtgtttcctgattcaaacaaaacactttccccctaagctaatgcctcagcaattgttgagatagttaactttaggtgtccaattcagaaatgttgcaatttgactggcactgtctaaaatggctgaaaaaatacaaacagttggtgtaagtattagtatgatatcgttaatacaaaggcatttagccgcagatttttctttgcttggggaaactaatgctttctaactgtgctactaagactacatagacttatttagtaaagaggagccagattctttcgcaaatgtccaaatgtctaaatcctaggttcaaaaattggttttatttcttattgtagctgtcttgtctgagaagcagttttcagtatacctggtcattatgtactaaagactacacagaaatgttttcaaataatttgttttcctccagagtggatttttttttttagcagttttaaagttgctttactatcgagaaattagtgcttgattagctggatattaaaaatatttgtgtgtagtatctttcttatgtaaaatggaagaagggagtccttgaggctcggtttaagattgagcatggaactacagaagctggttttgtttctttttgcaggaagttagagactatatgagattcaaatgtgtcattgttgaatctgaaggcatcagggtagttggaagagtgaggcatttcaaatctggcaagaagaaaggctcatgccaaagcaaaacaaaataaaaacaacacggttacaaaaagactctgggtattttactttaagcccttcatctagaaaaagcttcagcagggtacttttttctttctttattagcgtaggtgattttgagtttgtgtacccatttcacccttgtgtcatctctttcccctgctgctctgtcgcattctttgtggttccttaccatattttcttttaggagaaggctgtgtgcaccttttaaaacaagtattttaaatttattggggttttatgttattaaaagtagtagtctggtgttttgactttgtctgatgaaaagaatcatgaactccaagtaaaatcgtgttaacttacttaaactaatggttaatgatacatttaaagaagaaataagaaagagatattagaatcaatgtctcttttggttttcagtttaattttatacttattcttctttggcattgtgtgtgcttaaaataaagctaaagttaaaggagtcttaccaaagatccttgaagtcctgagaagtgtctttggggcccctggaaacctctggtactaggttaaaaagttagctggtggctgggcatggtggctcacgcctgtaatcccagcactttgggcagctgaggcgggtggatcatgaggtcaagagatcgagaccatcctggccaacatggtgaaaccctgtctctactaaaaaaatataaaaattagctgggcatggtggcacgggcctgtagtcccagctacttgagaggctgaggcaggagaatcgtttgaacctgggaggcagaagttgcagtgaactgagattgcaccactgcactccagcctggcgacagagtgagactctgtctcaaaaaaaaaagaaaaagaaaaaagttaggtggtgtgatttttctgcccagtttttctccagctttggcacttctttgtcactatttaggtaagtgagaatatgggtaaaagaaaaaacctggatgtgaagatagtgagaaaagcatgctcctgtctaggaatggctccaccaagcatggtgcctggcaaacactgagacagctctccactttcctctcttcaccatccatccagatcctgtttccatagtggctcccagaaccattatttcctttctgccgttgacttagttttcactttctacttacttcctggtttaccctgtagcctctggattggtctctttgcttccaggtctgatctttgtccatgccatcctctcagttaccagtggagcatctttgtaaaatgtcaatcagatcattcactcccctacttaaaatccatcagtgatttctcatagcagtgaggttaacatctggacattacactcacaggagttccttcgtgctctagccgcttttccagcctgctctctgccgctgccttactgtctgtctggtctatccctccctcgcccccattttgaatagcaacacaggtacttgcatttctttgaagtcatcatgttgttttacgtatctgtggccttacctttgtttctatttcctagagagctgtgttcttgttcccagtgttatgtggccttcaaaatgtagcccaacttgctcttcttgggataaaatttccctgccccgatttagatgcccctccatctgagtacttatccctcttgctgtagtcgttgacttactcttctctttctctccttgtgccagtcaggccttgtcacgaaataacatatgcagaaaagtgataagtttcaaatggcaaacttggttgggtaaatggacaaaaccactcaaggccagggaagacagacttgcagtttccagtcaccccaagctgtgcctggtcaccttgaggatcagtatcccaaaacacttgaacttgcttttgacccaccagttgggaagcggcagcaaattgcaaacttcttgggacaggaatttagacgttgtatctccagggccttgatcaactggctgttaaccacataggtgctcaagaaatgtttgcttactgaagttgtgacaaggcagccatagaaattcattgtgaagttaaatgactttaaggtaggaatatgttagtaactactactaacatagttagttacaaactactctttgtattaaagttggagtactgaagttgctttcttccattgtgtctttcttttaccaaatttcatgttaaagataaagggggaataggccagcgcgatggctcacgcctgtaatcccagcactttgggaggctgaggctggtggatcacaaggtcagaagatcgagaccatcctggctaacatggtgaaacctggtctctactaaaaatacaaaaaattagccaggcatggtggcacgtgcctgtaatcccagctactcaggaggctgaggcaggagaatcgcttgaacccgggaggcggaggttgcagtgagccaagatcacgccactgcactccggcctgagccaaagagcgagactccgtctcaaaaaaaaaaaaaaattaataaaaaaataagataaaggaggaataatggaagaaagaaacttgggtatatctttctgattggaagagaagaaacttttgttgcaaagtgtgaaagtgaatgcgtgtgtgtgtgtgtgtgtgtgtgtgtgtgtgtgtgtgtgtgtgtgtgtgtttaacctcccctaaggctaatttcctcccattcagcgtcctccttcaaggaatttcactgtagatagtggtaataaattcacaattggcatgttctccttgataacagtacatctgtgatatttctctttggtcttcaaggaccgtgatagacctgtagaacaatcaagcaaaaccacagaaagtctaaacttcaacagtgcgattttgtttaacacagagatcattctttctgtctgagaagattttatagacaaaggaaggaacaaatagattacaggttccttttcttcttctgtaaaacaatttaacaactttcagagaatagagtggttagaaaataaacattgcagaaagaggtaaaaggagcacattcttatccgtgaccacagagctctttggactggttggtgcccagccaggtgtctgcctgggatgcccatcataatcctgctaagttgaggccgatgtggttccggggatgctcagcccttagccaccccatcgattgctttttttgtttgtttgtgttgtgtttgtttgtttacctttagttgacagtaataaaaaaaatgaggcagcagaccagcaggcgagtgcgggacagacggctgcacagtctggcaatgctgccttccttcattagagtctgcttgccattttataacagtgtgcgatttatttcccctaaatctgttttcgtcttatgggatttcaagttagaatgcatatctagagcccagaaagcacaaaataatgatcccgccctttggtttttgcaaaccaggaaggctttctacttcttgttaactctttgtagcctgaaggtaactttttctctgttcttaaaaagtataaacataaatcagggattaggatttgaacatacttgtaggggaggagtgnnnnnnnnnnnnnnnnnnnnggaggagtgctttcagatatggtttattttaaacagatactctctgattttctttttaggtgtgggacttctaaatatgtcacgaaacctagaaggctagttgtgagtacacatatgaactttaaatacaacatcattagacagttaattacgtttagtacaagatggttgttaacctgagatgcatcatttgcagtgatttggggagattttggtgtggaatgcattactttgaattatttgtttacttatttagcatggaattcctggatatgtgacatgggttataatgcctttttaatttcagacaatatccttgaaagaaagaactcgggcagctttctaaagtctcaaaaaccctctatttttactagttcactagcagtgtagtgttggggccactttttctttaatttttttttgtgacagttttaggctactgagatcctggaggtcatggtcatcacagtgaagctaagacttgtttttttcagacagtatgtattttttagttggtagtttcttgaactcactgggcactgtgtgggttgacttaagattgagtaattcatgccatggctgtttaatttggtgacaagctggctatgatcagagaacaaactgttaggaagtggtccagttttaagtttgcgtgagtatataagtggagtattttgggttcattcatctcttgccagtcttagttgttaagtaatcttcttgcattcatatttacatcatcctcagaatcttgtgtttctgccactctcataaaaactgactctggtttttaaggtagagcttcatgcttggaattaaccaggaaaaacctcatttatatctccagcaagagggacagagggcctgcactgtgtacttgctgccagaagtttttatagtaatactttgtatctaggctctggctcttaccattaaatgtgctttttatagagtaccaagttataaatgtagtgcagctacggcatattaatcttactgcagagatttaatgaggcagttgttttgcgatggacactattgggagcagagagcgacagagttttactttaccactgagctgcagaaatattccttgcctggtaataattataaccacatgatctcttagtttttctttcttttgccagtgcttttccatgcaaaagtggcttggaaggaggtccattttgaggcagtgaaatggattggaaattgggctgttttctcagtagtttgacattttagctttgatcaggcatgggatccttgttgcacagagagaaatatgtaagatgagtttcaagaatacagatagtctttgccagtccactgagatggcttttagatattcattacttttacttgacttttatataggttataaaaagtaaatgtggtgaaacctcatttttacatggacagaatagaatttctgctggttggccttaaactgatcccacacttgaaattaattgaagtccatgggtttattgcctccaacacttttaagccagtgcaatttttcattttccccacagttgtaattttattaaagcaagttatagcaataacaattcttatgaacaggaggatgagacgaagaaaagaaccacctgccagagaacacaatcagggaaaagaatgcttcttttacattcctatttataagtaatgttaacaaaattggaaacagaaagctgccacttacttttgtaataataattgtgcgtgtgttccaaaattcagcattttatccaatcagaacggtataaatccagtgtcccacagcacccttttcagaggatgaggtggaaagttggttgaggaggtgagatcatttgtgctgaatgcaacatgtttgcgcagcatcatttagggtagggggagagagagtggtgcctgcagctatgacacagtttgtagttgcagtgtagagagtttggggatattttaaaatatcaccctttgcgtggatttatagcacaacaatggagttggaagaacaatgatccttcctgcagtggtgctgggggcagggcagtacttacaggcatggaccttgtatttataaccccttaggttgaagtcagaggtttgaatggctagcagagtaatacaattattttttatgattggatctcaaaggactttataaaaactacatcactaagtccatgtgcaattattgaagtgtagccacctgtgggaaagaaatggttgacagtgtaagctttctagaatcttcctacatcaactggcattagggatgcaaacccctagcacaaataaacacatcttttgaatgggcaaaaaagagtttttcatgaaagtagaggctggaaaaatcttacaaggagagagactgagattccagtactcattacaccaaggcatcataggctataatcgaacccgcttcccagagggtccctcttaagtgttgacctaaaaacaaattcgccagttggctggagcatgcatcctaaagttgcagcagaagtgaataagcttgactgacttcagtccctgaagggttctatctgcaattgcagaagtggaagcaaaactattttttattagtcttaaaatgaccctcattttaataactagccacagtgttggaagcatggactggggtcggttcttcagcttttgagagcgaagccatcatgcattcttctatgtttgtatttttgatattggattcatggaaagtgtccatattcttgaataataaggaaagtgagtttttatcatttttctctgtatagtacttaaagtattcacagagtctccttatttaaaaacaaacaggtctgcaaactggatgtgtagcatttaaataatcatattaaaaatcagacctaacagcgacatttccctgagtgttatcagtttttttgagaaactagaaactcatgctaaacaaccaagagtattcatgagtgcatactgccttccaataagtgttttaatggtgtgggggtcaatttgccatagttgggactgttatttattttcctgaattgctgtctagtttggcagtgtttcatcacttggttttagtttgttggagatctttgaatcattgccatttttttttttttttgcatctgttgccccagatgaaatatttgagagaagcaaacccaaatgtggtgggtcctgtagtatcagctttggaaaatgtaggcatgctggtgctttttactttacaggtaactggtctgttcctgtttacagaaaaaatactggtaaaggacttttaaaggtagtctctatttttttctccttccgtttctcaccatcactaaataatatttactaaacactcacctggacatagaactctgctcggcagagtacaagacaaatgcaaaatccctgtgattactcccccaggaatgagcagtctaaatcctggtataccgaaatgggcactgtgtagaatgttgagataataattttccagatggcaaatcagcccaaattaccaatgtacttaaacagtgtgttaattttgaaaaaacccaacaaacaaaactacgtgctctttgagatgggaattttgcttttttttttttaagaacccaagagattgtcagatacatggtgatataagttgattttggcatatgtgaatcgttggaagggtggtgatatagttgtttattgaagatgtgaaggaaagctctagaacaactgccagacaagaaaggagtataagtgacttgtagaagaagcattcatagaaacgtgctatgtgcaacatagcagaaaacaatctcagagagcaggatatttgtgtggcgttcatggacttttttgagaaatacttggttatttttgattctgtggattcttgattgtaacatttaatgaaatatctaaagtgttaaatagctgggcatggcagtgtgtgcctgtggtcccaactacttgggaggctgaggcaggaggattgcttgaggccaggagttggaggctgcagtgagctatgatagtgcctatgaatagccactgcacttctgcttgggctgcctagtaagacccatctctaaaaagcaaaattaaaaacattgaatatatttgtatttaagttatcatatttattgtagccattaaaagtaatattgtagtcatataaaaatgtggctacagataatgccttacgtatttcttaggtatcttgatacagttattttgtaaccatttcattgactagtcaaggccttatagaaaatagaaatctctagtttaattttaccgtattttgagatatagtttatttatgactttggaggagtttttgctactggaaatcagtgacccataaattcagtcactgattgtattatcccattatcttaatttcccccaaagagatactcttcagccccctccccacacagttcctttcttcctccctctttgggaggaaatgactcaaaggacagcgtaactaatcaaaaagcgtttattgagctctaagtaaaagcattccacgtgcttttctctccccgcacccccacatctctccctgctgtttgtgtatcatttttagggtgaaaatggaactatttttagttttcacaacatttagcttttcaacattggtaatgccaactcaagttgttgacttcattattatttataattgtttttcatatatcttatttcacttttttggataattttgaaaacaagagacatacatttacacttgagtttgcatttgtaagaatgttttgccatgtgatacagcttattttgctatcactgtctaacaaataatggagtagctgtgtgttttgaccagtttataagtaaaggtcaattttgtgcctatggtaattggcttagcttattctagacttttggctaattctggtaatttcccgtgaaagagtatatttagcagaaaaagagttcattcttaagcacagtggggggggtttttttttttttttttgcattggagactgtttaattttaaaagtgatttatctcttttaagcgaaaactaaaaggctatgaaaaaaatggtaaagtcagtcttaagagtgggtgagtgatttgatgggagagagaggaaaagggctacatggtggggaaagggaagaaggcctttgatagtcactaactgaataattttaggagaggctcacttttgattctcctgtaataaaatctgcaatgaagccctcctattgcaacttcaaggaaaatggtgtttctgtttttggtagcaagaagattaaatgttactttaaaagaacctgtctttaaaccccatacttacagtgttgatatttttcagaccccaactgtaaacttgaagacaagactgaagatggagaggcactagattgtaagaagaggccggaagacggggaggagttggaagacgaagctgtgcacagctgtgacagctgcctccaggtgtttgaatcgctgagcgatatcacagaacacaagattaatcaatgtcaactgacaggtaaacaatacttatcacttttttgtcttcttgtactgttctatttctgattttttcagtttgttcctttatgtgtttttctcttcaaattattttattcctacatttgaatacctagctaagtctagaggtgcttttgaaagaattctgagatggttgtttggggtaacctcagtgtcacagccctcttagattttgaaatgcacctaaatgtcaatagctaatgagtgtattttcctttttgcttttttttacatgatgccatttaggagcagaacatgaatattggatgactaatatattttaaaaatcctttgaataccttttcaaagacagcatgagaaatgaacatgttagcttagataacacttcctgaaggaaaccttttctgatctccctctgcctgagttagccacatttttttgtgttcccataaagttcaatacttatccttgagcaccacagttctcactgggtatgttcatttttccatctcactcgttagactgaaagctcatggatggctgaaactgtgtcttattcattctcgcattatctaagcctagcacaatacctggcctatagtaggtactcattaaggctggcaagttattctgctatgcagttccttggaagagtcagatttaaagtaacatgttgcatagcatgtttgatgtaatggctaaataaaactgggactcagtttaccaaatatctaccccacttaaaatatatcctacaagaatgcatctctgagcctgggtagggcattttagatagaactctgtaagatacacatcattctgctctttctgtttgaagctgatgccactcctatgtgtgtgtatgtgtgtgtctctctttctctgcctcttattttcccaacacaaatctttcttccattaagcgagtatgggaaatgtgtttactggacaagtggttctctgactgttttccacagcatattcatatttttataagattttaaagtgtgttctattttaacaaggttttctgaatggattattgtggaatgttggattaaatccattaaataggcttctttattaaaagtgccttgtggctcttctcttcaaagagggattacagtgaacaagtttattaggccccagaatcatcttcctttcagaaaacccataaacattttctggaactgaagtttgagaattgatgttgcttatataaatattggccatacatatatattttacagtttatatatgcttctagggagcaacttttattttgatacaattccaaacatacagaaaacttgaaaaaataatataaggaacttccatatcatttacctgattcatcagttgcttacatttttctccatttactttattattctcttcttccctctcctatagcatctctttcttaatcatttgagagaaagttggagacatcatcacacctctatacatatatcctttgtatttctgaagaacaaatctattctcttacatatctatagtatacttactgaaactgagaaagttagcctttaggccaggcgcggtggctcacacctgtaatcctagcactttgggaggccgaggcaggtggatcatctgaggtcaggagttcaagaccagcctgatcaacatggtgaaaccccgtctctactaaaaataaaaattagccgtgcgtggtggcacgtgcctgtaatcccagctactcaggaggctaaggcaggagaattgcttgaacccgggaggcagaggttgcagtgagctgagatcacgccattgcagtccagcctgggcaacaagaacgaaactctgtctcaaaaaaaaagaaagttaacctttaacacaaatagatactactatctaattcacaatccatatttaaatttcagcagttgtgttaataatgtctttggtagctattttttcccctcatccacgattcaggatcatgcataacatttaactgtcatctcttttacctcctttaacctggaatgttctctcagcctctgtctttcctgaccatgacatttttgaagagaagctaccagttagtttacaaaatacccatcaatttgggtttgtctgatgtttcccaaggattaaattcaggtttcataggctcctgtagtattcaggctccaaagaagcctgaatcaccaaagaagtgatattgcacccttctcagtgcatcagatcaggaagtacatgatgttagtttgttaccatgttgatgttgttaacgatgaatgtttgtttaaggtggtatctgccaacagtttccattataaagttaccattttctctttgtatatggttaataatttgtgggaagataactttgatactatataaatatctacatattcataaaatgtttacccactgtttctttcttttttttttttttgtgatggagtcttgctctgttgcccaggctggagtgcagtggcgtgatctctgctcactgcaacctctgcctcctgggttcaagcgattctcctgccttagcctcccaagtagctgggactgcaggtgcataccaccatgcccagctaactttttgtactttttagtagagacagggttttgccatgttgaccaggctggtcttgaactcctggcctcaagtgatgcgcctgcctcggcctcccaaagtgttgggattataggcatgagccaccacactcagccatgctcactgtttttatgtctattgcaagttcataatttatctatttgttagcctactgttatattctttcttattcatttgtttatttgtatattcatgttactgtcatctcttgggtttttattttattcagtgggtcataattcattactctcattgtattgatacccagattgccatagatctagccaatgggagtcccttcaaacaggatcctgtatgtgtttaatatgcctccatcattatttgagaactttagtttctgatgcaaatagatgctccagaatcatcatggtcttttcttgtcctagtcctgcaatcagccagcaatttttcttttcttttcttttttttttttcttttttttctcctggttctttatgaggacaaaggtatttagaaaccaagatatggatactatgtatgctcaatgctataggtgtaccattacttatggacttcagtagacagaagtaggaaatgtacatgcatacttactataatatataatacactcataatatggctcataaaattcacacatatacaagtatatgcacatatgtgtatttttctctatccaataaaaaccatatgttcatattgatacctcccattcaattcagtacctcaggtacatcctagtctttttccttggtgtatttctgctgccttctgtaacagagagaaacctggcttccattatccttattaatatgtttactcatttgcctgagcctagaatatacagtaagtagtttcaaaattgcttgctgataccaccatgataggcaaactgagtttaatattnnnnnnnnnnnnnnnnnnnntgaaattcataaattataagtatataatttggtgaattttggcaaaataaatacacctatgtgacacgcccttcttaagatataatttctttcatcccagaaagttccctcatgcttctttctgatcaataatgctccactagaagtaaccagtttttgagctgttttaaccatagattcattttacctattctagaacttcttgtaaatgaaattgtacggcgtgcaccctttttttgtgtgtccagcttcttttgttcagcataatgtctatgagatccattcatattgttgtgtatataagtagtgtgttttttattgctgtgtagtattccattatatgaacatatcattatttgttttacattctcttgttagtggatactttatttttagtttttgagtattatgaataaagttcataatagtcaaccttctatatggatctttttgtggacatatgttttatttctctcgttaggaatagaattgctgggtcattgggtgaagggcatgagatatgatatgtttaatctctattagaaacttccaaaccctttttcaaaaactcccaccagcagtagatgagaattctggttgtcgtacgtacttgctaacatttatattatccgtctttaattttgacattctgttgggcatttattggtattttttgtggattttctagctcatatatatttaattgacttcatttaaggtgtatttttcctagaacatatcattttgggaaaatcccattaaatgcagatgattagtaagatgccattttcagtagaataactggtgctttaaacaaagctttgctcacgtagaatcagcactaacattaggataaagacatgggaacttcagcgttcccactggactgacatgacagtgtatattcatctagcaagaaatcatggctttggtaagagtgggtcctctctcatgttacaagttattttaaaattcatataatttagaaaacaaccttcaaattctgcttggtaagtggttaatttttactgagtgcgtgccctatagttattcttatgttcagctctataaaattgaatcgaagcaaaaggcattattcctgtctcatacaactttaataatacctgtgcaggaagtgctgaattttccacacatggtatggcaaagattatgagttacattttttaaaaaactggtaaaatgtttggtttattttggtctgaagctttctgaaagtagggaatctgttctgtggtcacatactacagcaggttagtcaaaggtagaaaagtagaggccgggcgtcgtggctcatgtctgtaatcccagcactttgggaggttgaggtgggcagatcacctgaggtcaggaatttgagactagcctggccaaaatggtgaaaccccgtctctactaaaaatacaaaaaagttagcagggcatagtggcgcacgcctgtagtcacagctactttggaggctgaggcaggagaatcgcttgaacccaggaggcggaggttgcagtgagctgatatcgtgtcattgctctctagcctaggcgacaagagtgaaactctgtctcaaaaaaaaaaaaagtcttacttgccacttgttgaagcacatgtccagagagagttatctgatgggtcttgttttcctgtttattgttgttcaggattatttctttgggaaggtggtagattcgggaggcaaagtgtaagtggaggccaaggaggaagcgaaaaaaagggagaaatgaaatcaggaacgatccatgtttgttgaaggtgttaatggtgtagcttgagttgcctgaaggttgccctccagtctgatctggaaaagattaaagacacttggaagcattttaattaaaaaagtaatatgatgcttttgctttcttgcttggttaaagccttttagtgtaagttgggaggtctgacagttccagtgttggcttcccactgcttgaattctcttcttgctgcttccccaccccccaccccccacccctggctgacaaagtgctggatttagcaaaggaaggtatttttatatatacattttttttttgcctcttggttttattacttttttctttccttttttttttttttttaaattcgttttaccttttaatttcattcagccccatttgcatctttgctgattttcctctcattccggtcctttctccaagattcttaatttccctgtccatattttcccctttcctttctccctgcccgttccatggtcttatcttgctgctttctcaatttattctttgttgcttgtggattcccttctattaatcttgaagtcgttactgacatgtttggccctataccagctagaccattgcctgaagactttttgatgaacaatctgtgtaaagaaagagggaatcctgagcagtgtgctagagggttaattatagagtatgattagaagtgaaagctatcttacaacttgttgatttgcaaaataacagaaaagggatatattctatgtgctgatgcctatgtgggttactcagggtagttctgttatgagagagccatagaaaccctgtcttaggttcttcccttcttttaactgagggttttcttggtaacttaagatctgttcctttggtgactttcatccccaagggtgacgcacattccttggagagcctgccttgatgaaaacctattcactccgtatcaaaagtcttgaaactgagccaaggccaaacgaagcctttggagatgaaggtcaaatacagaagaacaagatgatcaattctagacccagatttgaaagtcagctataagattatgtgccaggtaaaataatgattagctgtccacgtggactgaaattttagacagtggatcctgcagggataaagaaaatgcgagctcacacacacctcatggagtctgtcactgagaggatattctagtatttgcatatttttctggacaagcatccttgttctaagaaagaacagaacagtccctgaagatagcaaaggacgtggtgacactcacagatgagttctctctcctttgtctcatggtgcaattttcctggagtctacagtccaacatgtataagtaagttatgtatcatccctgcttgaaggaatagggggaaaggtgaaagaaaaaattaagtccctctcttcaattttagcaatagatggaaaccacctgtcttgccccagccttgctgtctttttcctggaggctaagaaggcaggggaatcaacactctaatgctgttgggactctctgatgcagaagacagattatcaaaatatatatttaaagaaggaaaagcacagagaacctctcattttactaatccacaaaccctatcatttcttgccaattccctcagggggtggggagggctggaagccagaggggtctcatcacactgctcaacaaagatttaatagcagggtgctatggggaaggctgagattacagagactttgttatgcttacaaaactgagtaagaactagtattgtaaatcatcaaaactaagctacacttaacaggataaatgtataaagtgcatttggtaatactctatgcttgttgttctgagtcatttttctcttctctcctgctaatttgcaaacttgagttgtctgttaagtgttctttcacatcattaatgtgaattgcctgggcataatcgcagaaaaaactaaatagcattgtgttagttcttaaccctctggtctaccatactattggtagatgagtgtgtagaaatatgtgtggtagtaattctgctgtagctttggggaacatttgtagaccagatatataaagccctacccagggttgtagcttctttacaaatattcttcctgttcacattttttaggaaaatgaactgaattgatgagtggatgttgttcgtcagtgtaaagtagtatgtccatttaattttgttttaaatcttatgaaacttcctggaagcttcatacaatttttgtaagctgaaaacttttagacatctggaatatccttattatttggccaaagaatttttttaaatgtgaaagtgagtatacatgtgtcatatggttgtggcaaattaaagactggttcattccaatgaacaataaagtgctctaacagctagttctgttggcagtgggaataagggagatgagtagtttacagaatgaagcatcgttttcataaaagcagattgaaactgcttagaacctttttttttgctgttttccttatcaaaccattagttgaaataaattacatgaaataaatgtgatatttcaactttttagttcatattaattaggcttaaggcattataagttttatttgcatatttctatattaatttctatattaattcattattcatactttgttattaatcatttaagtgttattaatttatgtttctatattaattaggcttaaggcactataagttttattttcctgtttccttccattttgatcagttcctcattttgtacctaaagtatgtctttttttagcctacttcattctccaaatctccctaagcccccaaaatgcagtttcatggcctccatagattccattctccagcccatctctatatgcattttacttttagactagtgatttctaaatgcactgtcataatatgtatttactaatacattacatacatacatgcattatacaacattcacaaaaacagaaattaaaaaattaggtaaagatgaaataaacagggtttaaaaataattttatgttattttggtaattcattttaatggctgttaaaactgaaaaaaatacttcacaaaacctccagagagaatgtatgttattctttcccatgaggttgttatcagtggtgggtataagttcatatttcaaagaactttcctgataatctcacttctgtgcttttgttttgccaactttcagtcagctctgatgaaacggtttctccccctcccctttccctttcatatggtaggtgacaaggagcttttacttggtgtgaaagggccagatttgctgttttcttgttgattacttgtgcttgactatcagtatcctgcagtttttttttttgcagaaaacttttaaaaatcagttgtcaaaatctgaggattttgcatgaattagattagttaaaattaaatattctgatccgtaagtccagtttgctggacactgtagactgcattagtatgagatgggataaaaggggctggagaagccagcccacccagctgactggagtactgtttatctccttgctctcaggaaggtctggttagtacctggatggctatttctgattggtgtccattctgattggtttctaactattcagagtatcctctctcctgcacgataatgtaccctgtatttcagagaccactgttcttgactatcacttatttcatgaggtgaaaaacggctcaccaaatctttgctcctctcagttttagagaaagtggtggggctgagtgtgtcactttgttcaactgtcagggctcccaccaagttcttccatgcagttaccaaagacaaagtgatcatctatagttggttccaacttctgaaccgtaggctgagtatgcttccttttccggttttggaggtaaggtcagttcaatcattacctagtatacaagctttgttatttccacattgattttgctgcagcagaagtttttgaatattagtacctggtctgccattctcttcttgatatatttgtaaaattcgctaccaaaacatggatataaaataattatttttagatctgttattttctcaaagctctttgaatgcttgtgggtattgtaattgggatttatgaaaggactgtctgtactgatgaatatgttttcccagtataagtgatgatctattacattaattaacttattaaaattaaaaagtttggatcttgaaagggtaatataagaaatatttctctgtaattttgatgtccatattttattaggcatttttacttttagcctgcttgaataactggtgattcacaagaaagctactgattatgaatgaaaagttcttgaaggatgtaatctcctagaaatagaaaataaatgagtctattcactttaatttttacaagtaaaacctaagtggagaatatcttatattagttttaactgtattcataaatcacctgtttcttgactaatttgagtttttaaaaattaagtcttttgaaatgaatagaattcaagaagaaaattagcattatttgtctgtaaattgttttgccttagttgtgtaatgaataatgaatatataatgatctaactgtggtttcaggattcatttgccaaaaattgtaaataaaatgtcaagaacacaagccatgggagaatatcttcaagaatttctcccatgtccttgatggtcattgatggtaattaaagctgtcagtttgtccctgtggagaagtataaaaattataaatgaagggctctatttgggatgtggagacagtggggtctcttttgtggggaagatgaattaaaagagacccactatttcttaggccctctgcagtcatttggtctatcttgtaagcaccaatgtttagctatttggatacagttgtgtgcacataagggctctgctacctttaacatgttttcaaatgtgaaattcaacatgataaaacttaagaggttgaatttttttttttttttttttacatttttgcttgactcatgttgtttttcatgttctctacttacgatgctcgtgacctttatctgtttccttttataaggagtgggttactaaaaaagctgttaaaagtagactatttccacacccttctctttgtgctaagtctgtgtttggggatcttgtctttagggaatggtagcaatgtcacagagatctatgacctcttaataggtcttgggaggggaaagcaggaatcattctacactgtgcctcagggcttagttcctttaaacttcaaggaattggactggaactcttcactcctcctttctttcggttttaccttcaggggaaattgatcgattagaggtgattattccacaaactctgaaccctttccccatctttgttccaactggagcttctcaaagtttaaagggattgtgtctcctgggtgaattgtagaatgaatttaagtaggttattgggcagaactctttgaacacacattaaaagtgctaaaaaatatatttggaacagaagaaaatatttgaagcaaaagggtaaggaaacattcgtttcaatataattataatttaattatatgggttatttttgagcaaaagattagctgttagaatgtagaatcatagtgcttcaaaccaagaaaataacagggtcaatgcaacaaatgggcaaatgttcaaaatctgaagggtgagtaagaacccaataggaccaaagataatcataactgattgggcgtatatatgtcctctattaaacacaacaatattctattaattgatggctttcactatttttttcaaacttaatgagaaagaatatatacctattctcttttgttttctttgcatgtataatatatatgccttatggacactatatcatctttgaaatatatttaataccacatcaatttaatcttttccctccctctttttttttttgttttctgttttttgttttaaatctgactcttagactctacctacttatagagcagaattagctccccctggtgactaattaaaaatgtagacaaggatgtttggggtcatgagcttccttaacttcaacctttaaatgcataattaatattagtatgtgtatagtaggcatgtacactgaactatttttcaagtaaaaattccaattagtcttgagaaatgctgattttaatgtcagtttatctatgtaatgaagactcatccatcttgtgtggctttcttggagttgtgcccattttgatgacctcagacatgttggttttctgctgtgggagatactagaataggaggtagatattcagatctcttgtgaactagtaactggttataaaagcagaaaataaaagtaagagcagccatcaacttacctatctctatcattcttgcaaaataaacttttatagaaaagattgtcattgttaaaaaaatttaaaagaaatattgttttagaaaaagcactattatacattcaagcactaagatatatttttttggttgtgccaacaaaacatttttccatttaatttatgaattatttaaagtgtatatttttattactcagattgcctttaaacttaacttcttctgttttataaaactgttccccctcataattaaattatcaggttgacagactcttgagaatgcttttataatctttttaaaaagaaatctgtcaaatctattatatacttactatttcttatacctaattttattttctatgcaaaatatttgcttttcaccagtgttttatgctggttattaaaaagccatgtcttgtggctgtatggtctggtttaatatttatattcaatattacatatattatcctgcatttaaagggaaagatttacagttttatgtgagagctcatatttgagttgctcctttgttcctcttgttctgaatagttttctacacttttctgcccctctctttttgcttttcttccttttccaaggccacagtttttgggtacaagccttagtccattgatttgttcatttcttttgtttttccaccaaagtgtctctctgttgggagaaagaataccatcttctaacctcaatcatttcttaccatcaccttctgtggcctgcagaaacctaagcggagcttctcttggcgttattgatactattttgtcacttggcctgaagcgatggttatgaagcagattagatgaacacagcatccccttcccccagttaatttctgcctccttccattaccgctaacttccttctgcaagcagtctgcctgccctttgcaattcattagtcccagtgcctagcaaaagagcaaagaaccatgctttgctttaagttttgctaatggtcactcacagatggagcttaagttggtgcctgacagctatatagtgatagctttcttcttatgaacaccagactacaactgacaagtacttaataatataaatattattatattgattagatactgcagtttggcctaataaaatgtgaagtttaaggcaccatttcttgctacactaagaagaccatccacaagtaatgaaatgaatagcacctcccagtagtgtgttttcccaataccactatgcattcatcagcaattcagttcaataaacatctactaagatcctactctttgaccaataaatcactggaatacaggttccagcatattctgagaaaaaaaataattttggaggggctgtggcgggtggggggggggtgtcattaaggccaacttggcacattggggtggtttcctggagcacatgatgtctttggtgatgagcaagagttagccaggccgagaaaggggaagaggtgcttcaggtcgacagaagagaaagaataggaaagaggtatgaagcagcatagaatctgctgggcaattttaagctgtagaaaatgtgtaagatggagaattaatgagagaataagaatgtattagttattcattgttgcataataattattccaaaagtttttgtataaaaacaacagccatgtattttctcaaagtttctataggtcaggagtttggcagcagcttttcccggagatcctaatccagagtttctaatgaggttgccatcaaggtgtcaatcagggctacagttacctggtggcctggatggggctggggtatccacgcttttttttttttttttttttttttttgagatgcagtcttgcccaggctggagtgcaatggcgtgatctcagctcattgcaacctccgcctgccgggttcaagtgattctcctgtctcagcttcctgagtagctgggattataggcatgcaccatcacgcccagctaatttttatatttttagtagagatggggttttgccatgttggccaggctggtcttgaactcttgacctcaggtgatccgcccaccttggcctcccaaagtgctggggttacaggcatgagccactgtgcctggcctggggtatccacttcttagcttaattgtgtggcttctgcctgaagacctatcaggaggcttcactgcaagggcctttctgtaaggtagctcttgacatggtaattggcttttctcagaataagtactctgagagagacagacagacagacagcagagagagacagatacatcaatatgggagctgcagtgtcttttatgacttcatcctggaagtggcataacattacttctgccatattctactggttacacagatcaactctagtgtatgagaaagaattatacaaaggcgtgaataccaggaggtagggaccattggaagccatattggagccagttactgcaatgaaccaggaaaggaaggcagggtctggaaatggggaggcaatgccaagagcttaaatttgattctctggcctgcatttttcagactgctctgaggaacttcacagatatcacccagctaggggtggaggtagggagttgagttagcagggattctccattccctgcaaccagcgcagcccaggatgaatattcaagtcagattccatttgagttttgagtttagaggtttaagaatgttcaataattactgttttaggcagtgggtaaccatcaaagattttatgcaggggagtgaacacatattcagattagattctattttgcagagttagattggagaaggaacattgtggggaaaggatttgagataggaagctcttgcaattgtattagtaagagaagacaggatcaaaaccagtgcagtggtcatagggtagagagggtggccaaattcaataaatatctaggaggtaaagtcattcagatgtagtaattgattagttgtgtctctgaattcctcagctgtattgggtggccatcactcgatactaggaaaaataaagaagcaggtttggaagttagaatggtgggttccctttttgcttgtgttaaatctgagatacttttctgggtagaattgtttaaagcaccagttgtgtacttaggccagaacccaaaggtagacatcaggccacttacatacttttttttttttttcttgaattgtggtttagttttccctttatgagttgtctaagtttctctccagccttactccaatttttgtaacattgtttctgattcagctttttttctttctttttctttttagtaaagaaggatctcttcttctcagattgattactacttataaggcctcttgtagctgggattgttacagcaagtggaaatgacaccctacaaatcttatctgtaaaggcaggacatttaaagcattaaggctggctagtgttcttgtctttcaatatgaggcattttgacatacaaggtttaatgccttattgaaatccagcaaatggaagctaagaagggtgctttagtctcacaggattagagcatgtagggttttctttcctttttgaaaaaatataccaaggtccatctccatgggaaatcttattactaaggaattactggttatgcccacctttcccccccaaaaaagaaattaccagacaaatttaattttactgttcattgcttagaatctgtggccatctcgtgaatcttaacaggctgcttttatatctgattttcagacttgcagtttcccatcatctcccttcgtattattttaattaaaaattccattagcttaaaaaaaatcaatgtaatcattcagtagtaattaattcttaccaatcttctaaaggagaaatgaattaacaaaacttcaaaatgttcaaatgagtaaaaagtgttgtgtggttaatgggactggtagaaatgtcagtgtaatggatagaggggtgggttctggcaaatggctgactaaattgcaaatctcagttctcccaaagctggttgtatgtccttagacagattacttaaatgtttaattgaacatttacctgtaaaggtgataacattgcctgccttttgtggttgtggcaattaaatgagctggtagatgtatcatcatggcaaggtgtgtggcacacagtgaagggatgtgataaacattatctattattagtgttagtattgttggtattattaaagaaggtagtgtttcctgtaagagtaactcacatgagtcagattccagatttgaatatcttccagaatcctgagatattttgaaagaattagtatgagttattatttgccattccatcttaaaattcttcccttctaaaattcaaaaagaattaatgtgttattgttgctaagggtaactggccaaatggaggaaatgaaaattagtttaattgcattcattacatttttaggaaggtcttgatgtctaacattctttaaataaagaatgttatgttttaggaataaagaagagagacccagtttcccaaacccaatgaataaaattaacgttttattctaagttctatacaaaatattaaaaattaaggccctgtcatcagtttttagcctgcacattggcatatataagaagatagtcatgaatggatatcactaaaacattttatccttgtagcttatttatttagtaacacagaattatctatgcaacttttagaatggttttaaaagatttctcgttttataaattagctcaaaaattagaaaatatattaatctgagtttagtacaatgaaaaatattgatacctcatttttagtaggcaagcgtaagcatcatggaattggtctagctataatagatgttcaggtgatcagtagtttggaaatcatctggtctaagtgagttcatttaaatatgggagatttgtacttttgctttctaggaaaatagtgcctaaagaagtgcatttgtgcgacaaatgaccataaagataactgcctgtttttgcagcacatcaaacatattaaagaacatacttatagtatatgtgttagtgtgttttgctatattcacatcttttgctgagcattatgagggcacaaaagaaatgtgagtcatgaaacctattgcctacaatcttactgtgcacttaaggcaagcgtaaacacatgtacagtatttgacaatgacaggtgtacctgaaaatgtgtgttgcctatggcagtatatcattatataccagaattgctaatatggatggtaaattctgtgactcttcaaagaagggagtggcaaatgttcacaggagctgataggagaggtcttgtggaagaggctgaaggtgaactctgcccagagtaatcattgggaaattaaagggaaggtgtgggatggaagggataggcaggcgttcagggtagaaaattgcagatgggtaaaaagaccccgaggtcaaattctggtatcgcctcagaaaataatttcataagcagtagaattctgtcacaacatttgcacactcagaatattgaagagttctctgggggcactgtgtgtgtaaaaagtgctgtaggtttgcacacacacaaaaaaccgaatgtaaagtcagttagtaacctggaaataataaaaatctgtttcacattaggttgtctgatgagcagcttgaagagaatcaggtagggtagagtttatgaacaactgttgggaagtgagttaggttgtgacagttttagaatatgcagaatacaagaatgtatggactaccacatccagtctcttaattcaacagaaatatgttgagcctgtctcaaagagactgtatttgatagtagcatcttttgccttaatgcttttgttaaaatgtcatgaagtgtcttcaggtgtaattttcatttaagttttattcttactatgctatgaacctttggtgcttatcaaatgtaaattttcttcagtgaaggaagaaattactagcacagccattaatagtttaatgaaaagtcttattgcttcttaaaatttgtattttcatggtgattgacaattgttaattagttaatcctctgtcggtgctcatgaggtaggtcaatattatcttcattataaaatgagaagattgagaaatcaaaaacttcagtgaatttcctgaacaacctatttctgtattgacatggcaaaaacaaattgagtttactctcagattatttttttagttaaccaaatatctttgtgttgaataattgactatctcagatatctgttcctccctgtacagttaaaaatccatttataccaagtgtgagtttgggccccaaaaagtagatttgatctatgagcttagatgtcaaaggttgaaagtagcatttggatgaattcacaagctaaataattatatataataggaaaccccaaaataacaacagcttgaattagaaagaagtttgtttcaggccaggcgtggtggctcatgcttgtaatcccagcactttgggaggccgagacgggcagatcatgagatcaggagttcgagaccagcctggccaacatagtgaaaccccgtctctactaaaactacaaaaattagccgggcatggtggcgggcacctgtagtcccagctactagggaggctgaggcaggagaatggcgtgaacccagaaggcggaggttgcagtgagccaagattgtgccactgtgctccagccttggtgacagagcgagactccgtctcacacacacacacacacacacacacacacacacacacacacacacgaaagaaagaaagagtttcttttttttttcacagaattctagagataagcagtccagagctggtttgggaactcagtggtcctttaggcaccaagacttttttcttggtgctctgcttcctagcacatgactgccattgtcaaataggctacagtgggtgccagagttcatgtcaccatgtcctgttggaggttaggaaaaggaggaaggtagaagggctaacaggccctgctgcctgagttgattccctttaaacaaccttcccataagtcccatattttgaggtgtgcaactgatagtgtctcacacaattagtatatttgaatatttatattttacattattgtgtaacattttgtattgctcacgatttttttcgtctaatgtcatgtattatttagagtacttgctaaaacataagagcttttaaattcccaatatgggcagacctttttctctggttgataacttacattcttaaattatttagcaaatagcacatcaaattttcccatggagaaactgttttgaatccagggcagaactgcagtctaggactctgtgctttatccaccttcattctttgttttgaatgtgtcattactcctagagaggaaaataaggaaacatctttattatagaagtgtttaatataatcaaatcaggcatcttatggatatatgaccccagggaatgtttgcccaaccatgacatagcacatgaaacttctgtgtacccaactgacctcaacactgtcttatttaaccgtgggaactccactttccaggaaagtatcacaaaatatgctccattctatatgtatcctcagaaatggaggccaattagtgcaaggcttgtcgcacacctgcttttgggatgtgaggtgtcacctaggtgctagcctaccactgctagcttgagccatggaaccacggaggtggtgtgcctaggtaagggctgttgtgtgacctgcctgcttctttactggtgtgcatgtcgtatgcctcagagtgctgccacacacctctttctctcacctctttctccacagcctttcccagcatctataaacaaatgggtattgggaaaaaacgatactagataatccatgcaaatgaaaaagcttatagaagtaagagcttttcaattggattctgaagaacagaaggttggaatggaatgctgaagaatggggagagccttcaagttcctttctataaaagggaaattgagactcattgtcacttagtgatttactggctctgtcatgatttagacattgaacttctgactccaagtccagtgttggtttgctacaattgtttcatcaaggtgaaatcaataatgaatcacaccacaagctgttacccaaaagcatattctggatggaaataattgcttattagggggttggtacccttgtcttcaggtatagacttgtgtgttccagaggttgcaccagatatttatctgtaactaaatggactctgcaaacatcccctccttaccccccactccatctttttgagtacttctccagtccctagctgctaccccattctttgggaacaagctaagagaaaaagcctggtaatttctaagaaggaagactttcacctattaggggcttctgccagcaatgtgagagctgcatcattttcctctgatggacaggtcatgaggacagcatcaggtcaccattttggcatgaaagcaggctttgaggctctcagaacaattgttggtatttttggaagtcaactctgtgtagggagtgttgttcaaagaggtaaaatgattagctgctgccaggtctcttttttaaaaaaccttagtttttgtgagtatgtaataggtgtgtatatttgtgggacacatgagatgttttgatataggcaagcactgtgatcaagtctctgcaattgcaggcacttctctgccttttgagtggaagggtacagagggcaggaggctcattctcagaagcttcctgtctttagttgttataccagatattatctgcatggtccgagtccttgtcagttttcttgctctactggatatttttagatttctctactcctgtgtgagacccctttccagatttaaatacatctctaatgtatccccagtgtatattccagaaacaccgtaaaactgggtatagatatgatggaagaaaaagtaagttccagctctcagggactcatatttgctaattggaaaagttatggatgctttcaaaataaaaaacaagtttatagacagtctttctcttatagctgttgcattgttagagaattaaaatataagtcataggcaatgatgatccatctttgtacttgcaatgctcgggagaaacataaatgtttctcaccattgtttgatgtttgcaaattattaatatgtatacatctttgagggtgggaaagtatttgactgaagaatcaaagagaaggagggaggagcagaaaagattttcaatataagcatgtgacttttttctatccttactgaaattaaagttaaatatttgtaaatgtttttgaagaannnnnnnnnnnnnnnnnnnntgcggttttcacaattaagagtgatggcaaaaatcacaattacttttgcaccaacctaatattataacgtgcaaagtttgcagtgacttttttatttaagtttgctttgatgacactctatgatctttctaatacatccaaaatattgagcttttaataataagagatggaaagagatgccaacataagactgttctcttgtttatacactattagatcaaaacatgtattttctaaataaccatttctattatattgtcatcgagtgtgtatatgtctacctatcatattgctacaataaagtactatagaaattgttacagttatttattgctaggttatgaaagttagtagctacaaaacaataagaatttattacttttattgcttttcaagattctttggattgattggtggatctgcttttcaccaggttgattgggaggtccacagtggtcttactcacatggctggtgctggctgcacttgggagctcagactgtactgtcactgggggctgtggttgtcgcttttctaaccagtcctttccacatgtctcgtctggctttcacagcatgggtctaggttccaagaaggagtacttcagggtctaagttgcagtctcttgaggcccaagcttagaaataacagcgatacttctgtgttctctgttggttaaagtaagttcccaatccagctcagatttgagaggatgggaaataaactccacttcttgatggtggaataggaaggtcacactgcagaggagcacgtgggatggcagttatcgttgtggtcaccttgggaaacataatctgccaccgaaatcagagtctctcttattatcatttcttccaagtctaccatgtaagtttaattgatcttatgcttttaagtgagaaataggaagcaaggacttatacaatgtaatttcttaaactgtagtcttttgttcccttgtatcatgggtcgcgtttatagagtggtatgtctttaatgtcctaattctactctcagatgtcatcaggaatctttatttataaaagaagcattagtcaactgtggtggtttctcaccctgaccagtattgggcaatcactttatgaaagaccttacagtgttgttccccgacatattttaaaacctgttaggggttttttgtatacagcacagtaattgagttgtatttcaggtatttgtctcctaatgagagtactgcatagttaccataatcttgaattttctaattctgtttgtattcagaattcttcacagttacttttcctaacttatcttcttagtctgtggagaatttttgtcttagatagttgtcttgttcgcatttacatcactcactgtctttctctcctgccctccttcattggactttgtagcacgaacatgttggaagcagtttagcttttgttttgtaaagttacatgttagtattctgtgtatggtttcctacccagacctcatgtggcccaagccctggtatatgttaagcaaaggaaagctgacttttcctgatagggatgagtcagtttccttctgcatcaagatgtttatacatggggacagatgcagaggatgacaaacctggatcatgtgatctccagattgtttttctttgctggatttccacgtgggaagtggtaggatctagaattttgctgctactgcgcccaggatgtccgttgtccaaggtgtatccatgtttgtggtctggctgtttggcaaggagccaacgctgcattgttttggggcatggtcactctttaaaagaggagtgtgatcctgcttgatcaagtgaaactgtagaatgatttatttcactctgtgaagctataggtgtgttagttacagttactacctgtgaattgcttccaattttcacagtataagatggtatttccttctccaatgattttttttaaagcatactaattctaatactagcctttcatcatgattattgttgctgaaagtacatagggccaatgtaatccctagattggtgtatgatcaaggaaatcatatagtgtgccactttgatgacccgctgttccatttttaaaatataaagtatgtgggtaaactggatattgaatacattcttaaaggcgaacaaaagtcctagggatagagtggtggtctgcttcactttctcttgtgataggcaggaagaaggaaggatgtatagtgtaattgcatcactttatttgagacttaaatttgctttggcaatagcagctagagagagagagatgccctaaggagcctaaagtctaacctcaaatttactctgacccagtccacatgccgaaatacaggtagtatatatctgagagatattctgattgtatgatttggtccaaggttcattaattggcagagacctttgactaagacatcatttagaagaactggcagattaaattgaaagtatagttcaatgacttctataaattttgtatttctttgggtggttatatacatttctttctctctgatttaaatgaaactgaagactagtctgtgctctctgacaatagtaactcaacagtaattaagagaagcaatttttcagaataatgaaaagaatctatataaccaacatcggcaccttttcatctaatgcaggtgaataattgaatatgttgcgtgtagcccaggacctggtacatagagagtccccagtaaatgtttgatgaatgagtaaatgagtctcaattagtgaatgtactaatctattaataactcaatcaaaaagtctaagaatgggagggaaatatttctgtactaggatttctaaggatttatgaagattgttataataaaaagggaagtatttgaaactcatctcagtcttctagcagaaataaagactaaatatatgaatgccttaaaaacagagtttttatctgataactggtagagaaactgtttatttctttctatttgcactttccctaaaggacctatggtttgtgtctattctgtgaccatagtataacagagtacgtatttgtcttcttgaggatagccatcattcattcattttctctgccagtaatatgaactttcatagtattacgatattgttagtttcttaagtcatactgcatttagtggtattcgcattcattttctatattttcttgtgataaattctgttatagtcaaaaaatttcaaagcaccctggcaatgatttattttaatatctgcgtgagactaaatacacaaataagaaaggatttaatatgaatttttcatggatttgctgtaacttgaatattgtgaattgattttgtgcaagctgtcacagaccttctgattagcacatacttactagaacatctctgttagcaaaactggattacaaagtgtaaatgccaggtatttgtgcttattctgtttagcattctcatgagtttctttacgtatatctagtgtgttacatatgttttgaaagagtacctaccttagagaatgtggctcttgttttatggcccattttaattcagtatatatatatatgtgtgtgtgtgtgtgtgtataaagggacatgtatatgtgtctatatatatgtgtgtgtgtgtatgtgtgtgtatgggaaaaatgtataaagaaatggttgctacttacaaggctttacaatttatggggtgaccacacatacacacttaacaaatacagaaaaacataagacttttttcattcattcattcaatacatatttattgagtaccagctatgtaccaggcactatttatttcttatactgaagatacagtcttaaacaagacaggaaagtttcctgtttcttaggagcatattgtctagtgattatgattaagcacagcaaaatatagagagatacatcctagagaatataaataagcaccaaaatgtatagtcaagacatgagaacttagtggagctcaccattttccaggaaggcctccttcatgtcaaggaagacttgaacttgaccttgaggaagagaaggtatttgcagaggctcccagaaagaaagttagatgtgtacaccattgtgtgacctgagaaggccaaaacactctctaaagaacagtgtttgttcaaagaaaattctctgattctcattcctgttccatatgcaccctccaatttccacaggttaaaatctcaagactgtcagcgatggggttctattagaataagtgtgactgagtatctttgaagaaacaatctcagatcccaaatccatagcaagtctaggcacatagtatatatactacttgcatatatgaaattgatgctgaaagtgtgcaaaagtatctctagatagaaggattcaagtgctatagtattactaaataaaaaatatttgcagagagtggtggcagatgacaataacttctttttgaggaattttactttcttgtacctagtgctcctatcaagtgggatattttcatcagggatgatagagctacatagaattttgtaaatttataggaataaaagggaattaaataaaatagactctaagtaacaaggtctaaaattgactagggccattgaaacaaaaagatggataaggaagtgaatagaagggcataccttcagctatttctgtgttgtctgtgattgtgcagtgcttttaaccaaggtaacaagggctaagatgaaagtaaaatctcttgggcttcatatctgtcaaattagcaaaaagtgtgacaattgtaagtgttgccacgatgtggagtaatagacactgctggcgggagtttaaatggatagaaccactttgggaaaatggtttggcattatacactaagtttaaggatatgtaaactctatgactcagcaatttcatatctccataccctggagaaacaggtatgtatgggagacaggtacatgtacatgtatattcatagcagcattgtctgtgatagtcaaaactgaaaacaaaccaaatgtctggtacacagaataaactgcatattcacataatggaatattttcttttaatgtattttatttatcattttaaaaatatttactttttttttttttacttttttgggtacatagtaggtgtatatatttatgggttaaatgagatattttgatacgggcatgcaatgcataataatcacatcaaggtaaatggggtatctgtcaccttaagcatttatcttttgtgttacagacaatccagttatacccttttagttatttttaaatgtacaattaaattatttttgactatagtcatcctgttgtgctagcaaatactaggtcgtaaagcattctttctaacataatggcatattattagcagagaaaatgaatgaatgatggctatcctcaagaagacaacccctgcaaatgtcgaattgacccaagaaacaagatgacaaagaatacatacagtatggaaccattcacatggacttcaaaactaggcaaaactaaattatactgtctagggttgtatacataggtgtgataacaataaaagaatggaaaatcactatcacaaaggtcaggttagtgcttacctttagggtagaaggaatgggtagtgatgaggagggacacttgaggacgttttaggtgctgacagtgttctatttctatactagtatagtagttatatgagtgttgtttataattatatcaagttgttgcttttctgtatttttatgtaggtatatttcgtcaattttttttaaaagaaactatgtgaaagagataaaggatgtcgcagatagcagtatagaaagatttctgcccaaacctgctccttttttttttttttttttttttttttttgagacagaatcttgctctgtcgccaggctggaatgcagtggcacgatcttggctcactgctgtctccgcctcctgggttcaagcgattctcctgcctcagcctccctagtagctgggattacaagcatgggctaccacacccagctaatttttgtatttttagtggagatggagtttcaccatgttggccaggatggtctcgatctcctgaccttgtgatctgccccgctcagcctcccaaagtgctgagattacaggcatgagccactgcacctggcagcctaaacctacttcttaagatgtaaggcaattatgcaaaaagaggacaggtttgccatgtacattttcgttacatttgactgtaatttgcacatggtgaaaaacagagtttgctactagtgtctagtaatttaaaaacgaaaacctgtttttccagagtcagaagaagacatcctaggcctatagaatcaaatttgacaactaatttgtagcataattattttcccatgctttatgcatatttattgattgatgcagtctcttgaattatacctagaagcaaactgaccagcggatcagcagaaaattaacagcaggaaaaaaaaattagtatacatgtcttatctagagaaatgaagaaatttttattgcttttatcatttaaaaatcatttgtgaattcctctttaagagaaacctttaatagtttcccagtagtaccagcactgcagagtattatccagtaatgaaagagaatgctaataaaatcatttcttttttatattgtaatggatcaaagttgcaacttcaaaataccaatgataaaaatgaaccttttaagattgtaggttactgcttgccaaagataatattcattaactagagttcacatctcatgctctggattaaagaaattatttgcaagcaagtaagaaaaaaattatctttaatttgctagtcataaggcactacttttttgaaagagtattgtctcttaaaaatggatttttaatttaaattatgaaacagtcataaaatatcctctggtagaggctttgatggtttgcttgaaggttggattgtatgcaagaaattgtggaagcaccatttgctagaaataaattgccaaattgatttattttcaagacaaagccatacaatactatttaaatacctaaaatataaaaatgaacactaacaaagcagccaacgattccacagtagagcataaaatctccaagtgttgtgaagagtatcataaatacctatcttaagaagctcaattaaagtttggaaataataattttgttgttaaatctctaaagagctgcaatagtgagatcaccttgaggtagaatccagaaaagctagttttaaatattgtactcctggagcaatgattgattgattctctagtgtaaatttcttggtaatgtctgtttagagacttctaagaaattaaggaatttgtgtgtgtgtgtgtgtgtgtgtgtgtgtgtgtgtgtatgtgtacatgtgcaagcaagaaaatctgttaatgcagcaacaaccctttgtggagccctcatctgggcgaaaggtagaggagtgtttgctaataatctctgtgtgatagaagatagcttatgggttttctttaattgtgtggaatcatatgtatgatttttctttaattattgattaaaatgatcactaagcaacagggtatccagaactttttggttgttttatgttctgttatcgcctcttctttatttaccttcaactgagaaaacaaaaatattgacttaggaataaaggcagaatatatatgggaaaaccattgggcagtggacccagaagtgaccttggagatcattatatacagtggattcaaactgtgctttggggatctctggggcttcctacagtatgaggagagcagagtggagatgggccctggggactggaccctgagggtcctaccttggattcaggttgggtggttttatttatcttggacttccccttaaagttttgtttaaagaacaaataaaaacagcttgaaagccactcctttagtaaataatcccctcatctcccactttcatgtttgaattaattgcagtccagtaaagttgtagcttgttcaagatttcactgctggtagtggcagaagcaacaacagaagccacatggtcatgtctaatggggctgtttccctgataacgttttgctttccactatccatacccacctactatatcttgtatttcttaatgatacacgccattatttaccacctcactatccacttccctgtacttgagcacaagctacttttgtgtcatgtcagggacacaaaagaaaacacagttagtcatgatgttacaaaaaagctctggggaggatttaaaaataccagtgttgagaagaatttgttggaaatgccctttttgtgaatatgtgccattattgtgccctgacattaaggcaactcatgtgaaatgtaagtgcagtgacatggtacagatggtgactgagaggcccaaatctcaaataatgatgaaatgaaattagacatttttttcacagtaaatctatgagattcaccagaataaagtatccgaccagaataaagtatccgacatctgagtcagcatcacagtttgatatgggatacagcaaaaagtgggaaactggcaggtgacatgtgtaagtgttggtagacatgctcatttgactttattcaaaccaaagacttgccctgtgttttccagggcaaaaaataatatgtggcagtttaagacaataaccttggatagcactttttcttctttttattcccctcctttttttctttcaataaatattcattgagcgcctattatgagccagatactgtcaggtactaaaatatttcctgtaccaaaagaagttaaaaagatgatttttttttttcttggtgcaatgattggaacttccaaatgactggaatgaggatgtcttaaatcctgacaacttttcaagtacagttgtatctagagagggtgttgattattgtattctggaaactcagaaattctattttctcgagtttcctcaattgaaaaataggaataccacttgtagaggcttatgttgtataaataattgcaaatatagtatgccgagggcttggcgagaagggtggcagacgtctacagagagtagaattgtctgcaggatctgtggcatttattgactcagggatctttgggtgtttgaatgcaaaacccagagagctgacctgtatttctcctggtggaagatgagcctcacaattcaactaactgcttaggaggaaattaggcttcctatgaattaagtatacgttattgtaatcctatatctgaagctcaaattcattacttactcttatgtagctgtgtttaattccactacctttacctatgagtgacaatagcaggggatattgtcaaataagatggccacattcaaacattccacatgaggatttgggaggctttcctaagccaaaatgctgacatggaacatttattcattttattgcatttaattggtatcttttcatgttgagtgtagaaatggtcactttaatgtttacatttttgtatgtttttactttagacggagggtaaaatagagaaattgatgtcagcagtggacaattttcaatgagaagaatttcactcgtgcattatttatggccacatgtgaaagaaagaacctccatttcttatcattcaattatatcttggtagaattctgcactggagccccagtcatttggcaagtgtattaatagttttggtaatgtgactaatgctagtcctctgtaacagtagttccgttactggcctttcctcaggcaccccacaaagctttatatttcgtctaaatcaaattttgggtatcataaaatggagtacagtgatggaaatgaattcatttacccatccatccatccatccattaattcatttattcatcttttcattcaagaatatggcttactatcagctgggtgcagtggctcacgcctgaaatcccagcactttgggtggctgggtgggtctctactaaaaatacaaaaattagccaggtgtggtggcgggtacctgtaatcccagctactcaggaggctgaggcacgagaattgcttgaacccgggaggtggaggttgcagtgagccaagatcacaccactgtactccagtctgggtgacaaagtgagactccgtctcaaaaaaaaaaaaaaaaaaaaagaatatggcctactgtgcatcaaacactgaacttctacttcaatagaagtagaaattgctctctagttaaaatttggtagcaaacagtggtatcagcacctccctgtctactcatttgcagtcagtactctgggctcccagcgaggggcccaggaataagagcacagaatgcgtatttcacaggtgttagtgcttggaatgattgatgaaatttaaatttggaataaaacaccagctttttaaggtgttcataatcacctagatagtctgatattaacccttagatcaattttggggagtaaagtataaaatttgtctttcagaggaaggccaacagctggattagaaggttctgaattttaagctgcagttcatcttgatactattactaatcaaagcgccttcttcagttactctggatgcttataaaccgcagactgcatgcagttcatcaatttggctgcttttccatagctgctatgaaaattgcaaacaaaattgcttttcattttgctttgacaggcagttttaattttattcatcattttagcaaattgtataacatttcagttgtgtgcagcattgctttttgtcttttttttgcactgtatttatgccgaaaatatgaaaacaacaataaagaagagaccaataatggcatgttgtagttaaaaagggcttattaaaaggatattttctgcctgggtgaaaaactttcttgaacacgtcataaatagtttataacacacagagctacacttttattgtgtgcggaagttgattgtctagctagccgcatttttaaaattaaaaaataattttccccccaattttgactttatgtttcgtttactcagaccctttcacagcctaattaggcaatgactatctatctgaagtcatcataaagaccaagtaaatcttggacacacaagagagttgggggtaagtggggaatgcgttggttagggaaagatggaggaagcacataaagatttatctgataacaaagtatatacattttcattttgtagaaaaattactaataccatcacagccaatgggctggttttatgatgcgcttcctgagctcttcattgtagtttcagcaatatgagaagccctgcaagcatgcaataaaaacagagccgacttcgtgctcgccttcctcattgatgcctcttgcacaaggaaagttctgttcgcataatcactgagggctggtggcatgctctctaaccttgaatgtgaagggactggggagggaggagaatcctttctgccaggggtttaaaagaaaataatgtttattcacaatactttttaggacataaagacttttatttaagatttacaagattgctggtaaggatgattcataaccgaagtccagttttccttagggattaaccaccatggtttgttttttgtttttctagcatagcaactgaatttcatcattcattttgtcatttagcaatagaagacaacttcaccaaagaagctcacagtacgagtaaaattggaagtaaatggaagccatatgttgttgctgtaatttccaaggttaaaaaaagctatagttttggctattgccttttattctaaggagaaggaaagttaaaaaaaatgcttttattatcaatagccttaagttttagaaaacatatttattttgttaatggcagcatgaaaagctcatgaccaaagtgtttggagcaaggctgatgtctggcagtaatccatttcttaacttatgtacaactgtggagttattaatgctagtcaggttatgtgcaaggattcaggaaaattctttattcctcattgactcctgacagttattgtacctaggaactgggtaacgtgttctgaagtgagcaattatggaaatgtttacttcactggctgcatgtaaatgtgtgcagagaatgtaccagaatttttccttgggggtatttaattctctccagggcaatgaaaatcaaatgatttcttttttttttttttttcaaagctgggtttttttttttttaagtgttataatgcagctgaataatgatgaatacagtagaggaaaannnnnnnnnnnnnnnnnnnnnnnnnnnnnnnnnnnnnnnnnnnnnnnnnnnnnnnnnnnnnnnnnnnnnnnnnnnnnnnnnnnnnnnnnnnnnnnnnnnnnnnnnnnnnnnnnnnnnnnnnnnnnnnnnnnnnnnnnnnnnnnnnnnnnnnnnnnnnnnnnnnnnnnnnnnnnnnnnnnnnnnnnnnnnnnnnnnnnnnnnnnnnnnnnnnnnnnnnnnnnnnnnnnnnnnnnnnnnnnnnnnnnnnnnnnnnnnnnnnnnnnnnnnnnnnnnnnnnnnnnnnnnnnnnnnnnnnnnnnnnnnnnnnnnnnnnnnnnnnnnnnnnnnnnnnnnnggggaaaaaatcccaaatatgtatgcagagttatgaaatttctatggatgcaaaatggattttgtgcacatcacgcccagtttattgatgttgcccagtagaggttttttcttttctttccctgtcacctatcaggtttacaactcttgttgctgaaactattgggggggcattttcagtattatatcttttctgagaggaaaaaaaatcataagaattaagagatttcatgtgaatcagaatgagatgttttcagcattgtgacatttctaaagcaaacgagttctgtgaaagtccattgtagacagatacaagcaagtagaatcctaatgcttggtcaagaagttggatacttatctgcgaatctgaagtcacacagtccttagtgagaggaaactggcttcaatttaatgctctttctgaggaggatgactagttgtatcaaagtaattttttaagtttcctgcagatttgtttttacagtagtgaaaaaaatattagtttaaattggcctctgtggtcatgtgcctgtcattggaatagagttagattacattaataaggaatagttgctgacctttatactctcttttttttttttctgaatttctcctgaatttcttaaggaggggtttcataaagagggtttttatgtcttgcagaaaattgagttttgtagacattacctaactcttgatttgtcacaccgggatcaataacatttcgctgctcttaaacacacagaatcacaggggacacataatgttttttataagtgcagtaaagttaacgtgttgttgaaacaaaaactcctctgacagtcctgtaataagtacactctgaaactagcaaattatctgtaatactaggaaaggcaggaagagcgcttaagagtacaatatgtacgttgttggcattaagcgctgcaagaataagaaattaggatttgctgctctctcctcagttgcatgtcagaatgattacggagtcagtttcctcagaagagaagccgaccaggccccccaggagtgtttcttgaggccacgtttttaccaagtttgcttggtatgtttggtctctttgttctttgaggatattctgtattagttacagagaagcattttccttatagcaaagaaggtattttaagctagataagaaaaatgggccattttcttctcctgtccccaaagtccatgtctggtccatgaattttcttttggagtattcactgatattctaaagatgtcttcagcaaatataagtcccatatgatgtaatttgcaaaagatatttggaattgaaaccacccttgtatgtgctttcatttcctcagtccagggagtccgaggatcttgtgttagattagactaggtgggcacgcttttaaccgctgaggtgccttggcctagactctgcgtcttcccctcctccccttttcgtttaattaaatttctgattcccctttccagaccttcaaatcccgtttttctttcctcctacccaaatggtgtttagttgttactcagcttctatttcaagaaatgaaaaaatagagattatttttaatatctgagagatatatagtctatgagatgtgactgattattgtatgacctttgttttttctcaacatttgtttttctttaggaataaaatagtagctaagattggaaatctgtttcaattgagaagaatgggtgttttgttggtggcagacattggctctcctctgtatggtggtaggtagggctggaagctgatgatggctgatgtgcaaatcttgtcattttatgcaagctggtgctgttcatcctccagctctttgcagagaatgtagttttatgttcatttaataattatccattttggttgtacttgtcggggagagcttcttgagccccatcagtttttcagagaagcaccactcaagctcttctgctgaaaatgtttttccttccctcccttcacttcattccactcttccccttatcgactctctcatcagtgccagagctcttcagtattccactcctgtcctttgtgaagtgattttgcccagacacgtctggctcagggtgaagtgccctcccctgagagcgcgcactgcagccccaggtcgccagcaccatgaatacattattatcccaatttccatcctgttgccacggcagcacttttggagctgctgggttattaagtcgtacatcactaataccctgatatgagcagaagttggatttaatatcggcctttgatcagattacctcccaacagtcagctgtcattagaaaattcctttgctcattataccctcagagctctggcctgtgtagcaaaagggtggcaggcctgatacatggaggcaatttcaagcctgggccttgcactgtacacttaatttattttctgacctttttgtgatttggggagattctgtatagccatgcgtgcatgtgcgcgcgcaggcgcgtacgtgtgtgtgtgtgtgtgtgtgtgtgtgtgagaggtgagagagagagagagagaagtgcaactacaaaatctgtctgtagttctgtaggtggtggatagaggtacgtgtgagggggtggttgtcttttgccaagtgatactatactttgttggaaagtgtctgttttctgcctgtcctcgggtaatgtataaaacatggtgcttcaggtagagatgaagggtaaactgatgtccccctaaatggccagcctgtgtatgcacctaacacttcactgagcaatctgtcaacatgtcagcaacacatgttttataaaaagcctccagtgggagcaaaggctcctgccagggcttaggaaatgctttgaattcagcagatttctattgctggagtcccccgaggttccttttacaatgcctacatttcagaaatttgaacttgggacccttagggggttctctccgaatgcctgaaaatgtagagttatattgttgcgtgtccccaagcggtctttactaatacctgaattcggagaagctggaaattacagagctccccaggggaagctttatccacaccaggaagaagagaataactctgcagggagattgcttaatgcattgctgaaataaaagaatttgagagagatgggttgaagtgttttttttttttttcccttttctggccactccttcagcttagctaagtccttaaagacaaagtcagggtaaggaagcagctgggctctttttaatgaaattttagatgtggcttttgaaatagtcagatgcctgatgcctccctgtgtgtgtgtgtgtgtgtgtgtgcgcgcgcgcacgcacatgagtgtttgtgtagtctctctcactagaaacctcttttgtttacatgcaaaaagttgttttcatttttaggtgcatcatcagtttcatcttgtttccttccaggcttagctgtttctttttttatactcccaatgtacctgtctcagttacttggaaatatttcttcatctctttctctttttttatggtgcttttcttttattacatctgcctgtcatgctttgtactctccccttttcataacttgtggtgttgctactttcctttcgaactctcactgctttattgaagacttctttatgcctatgactctgcctctctttttaattttcctccggccctcagcgctctcgtctcaactcagattttggaaatacttgggtattttttggctgctttctgatgagatgactttgctgatttttttgtgtgacgtattgttattttgctgctgctacatttcatcaagacaggttgctttgacaatttggagtagatctgcaagcttcagactcggttgtgcattcattcaggaagtaaaggatagctagagcagtgcgtttagtgtgtgtatgtgtgtgtgtgtaaatgtttatcatacatacatagggcttgagggcaagggtgggagtgtcattgttgtattttaagtgaataaaaaattttgaagtccatttctgttctttattatctctggtaaagagaaagaaaaatatcctccttgtgtgtgcacttttctagatctttccttggctgtcttttgacaccatgtcacctgaccttatcaggagggagctgggggctcaggctcatgtttactcagggtcctcctgggactgaacactacctttgagtccagcttctttcagctttgcagacaaagacaaggaggacattctcacagaactcagccgtctagtgtaaaacagttccagctgttgctgctcatgaatttttttgggggggggggaaagtattggcttgttttttaggtgtggctacattcatagagctgtctccagacattgattttttttcttcaactgattccgtttaaaagtggtgagggattaaaacaccaactcttttggaatttggcaaattataataaggttttaaactcccgtcaacgatgatggggggtattcagatcttttgcttttgaagttaaaaagggtcagatgttttcagatttacccaaatttacgatttccagcagcacattattttctattttccatttaagtttatgttcagctattgaataatattcttggatttttctggaaagctttctggtgaaacatcaagacaatgaaattaattatacttaatgcagacacataaacttggagggggtatagttggtgtttttaaactaatgttcttgctgatacagcaaaatcctgtgaaggttttatagacatatttattgtggtccagtaattggagaccgacctcagcttttaattagcgtatgttggaccagagaccagggaagagcccctgaattaggctctgattttgactcttgctaagtgctggcaaattcaagggttaagcttagagcacagcaatcctcatgagtaggagaggcaagagtgggaatgtatgatgtgcaaaaccaggtgactgaggtgaaattcttccttagacagaaggaggcaacttttcaaagtgaggggcctggtggaagctctttgctgagaaaaaagatagtgagtggaggtgcttgttgatatgtgttagaggctcatgccaacactcctgtgagattttggttgtactttccttggatagagtgcttgtcccatccattacacagaaagaggtaccagctgcttcctgcacaaagcaggcacgctgtggttaaagtcattctctgtaggtttaatgcattggaggaaagcattttgtacttaagcactttaaggattcactgaaacacttgaatctggctccctaaaaattttaaaagctcttttatctctactccacgtggtgcctttcacttagaaatcttctgtgttctttgctgtccttgtcagtctggaaagtgctttattcttgctggatttttttgttttgtttttcttatttgcaggtgtccctggtaaaggcctaaaggggggaaaaaaaagcagtaggattttttactaaaataatatttctttttaggtgtggcattttgtatataatttaacttaatttttttgggcttctgactagtcctttcaaaaagatccctctgatgccctgtcacagtggggatggaatattgtttttggcacatccacattgcctttcatttccctgtccccaccatgcaccgccccctccatgtgcgagctcacactttattacctgtatacttggccagccggatggagtgccgctctgcagacttcctctttccaaacactgaactatgttattctgacaccgggtgctgcctcccctagggcttgggtgtgaaggactagcctgcactttgctccctggtctagtggcccgacgcactggtcacaagccgcctggctttccagtggttccgatgtgcatgtttctcaccctgcttctccctactcctctctggccctcctcctttctgccttcctacctggctccaaaggcagctgatccccctcatccccccaaaacagttttgggatgttttggaagaaataccagtacacatattcataggtgctctgtgttctcaagtttaccttccaaactgtagaaagtttaggaaatggagcagaggagttgttttttggaacccttggattcttaaacagaattttcctgtaattataaacgagtggcaacttcctaacaaaattaatccttttctcaggaagggtgcaaagagtattttcaagagtctgaaaaacaggatcctattttgaacaaaaggcaaaaagctttgcctagaatgtgagaggatttttttttttctgccagttttaggccagcaggattctagtaaatgctgatgaagtaccgcctgtgattccttccgttatttttgaccgcatgctttattctagccacttgcctggtaagatactctaaactgcactggacagtcagaaacctcctaaagtcttttggtaagattgtgtttcatcgcattcatggaaggcaagtcacattgcctgagcgcaatttctagctccaccttttaatagtcacgtgatttggggaagttgcttaactaactctttgtgcttctgtatctgtaaaatggagctactaatagtccccttctcttagggttcccttaaggagtaaaggagattatgcatgtcagacacagtgtgagtttagaacatagtgttcaatgactgttagctgtgattgattgttactatgtagagtaagtcattcttaaacttttactgttttccacagtctacatttccagcacatgcattctatggaacaaacttcttgacttgtgatttgggtcagcaaacttaatttgggccaaagttgtactttagttagaaagcaagaccctcccacttgccttctgtgtgcaggaatgaggaggacatttcctctctcatttagtatttgtgttgaatgacaataacaggatcaaagtaggtttacatcaagcataatttcctcacgtgtgtttgagattgcttcttgctttgctcattattttctagtcctggttttctatgaaaaagtttctgcagatcaaataccatgcaagacggataaagctgtaggtgcataggaaattaaatggttgtggaacactaatttatatatctctggactcttcacccctaagtccattatttgttgataggatgtaagagaaatttcacaactgggaagtagaaaatgagggcaagacaggtgtaaggattgatttgcttagaatgaatttaagcaaggaattgatagtatgagcggaaagggatttgggtgagagagagagtgagacagtatttagaagcctttgtcatgagcccttgtatttaggtgatcggatctatggtttatattaatatatattatccttgatcaatctttgatgtgaatacatttaaaacaaatatattcctagaaggctgggaaaaccctgttcttctcaatgggacaataccatttacttttgctttaaattgttttacagagaaaagaattgatcagaaacaaataagggtgatatcaacatttatatgttatccttctagtttgcccaaaatctcacaactactggatgtgggctctactgtcccttccttctttgtttctcactttgaaagaagcctggagtccttcagaatccagtggtactacatgtagttctaggtctgacttgtgtgtgtgtctgtgattgagtaaaggtgtagactgtcatcaggtaatgattattgcatctgaaacagagaaaaggaggagatacaaagagacattagaaagaaatcttgctctttttttttttttaattttttacatcccttcccaatcctgatgaaaaccaaaagagagggtctttttctttgtaaaagtgcctgagtgtgtgtgtgcttaaacagaattgtcgtgtgccttcaatgacatcatgggcatttcaccttcacatgtgccacttaatggtgctggtgtctgtgttatgtgtagacatttgaggcatttccctggcattttcttctattattttcaggactgggagagtctgaggcaggagggccatctgtcagggctgcggagcagcgatgaggggaagtcagcgtttgggtggtgactgtagaggagcatggagtgtgacgttctccaaggatccttccagctctgagcctgtgattctgtgaaataatttggccctaatgtagtgccagggacatttttttgaaacctaatgtgatatcatatcctttatcaatatatcgtatcactgcagtttgtgacattatgctgtaaaatgctagaccataaaagcctataatttatgaggctatattaggtacttactttatgtattatagcctgatagccttgtaattcaacattgcctacatttattctatatataattccatggagggttctggtgacattataaaccacaaaagcagagctcaagtggttagtcattagaaccccaagataaaaatacctcgtattacattattcagtatttattatttcccataatgtgaagttaaaacgcttgcatatgaaacattttctatttacattccacatcacggcattcatatacatgtcaatcagaagtgctctggttgaataccacatcacaaccatatataaccttgtttttgtttgaaattatgtttgctatacaaggatgtgttgtccatccctctgcaaaacaagtttttcccctgactggttatcaaagaggaaattctgctgcccattcgttgtggagttttttgttgcctgttaaagagaagccaagtacatttgtttttgaatgaattttaaatcattcatacagagctttgtcaaaaataaatactctatgaagctcgtttacacacaaaccactgtagtattggtcatgggccaaaggctgtagttatactaacatatgttgaaatgcattagatcattactgtagaatgctgtagtatatttttataagttgtctgagtgtccaaattaattccataataagtctgattgatgtaatcctcttatataaagttggttcttgttgtataaacaatgccactctctctcctgttcttcaccttcctcctcactactcctgtctaccttttctgggacattttgattatagaagccatgggtggcatgacagattatggtaacagtggcatatggtatatttcatttgatttcagaattaaaattaagcgcttcactctgtcttcccccaccagtttctccacaatttgggtagtttttccttgagatttgcagagactaaaagtttagaaaaagagaaagataaccaaaagttaataaaataacggagttataaagtacctgaagccaacctactgtaaaaagtgacctgttttatggcatcactttataataactattcacagtggcaagcaagtctgtagaggatccatggttatagtcatttattatttgttaaaagtggagaaagagagattttttttttaaacaagaggaggaaaaattagaagcagcaagctgactgctttcactttaaattacagtgcaatttcttttctagccagcaagtgacttgaaagtattgaaagataaacaacctgagcaagggccttggattcttgccatatgctaggatctcaattaagggatgaaattgcaagacactcttcatttttatcaccagcgaggctgggttctgtgggtcagtaaagcaggcaagagtggcggctgttcgaggcatgggcacagctagtggagggtcataactacctgcattagcattaatgggacttagcagcacagatcgcttcaaatggaagaacagacccaaaagggaaaagtgggtagagagtgggggttaactttacttgaatctcctctttgttggaaatacttgtctctttttctttgtcatgtgctgaggcatttactaatgagtaagtaacacaaaaaatcacagatgaaagaaattggattctcggtagaggactgagattttaagtgctattcaaaatacaagttgcagaatattggaattaccacatttttgggtacatgaatagtgattctctccatctgagcactaatttgcattgcctgtgctgtcatattttgctgtggcaccattttctctaagtattgcattattgacttaaaaggtgtcattttccaaatgatggaggtaaggaagtacattttccttatttcgtaatttgcacacagattgaagaagacttaccattgtcacaaaatttggatatgatggatcttgtattttaactggattgtgggtgtagggaaatctaccagtacattaattttaatggaagattgtggcatccttgaaaaatattttgaaagttaagtcatgttaattttcttccttatttctttcctcctgtttcttaaggcctcatcatctttgactccttactcttctgtgccatcaatgataactgttaattcaagataattgtggctttagtaatgtttctatttagtatggtgcttttcacccataaaaatatagtgcagatgttaacttacctgatccagagctgaaactaaataacttagtgaaatgctaattttcttttaggtgtgttcctcacagaaagataaggtaaatgacatgaaatacacacacccattcttccactgagcctttggcactcaggtttctgtcagtacaatcatttatgcatattttacttaatagttgagggtccgagtttctctttgatgtcactccgctactgatctttaacttaaaaacccaagttagatttatgtaggggttttttttatttttttgtgccctaagcttacctttctcttacttcctatatatgaaaaactagctggtttgtggcaataggaaaggaaagtaacattgttttaaagccagattttgcagtggtgaaatgaagaaggaaagatcgaaaaattataatatttgataagcttttgctcttaataaatatataatgcttatattccctttttcagacattctgatgtaatagatacactttttttttttttttgagacggagtcttgctctgtcactcaggctggagtgcagtggcataatctcggctcactgcaacttctgtctcccaggttcaagcgattgtcctgcctcagcctcttgaatacctgggattacaagcgtgtgccaccacactcggctaatttttgtatttttagtagaggtgaggtttcatcatgttggccaggctggtctcgaactcctgaccttaggtgatccacccgccttggtctcccaaagtgctgggattataggcgtgagccactgcccctggcctgatgtaatagatacacttattaatgataatatccaaactcatttaactttcagtttagaatgaaccatcacagattgtgttttgttaaatgtaaaataaaggtgaactaaatatatctgtgttaataagacttcattaacttcttcacagatacaaaatagaaagtgacgtgcgcatatgaacgaggctttggaaggggcagtgtaaaattgaagtgtgggatgtgtcttaaagtacaggtcagtttcagggagctctgttttccttgaattaggcaggcagcattaatgcattatgctccactgttcagggaggtgggacccctaagtacttcctttggtgtccaagtatccattctaagtgagctctttctctgtctccatgtattcagcattaaagtgatattttacattgcttagaaattatgagagtgtttgttgctgttgtgtaggaaggaaataaatcaagggcttttgtgggatttaaaattcttcccaagaggaaagagctaatattaaggccttcacaagtgggattaattttgtatatctctcaggagtctattgggtattatatttatacattataaaatgtgttttgatatgccttaaattaatatttttctatctgcagggtgaacgtgaaggtagcactttctgtctggggtgggtggagggggaggaaggggaaggaaaagagagagtgatgaagcccctctttgctgtgcataagggcatgcatatttttggtctgatagtgatcattttctgtgatgccctgagtagcctcacaggcacagtttacctgtatggtggcaccaagcagaaaaattccctgctttttccactatcactgttcaaattttacctttataagttagcccttgaaagtaagctctttttgcacatggtgccggtggccgattgccaaactttgtgctcctccgccatcaatagcagcttccctggacgtcttttagcagatgctgtcaactcatcacctttctctcactcccctcacactgccttcatggatcactgcgtatgctggtgctcatgtgtcaaggggaagggcacagctgcaaaaagggtcacccctggaggcccaagcttcctgtctccgtggcgtaggcaatcctggtcagtctagccctgtgacctgtttccctttcctttccttagatttgtttggcaggaaagcccattggccccagtgcagaacactaaaccttggctgatggggagaaggaaagagggagggagcaatccctgaaaatgtagtagcttgtcatcatgtggatacagtgtgggtaatcaaaatgtgtattttgaaagtatgatgtgtttcttgctgtctggttaataatctttgttatcttaagagtaaatgggtaggcgtgctacacatgatgttattaccgcatgagtgggtgcccggatggccaataaatcaaagtgtaaagattctgtacattcgttttcatttgttcactagtttgcattcatcttaactactcagccagttatagctctagattagagtaaaacatgcttatttgtcccccttttagtgatgtccttggctttaccttcctattttttaaaaaaatttttgcgccataagttgtattgggagaaatgttgaagttcatccttttacaaaacctcaattatgagatagaaaggtttattcaaatgcctgtcatatttttgcaagttttatcgcagcaggatccagtggccccacaaatcggcaggaaatccactgtaaatttttcagtaccttgatgattgagtgtttgcactatagcaagtttttttggcaatattttataggttggataaggaatttgttttgaatgaaagcccagataaggtttgtaagtttttttctttttcttccttatttctgttccctccacccgctttggggatgaaacttttttttctctgtactctgctgcttagttgaacagtaggatattgaggtacttgccatgcctgatggtcataaagttaaatatacaacaatgaggaaggaatctaggggacaagccataagtcccacaacatactttaagatactgtaaatatattcaaatgacaactctcccatccactagacacaacatcttatttcattctgtaaacaagtctgaagaatgccccaagaattgtacattgaatgcctggcagtatgcaagtatttcttcattattccaaagtacctgcccacaacagtatcataaatatgagtagattcagctatattgaactttgttacattttccttccaatgagactatccctgtttccattttgttgtgttggtagattctccctttttctgtaatacataatctttggaaatatttgtcagtgaaattttattcatatgccattaacctctaataaataccacatatctaattgttttcaacagtatggtaatagtctgcattttatgtatttagataacagcacagtaacaacttacctgatagtcagctgactctgggaggatttggtcatcagatccagaagttagaagagaccgccttctggtcgtgtcatatctacatagtagagtatccccagtttcccttaaacccagctgaaatcaccaccatgactactgaccatgttggggaaattcttgtgggtatgctggttccttggtattccttgaataaggaaattccttaatagcaaaggaatctcctcattccaggatcaataattcttatagcagagtcttgggaggccaaagtatcagtgtgtctgcatcatggaagaaggttcttcccttgccctttggaagtgaagaaatacagctgataaggagaggtagattccaccttttaatcttccaccagctacctctaagcttgcctgagttgtttaatttttctggccctcagcttcttggtctgtgagatgatacctctgaactgttaggaccctttctaccctgaagttctgtggttctacctaaactttaaacaattagtttattattaataatagaaaactgtacttatcctaaccccaaattagccgttatggacaggtggcagatttcttataataaggcctgtacaagatgcaacattgtggtagaaacttttagaaagtaaaacaaccactcctagctaattttaaaacataatgtcttatgaacaatccatatatactaagtagttataacaaatatttacatagtactctctatgccttacactctaagtactatacatacccttttattaatctgatttaagtgtaattgttattacctttttacagatgggaaagctatggaccagaaaaggcaaataacttgtccaaagtcacgtaaatatgaataatgaagctcgggtttcaacttaggcatcctgcctccagattccatgcccttaactcctataccaggttccttctcaaacaaccatatttgtcttttgttttcctgctgctgctactgacattgatgatnnnnnnnnnnnnnnnnnnnnnnnnnnnnnnnnnnnnnnnnnnnnnnnnnnnnnnnnnnnnnnnnnnnnnnnnnnnnnnnnnnnnnnnnnnnnnnnnnnnnnnnnnnnnnnnnnnnnnnnnnnnnnnnnnnnnnnnnnnnnnnnnnnnnnnnnnnnnnnnnnnnnnnnnnnnnnnnnnnnnnnnnnnnnnnnnnnnnnnnnnnnnnnnnnnnnnnnnnnnnnnnnnnnnnnnnnnnnnnnnnnnnnnnnnnnnnnnnnnnnnnnnnnnnnnnnnnnnnnnnnnnnnnnnnnnnnnnnnnnnnnnnnnnnnnnnnnnnnnnnnnnnnnnnnnnnnnnnnnnnnnnnnnnnnnnnnnnnnnnnnnnnnnnnnnnnnnnnnnnnnnnnnnnnnnnnnnnnnnnnnnnnnnnnnnnnnnnnnnnnnnnnnnnnnnnnnnnnnnnnnnnnnnnnnnnnnnnnnnnnnnnnnnnnnnnnnnnnnnnnnnnnnnnnnnnnnnnnnnnnnnnnnnnnnnnnnnnnnnnnnnnnnnnnnnnnnnnnnnnnnnnnnnnnnnnnnnnnnnnnnnnnnnnnnnnnnnnnnnnnnnnnnnnnnnnnnnnnnnnnnnnnnnnnnnnnnnnnnnnnnnnnnnnnnnnnnnnnnnnctgagaatgatggtttccagcttcatccatgtccctgaaaaggacatgaactctttcttttttatggctgcatagtattccgtggtgtatatatgccatattttcttcatccagtctatccttgatgagcatttgggttggttccaagtctttgctattgggaacagtgccacaataaacatatgtgtacatgtgtctttatagtacaatgaattataatcctttgggtatataccttgtaatgggatggctgggtcaatcggtatttctagttctagatccttgaggaatcgctacactgtcttccacaatggttgaactaattgacactcccaccaacagtgtaaaagtgttcctatttctctacatcctctccagcatctgttgtttcctgactttttaatgatcaccattctaactggcatgagataatatctcattggggttttgatttgtatttctcttaataaccagtgatgatgaacttttttttcatatgtttgttggctgtgtaaatgtcttcttttgagaagtgtctgttcatatccttcacccactttttgatggggttgtttttttcttgcaaatttgtttaagttctttgtagattcaggatattagcactttgtcagatggatagattgcaaatattttctcccattctgtaggttgcctcttcactctgatgatagtttctattggattgcagaagctctttagtttaattagatcccacttgtcaattttgacttttgttgccaatgcttttggtgttttagtcatgaagtctttgcccatgcctatatcctgaatggtattgcctaggttttcttctatggtttttatggttttaggtcttatgtttaagtctttatcttgagttaatttttgtataaggtgtaaggcagggatccagtttcagttttctgcatatggctagccaattttcccaacaccatttattaaatagggcatcctttccccattgcttgtttttgtcaggtttgtcaaagatgagatggttgtagatgtgtggtgttatttctgaggcctctgttctgttccattggtctatatatctgttttggtaccagtactatgctgctttggttactgtagccttgtagtatagtttgaagtcaggtagtgtgatgcctccagctttgttctttttgcttaggattgtcatggctatgcaggctcttttttggttccatatgaaatttcaagtagttttttccaactctgtgaagaaagtcaatggtaccttgatgaggatagcattgaatctgtaaattactttgggcattatggccattttcatgatattgcttcttcctaccatgagcatggaatgttcttccatttgtttatgtcctctcttatttccttgagcagtggtttatagttcttgaagaggtccttcacatcccttgtaagttgtattcctaagtattttattctccttgtagcaattgtgaatgagagttcactcatgatttggctctctgtttgtctgttattggtgtataggaatgcttgtgattttcgcaattgattttgtatcctgagactgctgaagttgcttatcagcttgaggagattttgggctgagacgatggggttttctaaatatacattcatgtaatagcaaacagagacaatttgactttctctcttcctatttgagtatgctttatttctttctcttgcctgattgccctggccagaacttccaatactatgctgaacaggagttgtgagagggcatccttgtgttgtgccggttttcaaagggaatgcttccagtttttgcccattcagtatgatattagctgtgggcttgtcataaatagctcttattattttgagatacgttccatcaatacctagtttattaagagtttttaacatgaagggctgttgaattttgtcaaaggccttttctgcatctagtgagataatcatgtggtttttgtcattggttctgtttatgtgatggattatgtttattgatttgcgtatattgaaccagccttgcatcccagggatgaagctggcttgatcatggtgaataagctttttgatgtgctgctggattcggtttgccagtattttattgaggatttttgcatcaatgttcatcagcgatattggcctgaaattttacttttttgttgtgtactgctaccaggttttnnnnnnnnnnnnnnnnnnnnnnnnnnnnnnnnnnnnnnnnnnnnnnnnnnnnnnnnnnnnnnnnnnnnnnnnnnnnnnnnnnnnnnnnnnnnnnnnnnnnnnnnnnnnnnnnnnnnnnnnnnnnnnnnnnnnnnnnnnnnnnnnnnnnnnnnnnnnnnnnnnnnnnnnnnnnnnnnnnnnnnnnnnnnnnnnnnnnnnnnnnnnnnnnnnnnnnnnnnnnnnnnnnnnnnnnnnnnnnnnnnnnnnnnnnnnnnnnnnnnnnnnnnnnnnnnnnnnnnnnnnnnnnnnnnnnnnnnnnnnnnnnnnnnnnnnnnnnnnnnnnnnnnnnnnnnnnnnnnnnnnnnnnnnnnnnnnnnnnnnnnnnnnnnnnnnnnnnnnnnnnnnnnnnnnnnnnnnnnnnnnnnnnnnnnnnnnnnnnnnnnnnnnnnnnnnnnnnnnnnnnnnnnnnnnnnnnnnnnnnnnnnnnnnnnnnnnnnnnnnnnnnnnnnnnnnnnnnnnnnnnnnnnnnnnnnnnnnnnnnnnnnnnnnnnnnnnnnnnnnnnnnnnnnnnnnnnnnnnatttctgccttcatttctttatgtacccaatagtcattcaagagcaggttgttcagtttccatgtagttgtgcagttttgagtgagtttcttaattctgagttctaatttgattgcactgtggtctgagagactgtttgttatgacttccattcttttgcatttgctgaggagtgttttacttccaattatgtggtcaattatagaataagtgctacgtggtgctgagaagaatgtatattctgttgatttggtgtggagagttctgtagatgtctattaggtccacttggtctagagctgagttcaagacctgaatgtctttgttaattttctgtcgcgttgatctgtctaatattgacagtggggtcaataaagtctcccactattattgtgtgggagtctgagtctctttgtaggtctctaagaactggctttatgaatctgggtgctcctgtgttgggtgcatatttatttcggatagttagctcttcttgttgcattgattcctttacgattatgtaatgcccttctttgtctcttttgatctttgttggtttaaagtctgttttatcaaacactaggattgcaacccctgcttttttttttttttttttgctttccatttgcttggtaaatattcctccatccctttattttgagcctatgtatgtctttgcatgtgagatgagtctcctggatacagcacaccaatgggtcttgactctttatccaatttgctagtctgtgtcttttaattggggcatttgtcctgtttgtatttaaggttaatattgttatgtgtgaatttgatcctgccattatgatgctaactggttattttgcctgttaattgatgcaatttcttcatagtgttgatggtctttacagttaggtatgtttttgcagtggctggtaccggttgtttctttccatgtttagtgcttccttcaggagttcttgtaaggcaggcctggtggtgacataatctctcagtatttgcttgtttgtaaaggattttatttctcattcacttaagaagattagtttggctggatatgaaattctggattgtaagttcttttctttaagaatgttgaatattggcccccactatcttctggcttatgggtttctaccaagagatccgctgttagtctgatgggcttccctttgtgggtaaccccacctttctctctggctgcccttaacattttttccttcatttcaaccttggtgaatctgacgattatgtgtcttggtctctttttgagcagtatctttttggtgtactctgtatttcctgaatttgaatgttggcctgtcttgctaggttgggtaagttctcctgattaatatcctgaagtgtgttttccaacttggttctattgtccccatcactttcaggtacagcaatcaaacataaatttggtcttttcacatagtctcatatttcttgggggctttgtttgtttcttttcattctttcttactttagtcttgtcttcttgctgtatttcatcaagttgatcttcaatctctgatatcctttcctctgcttaatcaagttggctattgatacttgtacatgctgcaggaagttctcgtgctgtgtttttaagctccatcagttcatttatgttcttctcaaaactggttattctggttagcaattcgtctaactttttttcagtgttcttagcttccttgcattgggttagaacatgctcctttagctcagaggagtttgttattactgaccttctgaagcctacttctgtcaatttgtgaaactcattctctgtctagttttgttcccttgctggtgaggagttgtgatcctttgtaggagaagaggtgttctggtttttggaatttttcaggctttttgtgttgtttctccccattttcatggatttatctacctttggtctttgatgttggtgaccttcggatggggtctctgagtggacatcctgtttgttgatactgatgctgtttcttttctgtttgttagttttccttctaacagtcaggcccctctgctgcagctcttctggtgtttgctataggtccgctccagaccctgtttgccggggtatcaccagcagaggctgcggaacagcaaagattgctgcctgcttcttcctctggaagcttcgtcccagagggtcacccaccagatgccaatcagaactctcctgtatgaggtgtctgtccaccactactgggaggtatctctcagttaggatacacaggggtcagggacccccttgaggaggcagtctgacccttatcagagctcgaatgctgtgctgggtgatccgctgctctcttctgagccatcaggcagggacgtttaagtctgctaaagctgcatccacagctgacccttcccccaagtgctctctcccagggagatgggggttttatctataagtcgctgactggggctgctgactttttttcagagatgccctgcccagagaggaggaatctagagaggcagtctggccgcagaggccttgctgagctgcggtgggctccgtccagtttgaacttcctggcagctttgtttacactgtgagggtaaaactgcctactcaagcctcagcaatggcggacgcccctccccccaccaagctcaagcatcccaggtcaaccttcgactgctgtgctggcagcgagaatttcaagccagtggatcttagcttgctgggctctgtggggatgggacccgctgagccagaccacttggctccctggcttcagcccactttccagggaatgaacggtactgtctagctggtgttccagatgtcactgggatatggaaaaaaagaaacaaaaacaaaaacaaaaacctcctgcagctagctcagtgtctgcccaaatggctgcccagttttgtgcttgaaacccagggccctggtggcgtaggcacccccaggagggaatctcctggtctgtgggttgtgaagaccgtgggaaaagtgcagtatctgggccggagtgcaccattcctcgtggtacagtccctcacatcttcccttggctaggggagggaaatcccccgaccccttgcacttctcagtgaggcgacaccccaccctgcatcagcttgccctccgtcggctgcacccactgtccaagcagtcccaatgagatgaactgggtacctcagttggaaatgcagaaatcacccgccttctgtgttgatctcattgggagctgcagaccggacctgttcctgttcagccatcttgccagcaaatccgatttatagtatttttaaagtatcttttagaaggctaaattgttatcagtcattcacaagtcagtggaaaactgatttaatcagattgctttcttttctaataaaattgttttttaattttgaacttttgtgggtacatagtaggagtacatgagatgctttgatacaggcatgaaatgtgaaataagcacatcatgaagaatggggcatccatcccctcaagcatttattcattgagttgcaaacaatccaattatactctttataagttagtttaaaatatacagttaagtttttattgactatagtcaccctgttatgctatcaaatactaagtcttattcattcattctatgttttgtacctattaaccatcctcacctttcccccagacccctactacttttcccagcccctggtaaccatcctcctactcactgtattcatgagttcaattgttttgatttttagtttctaccagtaagtgagaagacgcgatgtttgtctttctgtgcctggcttatttcacttaacatatgatctccagttccatccatgttgttgcaaacgacaggatcttattctttttttatgtctgaatagtactccattgtgtatacataccacatattattttcccattcatctgttgatagacgcttaggttgcttccaagtcttagctattgtcaacagtgctgcagcaagcatgagtgcacttatctctttgatttactgattcctttcttttgggtatatgccccgcaatgggatagggtagctctatttttagtttcttgaggaacctccaaactgttctctgtagttgttgtactaacagattgttttcctttcagtgctggagaacagtcgtattgagggaacaggatgtgagaatgaatgaggaggatggatatgtagagcgctccttaggtgtctgaataaatgtctcctagagtctcttagagggagatcttaggacactaagagggttctgatatcagggggagagagaaactgggtaacagtaattaagttcaggaaagaaagcaggaatgtttatgataacttcatttattgtaattctaccaagagccagtcctgagtccaagaatgggagaggtaaagatctaattatcctttcttcctcttctactttggcctctgctttttgtctcacatttgttgttcccaacagtcaacacctgagcaagtattttgaacactggagttaagtaacatcagttaggtggcaacttgtgagtgttcagaacagaggatggtgctgttaagtcacctgaaatttagatttttgtttaatatttttaaaaatgtatgtcatgaataacagttgacttaccaacacagttttagaagggaacctattaaaatcaaataataatagttatgctttgttgtttaatgaagctgtttatttttccccggtgatagttggtttccattattttcacccagaggaatatgctgttattttcctgcagactttttccttccttttctccttcctgccatacttggtgtttctctctctgtattcttttccttttcatggtgtccacattttcctctcctccttcctgaagctttttctgtttcttccctctgtttcaccctgttttcttccctcttataaagtatctaatcagagttccttgatttagctaacaaataaatagaactttcgggcttttgtttaattaacaatgaaaattactgaaagaaataatgaacataaaaataaacattatgaagatgtaaattaaactccataaaatttggttttgaataaaattgacagaggaatgagatcttgacaaaatgtaattcttcaaaatttgaatcacaaaaattgaacttggtagaaatattgatcttaggaaactcataatatgtttaatatggacaaaattgataaatgaatcaaattatcatcatataattttaataaaaatgagctgatcccagtgaaaataatttcagtgaaacaagaattaaaatgggaaaaaatagtgtagttaatagtgctgtataagaaattgatgaaggaatttaatcaactcagttgagtatattccagaaatttgttaatgacaaaaatatatctgtactgacaaaattctgtgtaaagtgcttatattcaacattctaagactcaaaatgctggaacaaaatggcagagtaaaaataccaggaatgaatatcctaatcccctcatttaatcctcatagctctacaaattaggataatagtttcctgagatacaagagtagttgcggtccaaagagtttagaaagttggtgataactgcttgaaccaggtacctgatttcaattcatcacaataatgagggtaccacacctttttcatggtatctatctggaacaagtaaaatactttggatataaaaagattttgttacatgacaaaatttagcactgttaaatttcaaatagttaacagtatcacaggtataatggtgatattctaatgaaaaagctaataacctatttattcattcttacgtataggttaagaaagttattgacctaggccaggtgctgtggcttatgcctgtaatcctagtactttgggaggctgaggtgggcggataacctgagctcaggagttcgagaccaccctggttaacacggtgaaacctcgtctctactaaaaaatacaaacgattaactgggcgtggcagtgtgcacctgtagtcccagctattcaggacgctgacgcaggagaatggcttgaacccggaaggcagaagttgcagtgagccaagattgcatcattgtgctccagcctgggcgacagagcgagactctgttccaaaaacaaacaaacaaacaaagttgttgacctacatggtgaagctccgtctctactaaaaatacaaaaattagctgggcgtggtggcaagcacctgtaatcccagctaattgggaggctgaggcaggaaaatcccttgaacccaggaggtggaggttgcagtgagccaagatcgtgccactgcactccagcctgggcgacaagagtgaaactctgtctcaaaaaaacaaaaaaaaaagcaagttattgacctaacttttttttttcatcaatcagagtaactgtgatactgtatcttgatcatggtcagaatcactggtttgaaggatggatgaaattagtgtctcccacgtgccaggcactgggagctaaatttagatatcaaagttaccttctaattctggatgctttaataaacttttgtcctggggctaagtgagactcattctgaccttggttttgattaagagatttggaatttgtgagaacatagtcttgtaatctaaaacagtgcctaactactagtggtttattgggaattgtccaagcaaataattacaaaacagaaaaggagatattccactggccgtttctagtactctgtgctctgtcctgcttcacagttactcaccagtggtatctaagttgacattcagagaaagtttgcaatggacaaagctgtttcttggcagtattttcactctattcctcagcccctttctacctcctgattctctctaaaggtctgttggcattatcagctgctcaaaccatcccagactgtccctgggatatcctttaaaacatcccctacatgacaggtgtaggtgactccttcttattctttactcactgccctaggcagccctcctgtctctttgagccaggtattgacactgtggtcttatttctccttgtatttatttgccatatcaaaaaacttaccactttattattttgatagtttgtttattgcttttcttacccatgagtttcatgagggcagagattctgtttttctctgatcatagtagatgatcagtaaatgtttatagaatgacaaaatgaattcctccttagagcaaattcatgctaagatgtggataaccaacatagttaatcttcccagatgtttttgtactttctaaacaaaaggtcaacttcaaaaactaatgtgttgtcttcaagtagtgtaacaagacggaaaaaaatcattcaagcactgtgaggaaagatattttggagtacaggaatttctataaaagagtactataccatgtgaatgtaaaaccccagggaaaagtatctgccttaaaattgttgctgttttcaaaaaggaaatcatcccatttttgaactcaccagttctctataattttctaatatttttttcagagcaggtcttttgggagggccatggaagactcccatggtatgagtgtaaagaaagatgacataagacataagtgataaagggacgtaagtgattgtttccttgtactgtatagggacttcttgtactgtctgtcctttataaggcaaaagctattgtccattgtgctactgtctcttaattgttggtttacttaactaagagttttataatcctagtaaaaacttaagagttttaggatgtttggtctgttgctgtgtttgtttaaaaactcctggctccttttctttaacgctgatgaggtaaaatgcccaagtccttccgcacagcagggggtgggtaataagttacggttagactcagcaactctgggcattgcttaaatatataggactttcagcagagccgctttcctttaagcacattccatggagacaagcttaatagagttccatctggtcagggagaaccactgtttccgagactggacagcctctgctcaatctcttcattgagtggcttttaaaaattaaaaaaaaaagcatatacacagagagaaaaaatagaggagagaagggagagagaaggaaaaaggggatagaaagtgaaggagggagaggaggaggaaatcaaataaattcttttggctttttgtttttcttcctaactattcataagtataggaaagtaagatatatgttgtgatagagaaattgggaagatggactcattcaccgagtagacaaacccttcttaggcccctttaatgtgccaagcatactatgtgacaagaatggcaaatagcataaaattgtaaaattgagcagggaatcagtctcgttgaccacagagggtatggggtactctaggaacaagaaggaagatgagttcagaatcaagtttgagcactgagttttaaaggtcatcccctagctcctgctaatcagacaggtcaggtgtttagttaggtctaaaatgtattaactcacttgcccccagagtctctgttttgttagtaactggaggtgctctgatgcagctgacgttggccaaactgaggaggactctggacatgaattcccagagatgcaaattgcctctcagaccctccggttcatactttaaccacctcactgtagcactgcagtgacactctggaagcctggaaagtgacaggcaaaagcagagaaggagcttgctttatgaagtatcctgaagaaaaggtttccaggttttcgtattttactctgttgaaattgtgccttaattttaagaaagatatctattatttatagagtaacagttacattttagttgaactctggtgacctatattttccttcttgtgttccttatggggttttactttccacgtgcatcagtattttcatttgtacctatgactctcctggggattttgaagattgaagagataacataatgctgagaaaatattctgagcaccacagagttcaataagaatacgtaagacacatgagtaattataatagtaggaaatccactgcttttttggagtaacatgccaaaaagtataaagttttatggataataccgtatattgttactattactagcaatagtaataataatttactaagtacttactatgtgctagatataatacatatttttccattgaatttttaaaagaaatccatgaagttgaaacatgttttccagatgaagatgctgaggttctgaagaaaaggttaagtaacttgcttaaggttttcttcctccacatcccatgctccgacccaccaccccacccatactttatatccctattttatgttgctacctgttctttttaatgctgaccacatttccagaaatgcactaaactaccaaccttagcttacttaatccttctggccaaccttaggagaggtaggcattgttttatttatttattttttgtttgctttgttttattttagcatttcttttttttgtatgagacatggggcacatagtgaataagtgacagaagtgggatttgaacccaggatgtgtctgaatcagaagaccttggcatttactattatgttgtcttggaaccaaatcagttcatgctcaaaagctctcagtgtttcccaaggctctttgaatgaacttcagagtcctttatgcaccttacactccctacataatttgcctgtgcagaatcttgtagctttctcttccccaacctcccccttgtttgctctggtagccccacttgctctctattccttgaactgaccaagcactttttcttccttggcctgtcctcatgctgtgcttttctgtctggagtcaatcacctctttgcctcctcttcttccttttagtttaaggggtgttccctctgggaggccttcactgagccccagtctaggtgcgtccacgaccacattctctgtgaactgctgttgggtgatgtctgtcttctgactatcctgtaagctccataaagtctgaaataccgttgactgctgtgttcccagtgcctggcacatggtaggcactcaacagatctttattgcccaatgcgtggatggaatgatcgtcttgaaattctagttcacctggaccccgactccaccctcctgttgctgtttttgttttcctctctactcccttcagctctcttcttacctctgctcctggaagtttacgcccgtggtgccctctccaactactttggagatgaactaatctgatccccagctagatattagccccttgagtgcatcacagtgtacatatttgttggattgaagcaaattgataccataactcagtcttaagaaggtttatttcacaagggtcacaagaattgaatcaaagggctgcctcaaaagtttcttttctgctaaattacaaatccagacttggccaagactgtacctagaatgggccaatttaaaataagctcatgatttgatcctactcctggcgaggagtaacctgcctttcagagatccctcctggtacctacgctgggtaaaaaggattaaaannnnnnnnnnnnnnnnnnnnnnnnnnnnnnnnnnnnnnnnnnnnnnnnnnnnnnnnnnnnnnnnnnnnnnnnnnnnnnnnnnnnnnnnnnnnnnnnnnnnnnnnnnnnnnnnnnnnnngaattgagagctcaggcactgaccctctaactacatgggttcaaatcttcccactacttatggactctgtgttcttaggcacatattaggtcttggttctctcatctgtgaaagctcacaggtttttgtgaagtgtaaatgacatgacacatatcaagcatgtagcagggtgcctggcacattgtcattactcaatagatgatagctattatttttattataatattttatacctaaatgatactctgtgtttggagaacattttcacttaccctgttgtgtagatggagaggcagcccataggaaacccatataagtggtcttcttttataaatagagaggccacgtgtctccagtgtcatttttgataggctagttctcagtctttaatctcttattttcttcagaaagatccatagcatgatagagaagaagataggaaagctggtgggtcaacaagctcatctctcaccggcatgggcttctgtccttatggtctatttccagtattgtttcagttacagttaaaattccctccagcatctcagcttccgacacatttcttgggaagctattcttttaacatattgccattaggaattttttcttgatataaaacctgaattttcctttgcttaatttaatccctcttcacatacacctcggacctctttaaataattcttttccctccctgccatttgcacctttcagttacttgtagagagttgtcatagctccctttgggcctaatcctatcactgtgattcatgttgggcaagctgtacattttgtaatagtctatgggcatattctaagaatgctgtcttgctggaataaaagcaattctccagtgatattatccaaaccttatcgtcaataacagctactaaatgtgaaacaaagcaagtgactttttttctgaaaacaaagaaggtaacgaacaggaagtggtgtctaccttttaatattattattcttatcaattatgagagtgcctcgttatcaataatgtagtatagaattgtctttatttaatctatagcctatacatacagaagggaatactacatgtatacctccaaatggcagataaaccaaaagaaattttgttttttaaatgtgaagtgtgtgtgtatgtctgtatgtgtatttgtgcacacatgtgcatgtgtgtctgtgaatgtgttcttctgggactttatacaaaatattgaaggagaaaaaagaaaactaaattgaagagacatgagaaagttgttgagcttcacccgttataatgggatatggacctcttcccaagacttgaaagccacaacccttcctttgtatctcttccagtcagaaaggctgagatataaggaatttgaaaatatgcatttgatactcaacaagcatctctgataggttggaaaatgaagaggaggtttcatgacctgcgagtacaggaggcaattattttctgttttcctattgcctttagttgctccgtgtagccactggcaggcagggaagaacagggaatatcgcttacgaatggatttctgactctcaggcagttcaccctccaccttgagacagtcatagaatattagaactgcatggataggaaacagtatagaaatctagtcccttttgaacttaccaagaaaggaaacgaaggttcagacaggaagttatgtatttaaggtcacataagaagttgaagcaatgtgttgtttgagcccaggcttgttttccttgttgtccaggggtctcactactaaaactcactcctagcttgatatttatattaaacttaatagcccatcatgacaagtaaattgaaaaaatagattgaaatgggtatgaactttctaaaatagatcttttctaaaatagatctttttaatcattataatttgtgagttaaatgagggaacttagatgttacttaagttgatgatcaattccactttcctcaaagcaacagaagtgttcctaaaactatgagtacagtgtatttacccagggagtcccatcctgcgttgctaccccagtgatctacggtagtctccccatctagcctcatttcctgctagacttttctcatctctgcctttccttgtgcttttgacttcgcccagaatgttcctttcttttaactacatctgtggtgcctttattgaagtattttttgccatggccgtcttcagaactcagtccaatggcatgctcaataaatctggaccatttaaccacctgtccttctgtgagatgctctacaccttgttctgccatagtgaactcagttttaatgttttttttttccttcagctgcacacacacttgtatttctgacccaacactgttctccttcctagctctgttcttgtctttcttccttagattgccccatttcctcacaaaggactgcagactaagagcctcttcagaattatctggcctctgggatcccttccccgcacttcgctcctgtagggggcctcttttcaagccttaaagtcttgagcgtagagtcagaaactctacttctgtcacaaacccatctgaaatgctccatttggaatgcaactgcatactccaacctgacataactgctctctccttggaatcgtcactgtcttcttttaaggcatttatgcttttgttggcatcatatttgcttatgttttgtaactgctaacttaaaaaaattaattgtggtaaagtatacataacataaaattttacatatccaaatcatttttaagtgttacgtacattcacatcatttgtgcagccaatctccagaactcttttcatcttgcaaaactgaaactctatactcattaaacaattccgcatctccgtctctccccagcccctggcaaataccattctgtgttttgtctctatgaatttgactactctaggtacctcatataactggaatcatatggtatttgtctattcatattggcactttccacttagcttaatgcctgcaaggttcatctgtgttgcatcatgtgacaatattcccttcttctttaatgataaataatatcccattttacatatatatatatcatatatataccatatatataccatatatatatcatatatatataccatatatataccatgtatataacatatatatatacgatatatatatatatgccatatatatacaccacattttatttatccattcattcatcatcattcatgatggaaggttgcttctgcctcttggttcttctgaattatgctgcagtgaacatggacatgcacatactgtctctttgagactgtgctttcatttcttttgagtatatgtccagaagtggcattgctgggtcgtatgcttaactctcctaaattgtgagctgatactatgttacgagacttgagaccaatgactgggtcattttcatcttcatatcttcttagcctctatcacagtgcctcatcatggtaggtactcagaaggtgtttgttgattgagcaaattgataaatcagtgaagcaaatgtgttacaatattgaatgtaaatgacttgtatagattaaaatatttacttcttttatatcagaaataaaatagggaaagaatatatagaaaaatacattcagttactacatatctgaaaaacgagaacccaagagcactttatgcattcttatgtagtgattatattggtaattttatgaaaggtggttgcagttttatacaaatttgaagggaaaaagttaaactttccaccttcctttttactttgtatgtaaagtattaagaaatataacccattacctactaaaattctcaattgtttccagaatagtgaaagtagctgttaacaataataattgtaaaaatataaagtaatctcaaacaggttcatgttttgtgtaatgatcagataacatgagtaaaagcagcaattatgtgtttctggtccacactggaggtggaaaacaagaaaagcatatgctacaactgcatattattaaaaaggcaacgctttatatttactttgcacttaaaagtttgaatgatctgggtaatagaaatagacaatacacatgctttggaatacattaaaattgcacatacagtaagacaaattgctattttatagcctttccacaatgtagcaaatttgtacttctggcttaactcatgataagtttgcataacatttactgggggttttcactgcgctagttcatttttcagactctttcttaggggtggtaccattccattatagaagtccaagggtctgtgtatgaaaagaaaggtggggtggagaagaaatctggggacaaagatctgtaatcaaacaagctacataaacctcagcggaaaacagtgggtatcaaataagattcagagaagacaagtccatttttacagtgggctactcccatgggtacccattccctgttcttaccttgcttccttcttttatgtctaggagatctcaggaactcaaatcctgtattactccatattcattcaggttgggtttatagaagctaccttgatctagtaaattaccagggagaaggactttgtaaatcagccacaaccacaaatcaaccagcatctgcaaagaagaaacttaattgattttaaaagatattaggctacagataggtgagaatttgatttaaaatcaaaattatagacagctgtcctgggtagtagctgatggacatgttgttattttattgctagggaacattttttctacctggttgatgtagtttggccctatcaagatggcactgaaatgtgttaacttagatagtgtacatgcttctacctgtaagacaaaataagtatataccagtgaatacatcttttgtatgcatttaccttgcttcattgatttttattgcatggtgcagccagcctttactgtcccacaattattccccagtatccatatatgctggtgaagttgatatagagcctagaacccaaaatgaaaagacttcattactattttaggactttaggcaaagaacttaatttctctgggctgaataacaatgtgctggacaagttggtttctgatgctgcttcccgctgtaaaattgtacttttctctgtgacagcatcagaccttgttcatgccaagtaagattactgcatagtcagagtaactgaagagttgggcaaggatttgagttcatatcatgtgtaaaaattatccaagagaagtgtaaggtgcttgcaaatagttcccccccacatctgctattgaaccctttggaggtatagttcaaaccaatactgtgttgtacagtgcccttaatactgatttccaatttatatctgtatttctccagaggacctgagcaaattacatgctgatcatttcttattaaccatattttttattatccaaatgctgcctctcatttaactttgacttatgacagctccattgtatatcagcaaatacattttttgaagcacaaaatctaaatggaaccatgtcttttcctcatgaaatatggagtcttttttattcaaaaaatttaaaatcccaaatatatacaccactttgagcaccccaacttttttgaaggagatcaaatagaataaatatattcaagtttgctacatagaaggtaaaagtagttagtataagtcacaaaaatataatgagtctaattcttttaaactcccaattgtttcccctaaattttcctgaatgtgacaggcttcccttcaagatcagtaatgtcccaggaatgtggcagtgcaaataaatggaaataccgtagtgatttgtacttcaggggttaagggtctggtgcccagtcagaaagggcttgtgccagggaccaacagtataatttgtagaaacacatattcttggaatttttggattcaaaaggaaaattcttttttgcttttttgtgttttgctattatcttaagaggtgtatggatttgatttatgaacaagtactgctgtaaataataaaataataaaatggcatgtcagcaagggataaagagttacttacagaagttaaagtgaaattaaataactcttgaatccatttgtaaaagtgcctgtattctcagttgaatggtagtaactactgcgtgaaggaagttggtttgccttatggataaggtttttataagtacttaaaatggaattagcatacaccctttaaccatgctgatttttgtttatccctgcaacatattttgaaagctttgctctcctgtataagccagtagaaagcacaggcacttgcacagcatttaaaactcagatataaagcatttctagcacattatggatgcgctatggggtttgaagttaatgtgaatgtcaggccagagaggggagaactttataagatactgaataagaaactcctttgccatttactatgagatgagaataaaaaaggaggacacagaaaaggcagcaattttaacttcttcagatatatccagggaaaataccttgtgttaaaaacagaaggaaatagaaagtgtgtagctgatttcctagcctatggtattttatgatctggattgctttgttcaagaaaaaaaaaaaggtaaataagttgcaatgtagtcctctgtatttttccgtgaagtattagatttttgtagaatatgtgcatagtgtttatgaatcagaacctgaatcataaataaaatgttaatttgtagacacatttaactgtggagcagatggaaaaataggtatgtgttagaaaactaggtatttgcagaagctaatgaagttaattggtctcatttgactaccttattttcccaaaccccctaaagactgggcttttttatttctttaattaaaaatgagtttggtatgttaatattataacctttcatattttcctagttttctatataaatgtcttatttatagaaccgcccttaggagtccagtattagtaagaacattagtaaactgggagcagtaagaggggtgctaatgctatacaaaagctattagccacatacattgctataatatgtgcttttacaccttattattacttccctgtcctgtttctttttgattacatagagaaagatctattttcctttagcttgaaaacggtacaagtagaaatacataaaataatgattgtggagcagaatttaatttttaaatatcagtacttgaacatattttgattgggtaaattacatggtaaactcccattgaactatcaccagtgtgaaatcagagaaatcacagccctgagttaatcaataccatgtgtgtagataattttccctgaattattccttgtataaggaaaggttcaaaatcaaaatatttagctgttcaccgaagagtgctttttaattagagctttatgttgcggctgccacgttggcctgtatagtggatgctgaatgtagtggtgcatactgcagagggttctgggacattgtttctctaatgtcatcactaacatattgcatttgtattgattgtctatgatttctgtatatggatgattgagtttgagcaaactacttagggtttcaaaggatttggataatgttacactgtagggctggaaatctctttgagtattgtattgcaaagggacaaagtcatagtttcagtgcatttattaggcccctgctgtagaaataggaagaataaaccatctttttaaagttaagagatcttggaatgggcaattctaataaatcctgggtttaaggagaatggtacgtgctgtagtaccgaagttgtttattcatctggaatgtattagaatcttgattaataagaagacatctgcagttttacataaaaagcagagcaggcagtttggcaaatagaaatgagaagggaaaaagaaaagccagttccatcgaatgctgttgtttcattttgaccaccaagcattgttattcctgatatcctgatagtatatagcaaatcggcattttctccctgcagaactgcagcagagaattaagatctgtagttttgagaacaggtaggtccttttaaaggcttacatgggaaataatatttgtcattttattttagaaaacccaagtggaagaaagacaaacctcagttatttgagtgtttcgtttacatgatgtcaaacatatatatggatacttgcaaatctaaaatttaacatctcatggaatatattttcactttgaatatatttttcttaacttttcactgaagaatgaatcacttaagaatctcttaccctcacaatcattttttaaccaaatggagagacatgatttttacataagacattttaaatttcaagatggctaaatgatatgttggaaaagaccatggaaattattgtgtttgagggaaatcgaagccaaagcctgtaaaatgtgtataattcatatatcaacaggatggcttcctaaattctcgggcatttttcaaaagggaatgataacatcggagttcactatttggaagataacacatttggcagctagtttctgaagaatctggcacccatacagacattaatctctaaggccaataggtgaaagattattacagtcttgctgaaggcagaaattcatgcatattgcagtcattcttatgggagtaaaaggaacaaattctgaccagtttaaaatatgacagttttaaagaaggaccaaaactaaggaaaaatagcttacttcagatctattccacagtaaatatggcaaacaagttgctgatgataatttttgtatctggtattggataattgctgaaagctgagggatggctctttttagccacccagtcccagacagctaagtaatataaaacagattctaaaaacagccttgcttaataggaaagagtgtgagattatgtaacttgaagggcaatggacaaatgaaaaatgattttacatttttcattggtggatcacaatgtcaggagatcgagaccatcctggctaatacgatgaaaccccgtctctactaaaaatacaaaaaaattagccgggagtggtggcgggcacctgtagtcccagctactcccgatgctgaggctggtgaatggcctgaacctgggaggtggagtttgcagttagccgagattgcgccacagcactccagccggggcgacagagcgagacttggtctcaaaacaaaataaaagaaaaattatttcacagtcattagcagagttaaatttatgtaatgttaaaatattggttatttcagagtatgattgtcagctttcagcctctgtcccctgcaagtgtaatattttagtaaattttaggcagagtacaattcttttattttagcaaagacaacagagatagaaagtaaagaagaccaggaatggtggctcaggcttgtaatcccagcacttcgggagtgtgaggtgagcagatcacttgaggtcaggagttcgagatcagcctggccaacatggcaaaaccccatctctactaaaggcacaaaaattagctgggcatggtggcatgcgcctgtaatcccagttacttgggaggctgaagcaggagaatcacttgaacccaggaggcagaggctgcagtgagccaagatcgtgccactgccctccaacctgggtgacagaacaagactgtcttaaaaaaaaaaaagaaagaaagtaaaggcccggcgtggtggctcaagcctgtaatcccagcacttagggaggctgaggtgggtgaatcacgaggtcaggagatggagaccatcctggctaacacagtgaaaccctgtctctactaaaaatacaaaaaatattagccgggcatggtggcgggcacctgtagtcccagttactctggaggctgaggcaggagaatggcatgaacccaggaggcggagcttgcagtgagccgagcagtgagccgagattgcaccactgcactccagcctgggtgacagagcgagactctgtatcaaaaaaaaaaaaaagaaagtaaagaggtatggtaccataaatatttattcttgctatgtgagagagggttgttaatatataagacaatgctgtaattcaaggattgtcaaaattttattatggaagtcagcatagtaaatatttgaggttctgtgagccatatggtttctgtcacaaccagtcaactctgctgcattgaacaactcatattcaatatgtgaatgaataagaatggctgtgttccagtaaaactttatttacaaaagcaagagcatttggcctataagccgtagtttgttaacctctcttaaaatagattagtttagcatttagtaggttctcagcatttagtaggtgattataatagtgctcagtacttgagtttttaaataagtgcgcacttgtagttgtatccctgtctgacagaaggaaatttgtgtgcatatgccagtgcctgcaaggtcttacatatttacactgttattaatgactaattaagtaagtgggaaaggtgtgtaaaggttctttatctagataaagataaagttctttaaataaagctagaaaagtacacaggataagaggattgttgtaaatatcaatatagcttttcaaattaatatgctaactcgtgttatttagaaaaccataaggttatctttgcctaaatgtcatgatgaagaagtttacgttttaagactgccactgcataaatgataacatcataatatacattcagtgttgccaagtcttttccaggagaggcaggccgaaaggcaggttagcatgtagaatcattcttgcttcaatattctgttgtcatttttgcagatgttcttcctgggtaaagctccattggtgtataacgttgtatttcagattcagaggtgttgttgctgacctagagtctgtgggacatacatgtcaaactccttttttataagggtgcctactttgttctaacccagccaaaatagagtcttcttttaaccttcctatcagacgtgtgtgtgtgtgtggtgtcaagatagctgactttaagtagaaaagcaatctgtaacattggtattgagtcctgttgtttctgacatttggattcaaaactatgatttttatcctaatagtcttcttgcaaatatttgcagtaaaccaaccatatagtgactaatagtgtgacaaatggcaggaatttgggaggaagagacattacaggcatttctccttccctcatcatatataattagtcactgagtcttttggatctatttttctaaacaaatgaatgcatttccttcactctgtcactgggatactccttcactttaggtttttttgcctttcactggaccattgccatagccttataaatggactccctgcctctagacttcatccagtccctcctactccaaagggctctggtgaaaaccatctctgctgattgaaatccttcaacagctctgtctctgctgcctgcaaataaacttggggccataagccatcatgatcgggctctacttcctctcacaaattctatgttctagtccagtggcacttgaacctggctgtagtgttgcctgagaaacttcaaaaaaatactaatctaaacttcacctctagtccaatgcgataagaatttctaggagtggagtagaagcatcaatattttaaaaagatctccaggcagttttaatgtgcagccaaggtcaagttcctctttgtagtcattttacaccattgattccctgatcacaaatgtttgcatttgtacatactattgttttcctgcctggaaaactcctgcttattctttaaggttcaactcaaagaacacatccttggtggctattatatgttcgacaagattgttttcgtgcttcttccacagaacacccacaacatttctgtagaggggtctattaacattcctgatttccttgccttgtgatcatatgtttacatgtgtgcctctcccattcattagtcagtgaactattcattgtaaccatgtattgtgtcttggtcaactttgtatctgctgtgcctcttctgggtctcatccataaatgggtcatcagaatatcattatggaattgatgactgcatcagaagagcaggactggggtggtagctagaacacacctgaaaatgtattcactagttcattcagtgggcttcaaaattatctttgttccaatggaatattaggtaaaaacaactagtctgggaatgggtgttgtcaagcaggagagtccttaggatgagaagcactatggaaccccttctgtgggttggcaaatacaaggtcatgtgaccacagcccaagtaaagactatggtcaagattttgggcaagagaggtgacaaagggaagagagaaaacatcaataataattgaactgaatcctctcttaggtggggaaaggaaatcaatgctcacattaaattggctctaaggtaacatattagcaatgttagcaaacccacagataagactggaaaattcaccagaaagcaaaatgttactttaagagagggtggagggtggtggaaagaagaatgatgccaaagagcccaaagcagtaactgaatagtcttaacaatagtagctacattttggggttttgataagtctttgcctacaacaatataaaatatagtgaacagattagttggatgggggaaaaaggaaaataggatcaaacaaaaaagaaatctatataagagaatgattcttgtctattttagaaagttaatctatccctacaattgattgtggtgttatacgcactgaaacaaagggaccttctacattatgaatattcacaaaatatgaagtgtaatagcttttgagcaacaaactcatttatagctattttaaagctttttttcataaagatcataagactttctttttttttactttatttatttatttattatactttaagctctagggtacatgtgcacaacgtgcaggtttgttacatatgtatacatgtgccatgttgatgtgctgcacccattaactcgtcatttacattaggtatgtctcctaacgcatccctcccccctcctcccaccccactacaggcccttgtgtgtgatgttcctgtggcgcaatcggttagcacgtttggctgttttctttctttttttaagagaagggtctcactctgtcacccaggctggaatgcagtggcactcacagtaacctcaaactcgtgggctcaagcaatcctcttgcctcagccttctgagtagctgggacaacaggcatgtaccatcacatctggctaatttttaaattttttgtagagatgggtctcactatgttgctcaggctagtcctgaactccaggcctcgagccatcctcttgcctcagcctcccaaagtgctgagattacaggtgtgagccaccacgcccagcagagcacaagcattttaaaaatgtaatatgtacattttaaatacttctgtacatatttacaaaaaaccaagagtgggtgaagaatcacatttcatacacctttgatccctgtgcctagcaaaatgcccgtttgatgaacaaatgggtaaaataatgaatgaataaacttgaatacaagttacaaaagcaattgggactgttttgtctcaagtaagccaccttcttccctgtcttgcatcatccacctagctgcaaagtgaacgcatgaagcttagactaaaaagcatatgagtgtttgggtgataatgatgtgtcaatggaggttcatcagttgtagcaaatgtaccattctggtgggggatgtcgataataggggagactatgcatgtgtccaggcatggctatatgggaaatccctgtactttctgctcaattttgctgtgaacctacagccaacctaaaacatagtttattaataaaaaggacgaattcaaagatgtgtagtcaaaaaattatgcattctaaaaagtattcattgatgactcacaacaaaattaatgggatttttaaaactctcttcctcagaacaggaatgctgaggctaaacaaccttgcaaaaatgagatcaatgaaaatttgctatagcaaagttgattcatttgttttcctctattttcaaaaccaccagttaaaatgcaggcagttcccagcttataaatagattatctcccaaaagttaatttaataagctggtttcttggaattcaccacacattttccaatggagcagtgcagtaagtgggaattacattttaaggctagcccacaaatatatttaaatatataaggttggtagaacagggccacagaatgcagctatgcagtttgtgaactgcacaaacatccccagcaatggggtgaggagacagaaacctaacagcagtgcttgcagtcacgaccagcagaagagacacttaaaaaagtcatctgtgaggagagtaccttttggaatttctcctcttagaggggattgccttttgcagttcacataaagatacctctggtttgtgttagagaccgctggaacaacagtaagttgtaagcactgtttagatgagaatttgaattctgagttttcattaaggaaatgagacttgcatttccccaggattcacttccagaacaaagactctgggtcccttttcctacatttcttgagcactgggaatagcaccttttctggctcctctagaacaggaggagtggcagactggggaagctgaagttttagtggtcagagtctctgtgaggtcttaggcttcctgaaagcaaggactgctgtgggggaagtagctataagtacagtggctcttaaaggaactctgatctttggatgtggggtggtataaagggtgagagtgtgtgtgtgtgtgtgtgtgtgtgtgtgtgcacatgcatacacagcttgtgtgttagaatgtctctgggaaagttgaaaccaggagaacttctgcactggcagagtaaaaactgctggtgtatggtggggtcccctggacctgcatctggtggagcaggatggctatgatttccttacttaccactattggaaggaaggtagtcttggagtttctcagtggactatggcaaggactcagcttggggagagtgagaaggtgaaggtgttggtggttcatttgtctgtgtcacatgtaagtttggtgttctgaagccagtgaatttatgcggttgaacaatagattcatatcatcacagagctgagtttaaaaatgctatgaatcaatgtgctctgttttcatttgctttttctaagtattttggtattgagaaaacccctccccccaaaaaacatcaagtcctcaattttacattacagtgaagttctctagacttaagaccaagttacattaattagaacttatttcaataattttaaaaaatttatgaaaacaagacacttagtgcccacttggatgtgccatatagtaacagtattaatcagttgaataatccacattaatcagtcctgcgttgaagtaaaattattaatcagcttgatgatctaagcaatcttctgaggaaatgagtttgtcttagaatttaaaaagtgatcatggaaaagttagaaagagtgagaaaggaaacgaagaaggatactcatttcagtttatttcagttattttgacaccagatcttctgctgatacagagtgactctgagctttgatatccagttctgaacaagtaatttcctcttttaattgtgtccttttctgcccagagagaaagttttgtggcaaagtgtcagtggctgggaagagctacctcttgagttgtctctttaaccctgagggaatgaagttattttggtatagcatgtaagctgaggccatatgtgacattgagtagacgtaaattgaggcatgataccatttaatttggctttttaagctaacaaaaggacaaggaaaaaaaagtcaaaccagtattgaccactgtgaagaaaagatgattggtttgatataaacgttcagagttccacaaataatgtggaaacttaaccataagggaaaattgaggttatctaatcagatgaagcattccaaaatctacaggtgatctcctcaaaatcactgcaaactctgttgagaaaggcagacttgggaatagaagttgggagtcagggagtgttacaaaagaaacattttcagaaattcttttataccaagggatgattataccaacagctgatttggggttcttttgttgaagaaacccaaaatctagtgagaacgtattgtaacacgatggcattgcgtatttgaagtggagtctcatcagattatgtccccttttagttgtagcctgctttgacattccccaacccctctaagggggctgtgatggctttgcaccaatttttcagtttgtcctctcccactctctccattttggtatgtcctttgtattcacagtatagaacaagaatcacccactacattcgatagctaaacaatgagaaaaaccaagcaaaacaaaatatgttcaaaaacaggccttatttgtttcccaattttagcattcatcactgcaaaatttaaatcttatacatctaaataattgaattctccccagtaagaaaggaattacaaattaaactcattgtgcaagaaaaaataatatattcctagatcaagcaaaacaagcaaaaaaaatatataggatgtagcaaatatatatgccatgaaagttgggagttttttaggtgagagttggtatttggaagtcaacaccatgatctttgaactttttgattacgtctcttgaaggctgaaaatttgtagggtaaaatttttagtttcaccctaaaatttcctcttgtgtggcttggcaaatgtgaaagtttgagaacctcagaaaaatcatgttgaaagaacctgctcagaagagatcggggatgtggatttggttgatgacacaggctattgagtccttacagagaatagtttgtcttccatttttagatggctttaattcctccaaattgctccttgaataataggaaaaaggcaatttgaatttcagtgacagattggacataacaggttgcaactattaggtctaattttaccatactgagaaataaaattgcctaaacataaacatcgatcactgatgcagtaaattaatttgtacagaaaaagtagtttaactgcagtgtacattaaacattgaaaattttcaaaattactgctctctgaattaatttgtacacttgtttacttgttaaaagcacgcatacattcttttttctaaggcagcgtgggtttgaatagaataagaaaaaagtataaaaagtgagaaggaaaaacagagatgtggaaggcacacagattggcctgaatacttacaaataatggtttttctttcaattttgtttttaagtgctctttagaatgtgcattgtttttgaatctgtccataggatactaaagatgtgcacattttccccctcattataacaaagataaatgtgatgttttaatagccttgacttacgttttgttaagaattgaaggtaggagtaattagaagagttttatggtttggtttcttggtgagtttacattcaaaggtgtcctaaggcttggaactgttacatttgtattcatcaacaacctgacccatgcatttctttatacttaaccatttaaaaaaaatcagcgagcatgtttgcattgttccctgtaattctattatgaggaatgcatggcaaagtttggatagtatctttctagattgttcgagccaccatggaactggagctggcaatgcgttgtggtttgataatatctcctgcctacagttttcaaggacagtggttcgattcaaatacaattctgataagtggcaggttttcgtgtctttaatgccttgacaagggcatcactctcaggagagggaggtgaaaccgtttggacgaggattccattcctgctcctttgttgctgacacactaagataatggacaattaagagagccttcactgcaggtgaaagtatggggttatcactaatataaaggagcccatggggtgctggggtatgaaggagaagaggaatgggaatttttaaagggagtataaaacacacagatgagacgcctaataactgtttacatattgcacttttacctgtgataatggtgaatgattggagtgttcagtattgcttgctctaacttttttttttttttttttttttaatatctggttcattgcatatgacacaaagtagtgcagaaaactcgccccagtgctggcctgcctgtcgaggggtaagggaacctggataagaaagagatttgttttgtggaatctgtcttttagaccagcttccatggggtttttaatctagggtagtggttgtgaacccagcctgtaccctctatgggtcttaactctcagagagtctgatttaattggcctgaggatggatccagtatgtaattttaaaggctctttggacgattccaatgtgtactcagaatcaagggctatcattgctgagtttgtaacagaagatcaagctcttcaacactcaggctctctagcagattgtgtgatgatttaataggtttgaataatagtgtctgtgttgctgttacagaagatgcgtgctgcgtatgcttctgacagccctctcgtgtttatgtcagtgtcgtgggcaagcattcaggcatatctggggagaagttccttgtctcttgactactgttccccactttcccttactctcctttagtttctgggttttgttgttgtttttgttgttgttgtttttccttatagatgtttgaagctaccacttcctgtgagatcatggataagtcacctaagagtggggaggagtctgataaaggcagaagtgcctcatgtgacgtcagtgtccaacagtgaccagcaactttgtccctagtcttcttactctgatgggggagatgggatgttctgtatgcatggaaatttgaggggcacttctgatgccacttaggactaataaaggtgaggcagtccagagtatttcaaaacggagtgcagaagaggttaactgattttcttttgacttacactatcatttgtctttaacagccctgaacgacaatagagtgcactgcttctgataagtatgggttctcctcagcctgaagagatgtgtgtgataagataagatggcttgaaaaaaaagagagcttgagggaaagggacaggaggagagggagagagaaagtatgttaactgctttgtctgcaaaataccccctggtagccagagataagacaccttgagctacttggaagaccttaaacaggatgtaaatgaagccaataaaaatcacttgagatcaagccctccttctcctcccccctcctatttccagctctgacaacagaaggcttcatttactgtatggcataccacacttacattgtgaaccccggaagttgcaagagactgtagcctgttcaaagaacaaagaatttttagagaggtccaaacttgaggcatttaatcagcaattctagcatcgcctccctgagtggaaaaagaaagtattgctgaatataggaagctcccttcctcttttctcacttcttactccagatattcatttgctttgtagttttgtgacaaccttctttctatgttgaaatggttggcaggatgagctacctttgatagtgtattaatatttcccatctagctaacgcagcttgaaagtaatcatcaacaaaagtttagcagacagactttttcatgtacacacttgaaacacggctgtctactcagaactatgtttcctaagcatgtaataccaggctttatgtacttggaactgtataactctttaaaatggtcactctttttctggaaatgtacaagctgctgccaacgctcttacagagaggaagttacttgcaggagctaattgagtatttcactgaaaagatttgaaatatggagtcctactcaaagtgggaggggggctgttaaaggataggagggcaaagaatatagtgatctaattttctttctgtaaaagctgcttcttggaagaactgggattcaatttggtctttgaataagggcgagaaagccctccatcaatgatgttccattacagaggagcaaacacgggaaaggcacagctgagtgcagcaaacttcaagcaaggacttaggtgattcaggggaaagaaaagattctaaggtgattctcaagcttgggaatgcaggtgaagactcaggaaacttgctaaaaaagggagatttctgggccccatcctcagaagttcagtcaggaggcgtggggtggagtccaggtgtctgcattttaaacaggcagttcaagcagttggtctgctagtgattggtggattagactaagaaatgctgccctgtgtcatctggctgtggtagagggtcagcctttggttttgttgtgtacagccaggatagctggaatgataattgaagaagggtagcttaagggataggtgagaaggatccttcatttgaatcagtggcagggaatatgtccctacaggcaagggtgtgagaggaaagtaaagctggccacagtgccagtttgactgtgtctttttttctgctttgctttgtcaatacctgatccgaccataccaccctgctcaaagcagaggatggaagaacaggagagaggcaaacagacccactgttaaggagatgtgtatatataggatttttctggtcaatagccagcagtgaaatcaaattaagaaattggctgtcatgacttgttaacagagagttataggtttgtagagttgttaggcaatttttgtcttcttctgtatatgtgtgaatacatacatcagttagcatgaattggtttagtaatatgaaaaacaatgaattttttttaaaagagaaacactattaaacaccactttaggtttattcatttacccataaaaactcagcatttgagttattgttgttgttgttttagtggaggagagtttgggaaggatggactttgagggttttctaatacgtagagccaaggtgcttgcctcggcactggagatttggatgtgggtttcagtgccactgtcaactactattgttagtacaagattataacatgttactcatcctcgttgacctatttgttcatctgtaaaattagcactttttttcccctaaaggcccacatttctcacaggtcttaaatcttatgtttcatatatatacatgaaaagttaggaatgacagccttgactttcttttctctgtgtaggcttcaatcacattcactcattttctttcctttgagccctaaagtcagacccagaggtatgcacaatccatgccaaacaacaggccatcttaagagaaaagagcagagctcagatgtgggaggaagctttgtaaagatttcagagaacagccctttggtacagacagtattgagtcagtgaagattctaaaactgtgctggtaggttttatatctttgaatattagcaatgtgtctcattactgtggccacactaccttggattcttttcttatacattattttgttatttttaaagtatcttggatggaggcaaagtaagatgctagtatgtggaggtatcatggggtttttgaggcctgattttgtcacaggtgttggaatatttgccaagatgtatcatctcagataatatgtgttatttatatatagacacatatatataatttaataaaaatatgattatagatattaatcagtagaaagtagcgtcataaagtcttcccttagagacatatttcattaagacatgattgtacagatatttagtcctattaagtgtcaaattactacgattagcacttttgtaatgagagttacctaaaatatttgaaaaactactttggcataaatcacttagtctattctgaacatttagtcaactgtggataaaagcatgcaagcgtacacataccgtgtgccacaattttaactgtactggttcccataaataaattaccagggctgttaccaagaaaaaaataatgaaatgaactggcttggatgttatcatcatattcattctaaggtagagattctagggaagagaaaaatcaaaccaaaagtgaaaaataaaacataaagggcaaagagggtaactggaaagtcctcaaattgataattcgccttattttcagaatgcctcttttatattttgctgaattagcaaaattataaatttaaaaactctataaatacatgtacttaatatcataagacctgtgtagagatactttgtcataccctaactaaagatgattttaagaaaatagctttggctttccagtttatatagtacttttataaacattatctcatttgagataaaggattgtcttatatcatttgggttacttggaatccaatctcatttttccatttcagttttaccatgtaagtgttaatgtgaaaggtaataattctgttgaaacactataaaaattctattgtataaggcatattagtgattggccctactgtagagtctttcttatgcatgaagtctcaagatagtccaacatccctgaaatgcctttttaatttttttttttttttgagatggagtctcactgtgtcacccaggctggactgcagtggcgtgatctcggctcactgcaacctctgcctcccgggttcaggcaattctcctgcctcagcctcttgagtagctggtactacagacgcatgccaccacgcccggctaattttttgtattttagtagagacggggtttcaccatgttatccaggctgatctcgaactcctgggctcaggcagtctgcccgcctcagcctcccaaagtgctgggattacaggcgtgagccaccgcgcccagcccctcatctctgaattccttaataccactgtagcatataatttcctcattaaatgcataaaactgaggagcagacaacagatactactttgagttgcagctgctgggtggttggctgggtgtactcactagcgatctcagtggctttttcaccctatgaaaacagcctgacaacctgtgtgagtcagtctgtgctttaacaaaattcaaaatgattatttgccacagaccttaacaattcctatcatttgttagacacatgtatgtccaaatcaagaactggtactgaggtcagttgtaatacaaaggcatatggataattgtagtaatagttcccccctaatctttgtaacagctttttctacattagcaaaccatatttatcactttactgcacaatgaacccacagggggtgctaattgttcattaattaaattttagcctttcagcacttttgtattctctagtggccttgtctgcagtgaagtatacagtgtggccttttcaggctgccaaaaattcatgttggcgttactactgccatggttataatacaggtgaaattcagctccaataaataccatttcaggactgttataattcctggtgactgaaagttttccggccttggaccaaagcctacatgttggaaaaatagtcagtaaagtctagtttaacaagacaaaacattctgttagaccagatgctgctttgaaatagaatttgatttcgttttttgaaaattctggtggtttatggcagttcttccaaaaccattaacgtggtgaaatgaagtttctaagatccgtcattccctaacgaagccatttccgaacttagttttctcagtggaagaatcccctttaccttctgcttccccagtgaagaagttaatttaaaatcactaatgattaacttggtagcattgagaaatttactgagtatttttaaaaagtgtaggtcatccttcaaagctcagtacgtatatttcacactggtgcaaaggattttgaagtgaaatagaattggcctcaaggactttctaactaagccaaatagtcacttatagagtggtgctggcactatggaatgtggctcctggactttgaatgcaggccctttcgttgtgtggactttacaacactcatgaattaatcacaactggccagtgtgtgtagctattaaccaatgaactgctacacattgattttcaagatatctgtgagtagcattcagaagagtttttttggaatatttttgtttgtttatttttatttattaagactgttatttaacaagaataataatattgttaataaattaatccatattaattttataatgataatattgtctatcaaattgttatttaaataatattgttaaatagtagttctttatttttgtttatttttatttataaacagaaatgccctttaagtcattaaaaatttttagaatctcaatatgaaaactgcaacaactaaattatcgttaattttgattcctttctgctgttctcacatttatgagttatcatttaccacttatcacttataggtaactttggctttcatagcagtagtaataatgtaatacatttttagattttagcagtacagaaaactccttcatataaggtcatgtttgagtcttataatacctcatatgttgaggcaggccgaaatttttctgatattatagacaaggaaatcaaaacttcaaaaaaaaagtagtttctaaagttcacaagccaatattagacctgaacacatagtaggtgcttaataaaagttgattaaatcaatggattaaagcaatgaaaaactgctttaaattctttgtggtatgaggtcatatataaacacaagagcacatagtaactaataaatgccttctaactcaaaatagtagagaataaaaagaatacagactcaggaaatccactctggtgacgtctgtcattattcaagaaaagatcaacatgttaaacggtttagaacaccctcagtcacggcactgtaaacagatgtgtaatacacagttgccaattattgaacgccaagaggtgggtgcttatcattagttatatatatttttaagtgagccaaaagatagaaaaagaaaagcaattctcaccccccacataattggaaaccacttttccttctgtctggcttcagaaacacaatgtcttgatttccgtgcgagagaggatgactgttctttaactggtttcacgtcagctttttcctctgatttgagaggtggagttaagtgtgaactgcttaagaatgcactgttttctatttaatttggctgcggaagatggaattcattgagctccgtctgttcaaatgaactttaagcaacagcaagcaaaacatttatacttctccctgcacatgcaatcgaaatgtgtctggtgaaagaatggatgaaaagcccaggattacctaaggagagccatggagatgtgataacaactccttatctctttgttggctcatctgaagtgttaaagtgttgttgggggaaagcgagcctcttttttactagggagtattgaaggcaaaaaaaaaaaaaaaaaaacctctgagcttgagctctgatatctggaattcatcttaagactgttaaaaaatgtgcaccaccaactcccgctcttcacagctgctgttattaatgggtgaccacccttcttcctcataacctaactgttaattcatttaattggtccttctagaacagttcaaaatattacagaatttaaaagcatctgtgaattataaataattttaaagttcacatttctcatttgaacacccagtaaagggtattcgttttcaagtagttaaataagttatatgacaaaggagtgaatttaatgtggagctgttgattttttttttttaaaaagaagcatgatagctattaaagttacagcttttctaaaactgttgacatttctatggagaatgaagggaagcaattgtgtaataatgtataatagtttttttttagcatgaccttatcttttagcaatttaaatcattgctttaaaaatgtattttgtaatttggttagaagattttaaatatgatggtgtaaaattgttactgtgttggcattgaagtaacatgtcaagtacccttgttacctgtgtctattaaacatgcatttcaaaatattgtcctctttaagtagagcccgacttctcttagtgtttgtgcacacctgtgtatctcccccaggagtttcagcttatgttaaagtgtctcaggtagctaatgactgaaaaagtactgtgaattctatttagtaagaaatttcagaactgctcctatagcctgctggcagaagtaaacaattatgtaaggcaagtggggggaaacctgaaattttgttggtctcaagtcttaccctattgtttgagcctcaaaaaaaaatttactgaatcaacttaccatgttgctaaataatgcaatgattgtattgctcgtgttttaaggagaagagaggtataaaccgcattcttggcctcagaattccatagaaaaacacttgtgccaaggttacctgcctgtaaagacccaagattatatcccatgtttgataatttaatgtttggaacatagtaagcacagatttatggtctattaacatttaggtatcaccagctatttatcttttattttcttgctagctgcgtatacaactgtgaaagcttaaggcactgtagattgccattgggtcagtccttaaaattaatattcctgagattgcattaaaggaaagaaaatattaaaatatgtttatgctatattcatagaagcttacacatggaaacagaaatacatgcaacacatataaatctttttgtttacatatgcagcttttcttccagccatgataaggtgccctagaaacattcactagtctttgtaacaccccagagggtaagtagcaagaattcttatcttcatattgcaggtgaaatacctaggtaggggcagattaaatgacttagccaggtcactctctaagtcagttatgaagctagaaataaaactccaggatcttgacttttggttcctacacaagtatcagacccatcagtatttgtgcttcttctcctcacttgaaaagtaaccattgatgtaaatcctgtccctgttaaggaaatcttgctgtgtggcactagcacacatgatactgagtccccgatgggcagttaagagggtactctgctgttgcagtgaacaagctcaggtagcaaaaggatattgttaagccagtttcttgcagaccaggccctatgaagaacattatcagaagtttccataacttcagagaaagtattttcatctactttcttacattagtttctcttgaataatttcagattgcccctagtgttggaatcaatcttctgaaaggcttggtccctgtcctcaggaagtgtatgtcctacacaaattaagacccgcttaatcataaacaaagtaagcattaacattagtctagcccttctgcacatattctcttcctctctctttgatcttattttctaatttctggctaatttgattagtcttgaacaccagcgagtggccagaaccctcagcatttctcttccacaatggcaggctgtaaacagactctcagaccctcatttgcgtgcttgtctgtccatcagcaggagctaggatcaaatcacgtccagtctctgcttcctcctccccaggttggcacacgaggggctgatggctcacgtcacaaaggtactctgtgttctgttgccttttttctgtggaataactccttctggtatgacttcacttttctgttagtgagcactttcccccataaatatgcctgaacaggtgttactctgctgctaactgagtttccagctgtcctcctccaacacagacccagcaaaatctgttgtttcgtccttttaggcagactagagaagcgcctagcctgagatggaggtcttccttgcaggatatggccgttctgctgccagaagatggtccggaaagcctggctggctaacaaagacaggccttcagcggctgggtgtagttccagttctgcatcccctttggcagaaacacagaggctgctgcagtgtggccagccagcgaaattaggaaataaggacctcttttatttactcaggctgctgaatcatgggcattcctgtctgcttggagaaaagtcaggcggctctactttccactgaaagtctcaggagtgttggagactttcatctcggagtgttcacacacttgttttaatgtgctttatggaaatggtgaaactcagcaagtacagttgctgtagaaaaacatctgcactaaccatgcacacacatttgcatctttaaatagactttttaggccacagagctggtttctagcaaagctttttcggcagtaagagctacagctctcggagagtcagctcaagtgaagagactggtttcaaaaattaaaatttaacatggacatgttaagtacttcacattgaaatgcagaaaacttgccatcacccagaaagacagtccctgtaagtagcacttagtgccaaagggaaaaaaagttaaagttgattcaggaacctgagttgaaagaatcttctacagtttcttccacgtgtaaaaagaaattgacatcgtttaaacctatattcaccatttaagcttagtttgcactgtggctgccaaaaagcctaagttaatggggatggataactctcaaagtcttaggtagacctcagagtatgttggcggggagaccatcaccacaaaagtcttggaggagtctgatacctgaagagtgtggaccaacccgcttggagtagtgagtccctgtgtgttctttggagaacacaatccatttacagtactggcaaatgagagtttttacattttatattttaaaacagaaatcagcctttcagggatgctttatttatttttctataagtattattccttgctcaaactatttacttctgctcaatccccacgccttatgacttctagagggggtgttgtgtaatttcctttacaaagacaagtaatggggactggagagaagaaagaaaaggtttctgctctcttgaatcctggttaaaaccttgatcctaaccttcagctcacttgacgtgtcactgaaatttacaagcttaagagaacagttatataatagatatagtcaggcatggaccacagacaagaacctgaattaagcctggtgttagggattgcataatttttataatggtccattgctctataattctttatgtatttgtaaaaaatatatcatacctggacacaatctgcaatttaattacaaattcacttgctcaattttcaagctcaatagttacatccttctaggctggatgcattacaaattctgattcactgttttccccaaatgtataaatgagaagatgtgtttgaaaatattttttaaatgaaatagcaggatttaagcctaaaagataaatgtgaaatgtggtagattttacctagaatgttgagtacatttaatagatggccttttttttcaattagggtaaatatttgaaaccttgatttgtttcaggtatattagctttaggtgacaacacttttttaaggggaaaactagatcattattgagtttttttgcttttagttaaattttttttttgtatgttgagtggtgagttgagtttatctgcatatgttcctggtgtattcactttaagtataaatcacatccacatccatcagaccctttcttatgctggaaacatgttgggttatagagtcctataaatgaggatgcaaaatcatgcggttttcaacttgtatggcgaagctttgttgcagtgggcaaggatccaggaatcggtgtttggttgttttctcagagtgagagggttgccatctggcattgatagtgagatggtgttgtcatcagtttctagatgcaggaaaggaatgatcctcatctgtttcctgtggataaggaagaggctgacaatctagtaaaatcttgttaccttaaagaaagcagacatggaattcgtttacataatgctcaccagtttctacttttatattaatcatttagcttgctagtgaacttcagctttgaagaatttaaaaacttatttgaacatactctaattgaataccattagaatattctaataatgctctaactgagcctcttattctaactgaaacactatccccaccagctccactccatggtctttacttgtgtgtttttttgaaaaatcgtgctcctttggagagtggaaagcttttaaagtttcttctgatcttgaataataggttatgaaaagcaaaaaagaggtttcacaacctgctttgagatggtcttattttccacttggatatcaagaaagcaacagaaataacagtgcacgtttgctaagaacatagtttttaaaatcacctaatataaggtaacattcctttatggataacttgctaagtttatatctggctctcagtcttgtttgtcttctttttgtcactcataaatctttcagcatttaccataatcatttatcacttttcctgtttccagtttttcacaagttgctttgtctctgctcacctcaaagtgcaggtcctgtttagctaaggaagttcaggctgctgaagcttttgcaaaaggaagatatggtgggccacctcttgaactttccaaacaaaatacactattaaaatctggcccttgtgaaactctcattttttcttgatcctagctgatcctagctacatgtaatatctagcagtacccttctaacatttaataatccattttctggcctatggaattcgaatttcagttattgaagaaatcctggttatctttcattacacaagacataattattattgtgttttctgtcttctttcatgtgcttactttttaatatttttttgctgaaagcaataaggtctgtatcaataagaaccccgtaacagattttggtctgcagaattgcctttttatataaaaacaagcaaaatgcagagggaattttttattaaatattagacatctgggttgactgcattaattttaaatcattcccgtaatatttcctcttttcatttggttcttcagatgctcacataatatgcaaatcattttagaaggaatacaaaagaaacattaaatatattaaaatctgcattttaataaaattgtcaatgtgtaatatataccttgcttctaaggaagaatgataaaaagtaataaaagggtaatttagacatagaactatttaatatcctcttatattttacaactcaacaaaaagtaaatgcagaataactgctttgggctcagatttgaaaatgtctcactcaaatattctctcttttcattttgttttttcttgaaagattcaagagggcccaactctgcgtgctggttgaaatgctacggtaaactcactcttgaatctcaacatgtcagatgaaatttgtcattgcttcttgttgcagatggagtggatgttgaagatgatccgacttgctcttggccagcttcctcaccttctagcaaggatcagacttcccctagccatggagaaggttgcgattttggagaggaagaaggtggccctgggcttccatacccgtgtcaattctgtgacaagtcgtttagccgcctcagctacctaaagcaccatgagcagagtcacagtgacaaactgcctttcaaatgcacctactgcagtaggctgttcaaacacaagcgcagccgagatcgccacataaaactccacaccggggacaagaagtaccactgcagtgaatgtgatgctgcgttttccagaagtgatcacttgaagatccacttaaagactcacacgtccaacaagccatataaatgtgccatttgtcgccgtgggtttctgtcctctagttccttacacggacacatgcaggttcatgagaggaacaaggacggctctcagtccggttccaggatggaggactggaagatgaaggacactcagaagtgcagtcagtgtgaggaaggctttgacttcccggaagacctccaaaaacacattgcagagtgccaccccgaatgctccccaaatgaggaccgagcggccctccagtgtgtctactgccacgagctcttcgtagaggagacctccctcatgaaccacatggagcaggtgcatagcggggagaagaagaactcatgcagcatttgttctgagagtttccacacagttgaggaactgtacagccacatggacagtcaccagcaaccggagtcatgcaatcacagcaacagcccttccctggtcacggtgggctatacctccgtgtccagtacgactccagattccaacctctcagtggacagctcaaccatggtggaagctgccccgccaatcccaaagagtcgagggaggaagagggccgctcaacaaacccctgacatgactggtccctcgagtaaacaagcaaaagttacctacagctgtatttactgcaacaaacaattattttcaagtcttgcagttctgcagattcacctgaaaactatgcacttagataagccagaacaggcccatatttgtcagtattgcttggaggtcctgccctcactctataacctaaatgaacatcttaagcaagtgcatgaagctcaggacccaggtctgattgtttctgccatgcctgccattgtctaccagtgtaacttctgttccgaagttgtcaacgacctcaacactcttcaggaacacatccgatgttctcatggatttgcaaaccctgcagctaaagatagtaatgcattcttttgtccccattgctatatggggtttctcactgactcttccctggaagagcatattagacaggttcattgtgacctcagtggctcccgatttgggtctccagtgcttgggactcccaaagaaccagtagtagaagtctattcttgttcctattgtacaaattcgccaatattcaacagcgttcttaaactgaacaagcatatcaaagagaatcataaaaacattcccttggccctgaattatatccacaatgggaagaaatccagggccttaagccccctatctcctgtggccatagagcagacatctcttaagatgatgcaggcagtaggaggtgcacctgcacgtcccactggagaatatatctgtaatcaatgtggtgctaagtacacatccctagacagctttcagactcacctaaaaactcatctcgacactgtgcttccaaaattgacctgtcctcagtgcaacaaggaattccccaaccaagaatccttgctgaagcatgttaccattcactttatgatcacttcaacgtattacatctgtgagagttgtgacaagcaattcacatcagtggatgaccttcagaaacacctgctggacatgcacacctttgtcttctttcgctgcaccctctgccaggaagtttttgactcaaaagtctccattcagctccacttggctgtgaagcacagtaacgaaaagaaagtctataggtgcacatcttgcaactgggacttccgcaacgaaactgacttgcagctccatgtgaaacacaaccacctggaaaaccaagggaaagtgcataagtgcattttctgcggtgagtcctttggcaccgaggtggagctgcaatgccacatcaccactcacagtaagaagtacaactgcaagttctgtagcaaagccttccatgcgatcattttgttagaaaaacacttgcgagaaaaacactgtgtattcgaaaccaagacacccaactgtggaacaaatggagcttccgagcaagtgcagaaagaggaagtggagctgcagactttgctgaccaacagccaggagtcccacaacagtcacgatgggagcgaagaagacgttgacacctctgagcctatgtacggctgcgacatttgtggggcagcctacactatggaaactttgctgcagaatcaccagctccgagaccacaacatcagacctggagaaagtgccatcgtgaaaaagaaagctgagctcattaaagggaattacaagtgcaacgtgtgctctcgaaccttcttctccgaaaatggcctccgggaacatatgcagacccacctaggccctgtcaaacactacatgtgccctatttgcggagagcggtttccctcccttttaactcttactgaacacaaagtcacgcatagtaagagtcttgatactggaaactgccggatttgcaagatgcctctccagagtgaagaggagtttttagagcattgccaaatgcaccctgacttgaggaattccctgacaggctttcgctgcgtggtgtgcatgcagacagtgacctccaccttggaactcaaaatccatgggacgttccacatgcaaaagacagggaatgggtctgcagttcagaccacagggcggggccagcacgtccaaaaactgtataagtgcgcatcttgcctcaaagaattccgttccaagcaagatctggtgaaacttgatatcaatggcctgccatatggtctgtgtgccggctgcgtgaatctcagtaagagcgccagcccaggcattaacgtccctcccggcacgaatagaccaggcttgggccagaatgagaatctgagtgccattgaggggaaaggcaaggtggggggactgaagacacgctgctctagctgcaacgttaagtttgagtctgaaagtgaactccagaaccacatccaaaccatccaccgagagctcgtgccagacagcaacagcacacagttgaaaacgccccaagtatcaccaatgcccagaatcagtccctcccagtcggatgaggtaactcgccttttttaatgtttgctatttaacctcctcaagaaacggtccctgctttatgtttacactctccacagctttatttattgtcatgggccaaaagatgcttagattgaaatgcagtgggtttctttttcccccatagccattagctagcaattacttgcttcttgataagcagcattttggcttgaatggtgcaaaataggactaattccagtctccctaggatattgtcttctctatgactgaagagaccagcgctcatgccaacactactgagatctggaatctcagcatagcttcaccgtgagttgaaatccccagctatgacttgtgtgtatggcagagagataatgactcaaaagtaagatgctatgagccaccatgctggcttagagtaaattaaaaagaatatatatatttggggataacaaattgggtaggggtggctttttaatgccatgttgtcaacactcactgtttttctttgtcttctgggtagagaggaaaatacttcctcacaacaggatttttaaaaatcccctacatttattaagcaccacatgcccattattctgtttaaagacactatccctgagtttgaggcctactctctgggtttcaaaatcaatgtgtgcgtttttttttttctccttagtttcagagtagttttctgctttctttgccgtgacgagtacaaaaaacaagttcatttacaatgaaatcatttcataagtcatcatttcttagtagctgagcagaggatggctcattttaatatttctttatgctttatcacctggtttctaaaagctctttccacttccctacctgcccctatctggagatccatccaaatgaaaaccccagggagatccttctcccttcagtttggggttactgcattttccttatcttgtctctgcactcacaccctggcggaggcccccctgtggctccctgcagatagccatcagtcagctggcaggggcgggctgagaagactgagacagagcctggcctcacaaaatgtggcatctgtgtggcaggcaaactcccaaactttgaagccactttcccccttctcccctccccaagtaaatctgcacttttctctcatttaaatacatgaaatcctttcaaactgctgaggacagctggaagaacatagctttgattatggctcatagctcatgggttggatcaaattgtttcttttgaaacaaatattagtagttaaaagcatatgaaatgagggttttccaagtttttacttcggaattttttaaacctatagaaaagttaaaggaccaacacagcgaacacgtatgtgtgcctgtgtatgggtatccccaggtcctccagataagaatattttgtagcgttttctctctctctgcacccctttttaaaatcaacttcagccacatgaaagaaagttgcaggtatcatgacatctcctaagaataagggtatttttttgttcaattatgacatcattagctaaagcaattcactaaattaaaaaaggaaattaagtaatcccataatatcgtctgtaagaggttcatatttagatttcctcagttgtccccaaaatgtctcatatttttaagtttttgaatgagaattctgaaaacattaaggcagaaaattactcttctcctttgtttttattttgtaatgcttaacatatgcctacaagagattgatactcatgtttaatttacaaagtgtgtaaagttgattttaaatgactgcattagtctgtgtgtctgtgtgtgtgattttggtgttgcttgtgcattttaaatgaggcatagctggactctcttgtttcttagtagattgtttatgaaagggcatatgcctgtgtcttcttatctgttcatggtttgtattttctgatatttataaattgctgtaattataataacatctaagaggaaatatttcaaaaacgaatgaggacatataaatagtatttacacattaagttggttagaattactcgatgaggagaatttatcattaaggctcgaatgacacctaaaatcttagtgatatttagaaagcctatctttatcctgcacttacataggataatacttcaaatattttttaaaatacttgtttaagttttacaattgcatttttaaagtacctaatgactaagggtcaaaaatgactatgcagtcgagtacctccctatgaaacctgattaataagagcttagagtggtatgcttaattgatgagatattaggatttagtttcaaatatttcttagtgcctcaaaagttcactaatttgttcaacattttaatcatcgttactatcgccatttttaaattcatcatactatttgttataaaattttgtatgatactctctacaattaaatatgtacaatataccatattatttagactaatatagaaaattatctaaatatacacaaagttttacaaaaagaagcctaaaaataatatgtcagcaagaaaaatacaaaataaatactcatttgttcacattctttgttagccaagttaaatttctataagttctcattttgaggagtttgtgcattttttccagattaggtaaaatgaaatgttattatataagtctttgtcaaaagacaggtgtatcatataggaataaattttatcacaaaaagaaatgtgacatatatgtctattgacttagatgccctaggtagcaattgaaggacttagcaacataggtggtattttcatctcttcttcttgctgaggcttgagactccagaagtgaaaagaaaatcacaggagataagaaaacctggatacataggtatggtcaagaacaaggttagatttttctggaccatgacttagaattacatagaatatcggtaaacatttgtgtccatctttcaaagactaaaaagaatattatatgattgagactaggtaggatacctaattaaaagggatttaaacttaaatataaatctggggaggataagtactatataaaaccctgcaatccaaaaaatggatgaaagacaaggcatgcaacactaaaagaaggataattgttggtagctgttatgtaatagagagatttgaaatcgaaggcagatctgagtttgaatcccatttcttctgcctaatgctttctgaatttgtgaaaaatgttttctttgtgccagaatcctcagattattaatctaaatttgcagtgaagattttgttttgaataaaatattttggagaacctattcatttttctttgctcctcaaaggttgagtgtgatagaaatttacacataacctacaataaatgattccagggatggtaaggttaactggggacaggaagaacactggccctttagctgtttccacacatgaagcaccttgcagttattgacatttactatacgttgaataaatgttgattcttctggagttcatgggcactgtctactcaggggctgccccatctggacctcagaatgttgtctcatgactttgaagttctacagtagattttggaaacacgtattcttctgcctcctttttctagtgtgcttcttagtcaagtttccctgagcaactatttactcacatttcaattcacactgtcctcaccagtcctttgaaattgctcttgccagcattaccattatcctcatgatctccatgtcgcgagatgtgcatagggtgccacagaatcaaaatagaaggaacagtgtagaccatctgactcagccactttattttacagacaagaaaacaggggcgggtaaatagaggattgtctaagatcacacagccagtaagtggtaggcaaggggttagagttcaggttaactccaggttcaggattctctttccacaatcccgtggcactttcctctagctgcagttgaatccccgtcttttctacagcatcctctcggtactcctgtcttctttctcttctccttcagttccctcacccattgcccaggatcttctgcattcgtcactttattgcagctgactccaagggctcttctggcctaattgaccaatgcattgtacttagagaaacaaaaagatagtatatcttagttattattgtctctaagcacttgtcactgttggccagtccacttttatggggcctctgtcttccttcctggcttcctggttgcctctgtgaacgccctgtggcctctccttcttttgctagccccttcctgtaggtttgtttccccctcattgctctcagtctgcatatcccctccatggggcctccttcgctcccagagcttgaacgaccaccttttactgaccgctctccaaatagtgtatccaagggacaggaggggacctttgggagctggtgggaacactctttatcttgatgcctgtggtggttacgtgactgcatgcatttatcagtactcagcagatttaaaattggtttattatttttatggggattacacctcaatgaagctaattttattttattttattatttattgatttcagacagggtctcactctatcattcaggctggagtacagtggtccaatcatggctcactgcagccttaacctcccaggctcaggtgatcttcctacctcagcctcctgggtagctgagactacaggctcatgccaccatgcctggctaattttttgtatttttggtagagacgagcttgccgtgaggagttcaagaccagcttaggctcaagcaatccacctgcctcagcctcccaaagtgttgggattacaggcgtgagctaattttaaaaagcaatgatgtctccaactcacatctttgctctgagtttcggactcatataaacagctgcctgctacacgtatccactcacatgttcccttgaacttcaaactcagtgggtcccaaatagaactcagcaccttttctctaaacctgcattttttcttatgttttctatttcacctgtaggtccatcgatcttctcagtcacttcctttctactctgcatcatttggtcatcaagccatcttgactgcagctcatatgtacagttgactcttgaacattccaggagatagaggcactgacccctcactcggtcaaaaatctgcatataactttgactccctcaaaacttaactactaatagcctacttatcgataacataaacagtcagttaacacatactttgttagttatatgtattacacactgtattcttacaataaagtaaaccagagaaaagaaaatactagtaggaagtcataaggaagagaaaaatctgtccattaagtggaagtggagcatcactgaggccttcatcttcattgtcttcaagttgcgtaggctgcagaagaggaagaagaggagggtttggtcttgccgtcttgggggtggcagaggcagaaaatacacatataagtggacctatgcagttcaaacctgtgttctttgagggtcagctatttttcttttcttttttttgagatggagtgtcactcttgttgcccaggctggagtgcaatggcgtgatctcggctcaccacaacctctgcctctcaggttcaagtgattctcctgcctcagcctcctgagtagctgggattacaggaatgaaccaccattcccggctaatttttttttttttttgtaatttttagtagagacgggtttttttctctcagacagggtttcactctgtggcccaggcttgagtacagtggtgggatcatgggtcactgcagcctcaacctcctgagcaatcctcctggctcagcctcctgagtatctgagactatacaggtatgcaccacatgtccagctaattttttttttttttttttttttttagtaggctcgaggtctcattatgttggccatgctgggctcaagtgattctcctgccttggtctcccaaagtgctgggattacaggcgtgagtcactgcacccagccaactgtttttcttgaatcaactcctcccaccatccccttaccacgttttaagttcaatctctgatcttcttttcctgagcaactgaagcagcttcatttggtccttctgacttgagtctcatcattttcaaatccatctccacaccactgccagaaccatccatctaaaacacaaatctgtctagcatgtcccttcctatttgaaacattgtaagtgttctgctcctccatccccataggatgatataataatccttttattgtgaaatacaggacccttcaggtttcggctttcccttcttttccctgccctctccttgttctataattggaagcactttaattaaccacacataacatattgtctctgtgtcttactgaggctgtcctgtttcttctccccaaataacctctctcctcttgactgtcttccaccttccagaaggctgtccagcttatcctttctttggagatcaactattctagaaggccgtctatgagcctgactctccatcccaagcatctccctatcccctcaatgccctgtgcagataatatggagtaaatatcacgtgaaaattgttacactgctttgtgattatctattacattgtcttttcctctgattaatttcctgggacaagaacttactcagtctcatattcttggtacctctgacagtgccaggcccatattaggcaaaggcctcactgcatgggtatcatgccatggagcttgaatgtgcctggttgccctcccaaaatatcttcttatttttgcaggacaaatgaccacctagatttttcatccaggaaacctttgtctgaaatgtcgtatgtataccctagactcctggttctctctcctgaaacgttttcctcttccagacttccatcattttagtaaagggaaccactctacacccaattactcaagcaagaaacctgtgaatcattcctcattcctcttttctctcattctccatgtttaatccatcaatgaatgctgttgattccacctccaataagtatcttcaaatatctcatccacttctgtataccttcaaagccagaattttagtctaggctgcaattgtttctcgtctggataccgcagtagcttcctaacagatcctctccttcatcttctgcctacttccagtccattcttcatgctgcagttggaagcgtagacctgtaaattaagtgaagtcacttaaaattttttcgtggcttcccactttctcaaatgaaccccaacgcctcaccagcttacaaagtcatgggctctctggctgtggcaggctattctcacttccttctggtgactcttccttcttaactctgcccagatcctgaacatgtgctgcttccccactttatcacctgagctgctcttcccaaacagcctgtctgttctgctggctctttctcgtctgtcaggttggccttcctgaaaaccttatcaaaggtggtctgccctttaggattttcttttaaaaatgtcattatttgttcactcggccgggcatgatgcctcatgcctataatcccagcactttgggaggctgaggtgggaggatcattgaggccaggagtttgagaccagcctagccaacacagcaagatcctgtctctacagaaatgaaaaattaatcaggtgtggtggtgcacacctgtagttctagctactcaggaggctgaagtgggaggattgcatgagcccaggagctcaaggctgcagtgagcagtgatagcatcgttgtactccagcctgggcaacagagtgagaccctgtatcaaggaaaaaagccctatttcgttcttctcctttctcatctctgaatgcccatcaacttatcataagggctcagtaaatgttagttgaataaatgaatacagtgtaagtccttcagagtaacacaaaatggtgtatactttattttcagttacatctagttactaatacatatgggtataggtcatttagcctaaaactattttaaagttaggtttgatctaaaaatattaaaatacagtaaaaggtttgaagtttgtaacaatccaaagttcatctttaatatgaagatctgttttaagtgtcttagaatcaatattttttatggtttttgtatggaagatggaaatgtgcatgatgacaattcagaacctactcaagtcccggagttctgttttgtattgttctgttcatcagaatttccctatgaggctgaaaaaaacaggttgattaaaaaatattttaaagttttcaaatttcaaattgctgatactaagttttgctaagttaattatgcaaagagcaaaaactaaatgggttaaactccctctaaagagacagtatttaaaaaattaaatagaaaatttacaggaccaaataaattgataaggttcaaggtgttcttcaaagacagtgaattgctctgccaagtccaatctgtattgttgttgttgtattcaatatttttttgccatctacaaagtaatagaacagggagtcaacggccctggcaccagtaccatgggttggaatgtgggagcaggtgccttgcatccacgctttctacccagttccgtgatcacctgatactgaccattgcccccattattgaatttgctgcatctaccattcctagattttctgtacttacctccagttctagaccttttgttgatattttttatatggttacagtgactttttagaacttatgaaattcaaaaataggaatgtttttgtatttcaaattgctgattgcacataataacatttatccttttggtactaggccaaaggactttggaatcatcttgtgtcatcatagaactctgtctaggagaaacatttcacatttttgactgagattttgtcaagatggagattagtaaatatctagtcaggatgattttaaatgatgaaagaaaagtgaaagctatattccggatgtctggatctcttattacggtgttgctctacctaccacatgatgtagatgtagttttctagtacatgtactttgtatttctagaaatttagcagcctaattttaagaatcttgccaaaagcttttaaaaagcctgaatagctggttccccttatttatacttttacaaacctttttatgcttttttatcttttaaatgtgcatgtttctaaaggttctattcttaacctacttttctattctgaaataggaattcctatttcctattacctcattattatcccatacaaataagcaaaatatgaagtttcaattctcaacttctgtttaactcccagtcttaaattttcagcttcccttttcacattaccagttgaagcttctgctagccctttaatcaactccaactataatttcatttttctcccattttggttagtgtttcgtctttcgcctcgtcattctgcctgaaactttgtttctgtttcctatatgtttcctgttctcctaacctgttagggcagtcactccccaggagccattgattattcttttgtaatttctcttctatctgcatctcctgcatcctttctccaggccaaactatattaaatctcagctggtctccttcacgtgcttcctatcataaagcttatctcaataaacttaaaacctgaggatcacacaaatcaagttctctgactataatacaagtaatttataaatgaaaaggatatcttaaaatcatacattttaaagtttaaaacatacattgaacaaagaaggcataatatagaaattaaaaatgctgaaaactgaaggataaatacatttcaaaagtttcgagatataactaaatgcaccacttagagggatagttgttagaaaatatactttagaaaataaggaaagcatactatcactgagatatatcaacttaagataaatagaaaacaaagaaacaatgaacaacaaggaggccaagaaagtgaaaagttagttttctgaaaagactgacagaatttacagacttctggtgagatgaatcagtaaaaagaaccagagataaataatattaataatgaaaaggggagccttactttgtactcgcagaagttaaaaagctaataggagaaacattacacatatcaaaataactataaaaagaatgcaataattctttttttgagagaatgaggagcaaaatgactttattcatgtaaagtttaagaatggacaaaactaatctgtgatgatcaaagtcagagtagttacttctgggatcgtgtcaacagggaaggaaaagcaaggcgttacctggatgctggaagtgtttcatatcttctctatgtgttggttatcctggtgagtgatatctgaaatttcaccaagcagtatacttaagattactacagtttactatatgtaaagttatttcccaattaaaattttacaaaaaatgccaaatgaagataaaagaagaaaaaataatactatgagtaactttatgctaatggtagagaatttaagttacagtatatagaaaccatcttagaataatatgttaccaaaaatggctcaagaaaaaaagagaagtatagtgattcaataaacattaaagagtttaataaattgttgaaaatctttcctccaaagaaaatattaggctcaggtggctttcaaaatgagtcgccctaaacatacacataatttcaaaactgtgcaagaaaatacaaaatgagaaaatacctttgttcatttgatgaatctgatatgatcctgatatcaaaaccagacaaaaatactgaaaaagagaaatgtaggccacttttattcatgattttacattttaaaattttgaacaaagtattagtagctaaatccatgtataaaaaagagaatacattatgattgaaataggtttatcacaagaatgcaaggtgggttcaatttcaggaaatcaattaatttaattgaccacattaacagattaaaagagataaattatatttttatctcaaaagtcaatggaaaaactgtatttaacatattttcatgatcaaaaaagaacactaaactaagaataggtgggaattcccttaccctaataaaaactttttaaaatattatcttaagcaagcattataaataatagttacatataaccattattttattatatagttatatattttataatataattataatgtaactataatatcattataatatatgttataatgtaactatattattatacttacaatgtaatttgcagggaaattttaactaatattttataattaaaattactattaaggcatgctgggtgatgtagcctgtaagctaagataaaatcaaaatgaatttgagtattagaaaaaagtagcacaaaaattgaaaatatacagattataatgtcatatacaggtaatatatttgcatgtaaaacgacacccaaagaatctaaagacaaattattacaataaaactttagcaaagttgctgggtaccaaatcaacacatttaagtcaactggatttttattcactagcaaaacccagaaaatacacattttaaaataatcctacttatgatagggagaaaaaaataggtacttagaaatcaatcttacaaaatatataagacatttatggaaaaaatgataaaacattactgaaatattttaaaagacttgaataaatgatcagatataacttgttcgtggaagttataggaagactcaatactgtaagtctgtcagttatctctaaattgatctatagatttagtgctattccaatgaaaatttcaacaggttttaaaatatatgtttctatacatatatatatatatatatatatatattttttttttttttttttttttttttttttgagactaagtctcactcttttgcccaggctggagtgaagtggcatgatacttggctcaccacaacatccacctaccgggttcaagtgattctcctgcctcagcctcccaagtagctgagactacaggtgtgcgccaccatgcccagctgatttttgtatttttagtagagacagggtttcactatgttggccaggctggtctcgaactgctgaccttgtgatctgcccaccttggcctcccaaagtgctaggattacaggcgtgagccaccatgcccggccattaaaatattttttatatatttttattttttggaacttgataagcagtttccaaaacatgtatagaagaatgaaaagtcacatgacaaagatattcttgaagaaaaagaataggcagagaaaatatttgtcccattttctagtcaatttataataaatctgcagtgattaggattatgcagtgttagtccacagaaccacacagagatttctccaaaaaggatattacatgtataaaattcagtgtagaatagaactgcctttgcacattagtggggaaatggataaactattcaactcattatctatatggaataaaataaaattgaatctctactgacatgtataaaaattagtggtttaaagacagatgtgtgaaaggcaaaaccataaaccttttagtaaaataaaagaatatttttatcactttctataagggaattattttgtaaacaagcccacacaatataaatcacaaataaaatatgttcagcaacgttaaaaataatttatgtttaccaaacatcatatagggagtgaaaacaaaagctacaggtttataaaacaaatttataacacataactagaaaaatgaatagtttccaaaactatgtaagaaacagctagaaactgatggaaaaacgcaaactgccatataggaaaatgggaaattgacatgaacagaatttcacaaataggaagcatgaaggtccagtgaacatgtgaaaatatttattctcattattaatatagaaaatgcaaatttagagaaagagtaacggattgtctgggagggctgcataggaggctgtgcaggagtccaggtatacaggtgtttaacagttaactctttatacattacctatgttatcaatgctctataagcatttaatctttaacataaaaacaaaaaactcccaaaactcagaaccctaagtatataatcagtatcattcaccataaatagaagaatgaatacaaaatgatattctaaaatttctagccatatattctaacccacaaaaggctctgagcctgaaacctgttcattactacaagtttattaagtgttgtagaggtattaaagacatattagcatctcagttaatcttttttctcttgttattgtgattagagcagtatccatgtattacactttaatgggtatatatctcacactttggggaatattagcatttagcatgaacttttttattcctcatctggtacttcaatttgtgataacagatttattaattcctgccatgcacaaggcattagctatcaggtttgtaaagaggagaagctttatacaaatatggttatttggatacatgtctttctcctctgtgtatgtctggcaagcttatgtgagaacagggagacagtatgcctggagcagagtgagcagaggacagagtcgtgggagagaaggtcagagagctggagagaggggcagaggctgggctttggcttggtagcctccgtgggtccccggttagttacttgtatgccataggttctttgtaaacacttgtaaataattgaagcctggtaattaaaatatttggaaaatgaagcaaagaaggaagcatttctctaaaaactaaataatagtacaggttctcagagccacacatgaatagaacattagacacctcgtaagtatgtgatatactatgcacttcatgtcataaagagattgagtggcaggcgaagtcctataaaaatccccatatcaaggcaaataatttattttattgaattaaacattgtattacataagcaaacctttaactgagtctgtaaattttttgttatagggagattgctgctgtgggcatggggagtttaaggatatgcagcatagtatagtagaaggaaagattgtccttagggaaaaaaaatgagttcatgtaacagttgacagggtcatctatgtgatctcagccagtccttcctaagcttcagtttccttgttgctaaaatgggcattcaacatactttaccctctttataaggtatcatgaaaagcagatggcatagtctatgaaaattcttgctaaacatgaagcacactaccaatgtcatatgtgataaatcatttatatagtatgtaatctacacatacccctattatgtatgtattatgtatacatatatttatataattttttcaatttgttattataatgtagaattatttcatctaatgctagaactatagcttattcagtcaaagtgcatctaaatgaggaatcatatttccacaaagttgatgaagtggaaaaaacatagtttagtcttaaaatcaaacttaaaggcaatgaaaatcagggagcaaaaagaatgtaaagaccacagaaataaaatgttactttatttgaggtcagagatagtgtcaggtagcaatacatataaaaggtagaaacgcatataaataaatgagcatataggtgacaaatataatcacagttaagaaaggaaaaatgctcaatagtattattggattgcaagggagttaacaacatcttggagaaataacatttaagtcaagtaaaaattggacatgaaaggtttagtaagtgaataccaaaatcaggatttctaccctctaatcctaggaaacaaatgagtagcttgagaagcagttcgtttgaaagggctattacttgcccaaaatccaccgacgatgccctgtatgaatcacatacacagtatttacatactggggggaaaacgtagtaaaaattgtctctctttttggccacgatttgtaatttagatgtataacctctttattttaagaatagaaacttggccgggcgccatggctcatgcctgtaatcctagcacattgggaggccgaggtgggtagatcatgagcctggccaatatggtgaaaccctgtctctactaaaaatacaaaaattagccaggtgtggtggcgcgcgcctgtagtcccagctactcaggaggctgaggcagaagaatcgcttgaacctaggagatggaggttgcagtgagccaagatcgcgccactgcactccagcctgggtgacagagcgagatgctgtctcaaaaaaaaaagaaaaaatagaaacttatattttaaaaattactactaagtaagcaattgagagatatttcaacacaaagatacgccatgatttagaagtcgagtggcatcgttaaatctaacttgacaaagtctgctgttaacatattcattttaagatagatctaaggattatcttcgaaattttacatttaagttcggcttaggcagtaggaagcaaaaataagctgtattaaaagctattgatacagtccaagcaacgtagcaagacctcgtctctactgaaaatttaaagaaatttaatgggttcagtggtgtgtggcatgtgccagcagttcagctactcaggaggctgaggtgggtgtggggaataaatgaatgaatgaactaaactcaaattaatctaaacagtgtaacaagttggttttaaatgttttaaatttggcataacaaaataatattgcaaaagctattgataaatatctagaaattgataattataagcagtgaccacgtgtttgataaaggtcatttttttcaaaaaagagaaagtaagaggaggaacagaaaaaaggaaaaaaagaaaagtgggtttaagggagggagggaaggaaaactaaacgaccaggtaaagtagctgaaaaactggcaggaaaccccctaagcttaaaatctgtacttactaaaactggagaattaagatagttttgatggaaaacagattcttttagcaccataattgtttctagattgatattattttgttatacaaaatttaaaatgctgtttagattgagtctagttcattcattcatttattcaacaattaattgagtttcaaatgtgtggcaagcattgttcatagacgttgggcacaaaaggcaaacatagttgttgcttcatgtttctctcagtaaagaattaaacctataaaaagcaaatatatcttcaaatagtgattcctatgtatattaagactgtgaagagctggcaggattagaagtaggactatgtttaaatgtctagtaaggctattcaacagtgatattgcaacatgtcttttaaaagaatgactgatttgtcacctggatttctaaagaaaattaaaaaaaaatcacggtgctttccttgcaagatgtcaaatttgatattatccttttcttaacacttctcacctttcatattatatactgtggtagaatgttctcaaggagcagaagcttggttgggaaagggccccctatttttccagattatattcttagactttttttatttggagaatttctagctttatgcaatatattatcagtaatgattatgcagaactttttcagtgctgcagtttaatctttctgggatgacctgaaggggaactaagaggttatacctggttgtatgatgcagaatctaggtgtgtttgataacagcaatctggttccctccatcatgatattctgaaaacgtttacttttaggtgtacatataaaaagctcacatcagttcacttctgtgtagttcatgcaccctttcacaaatgctctctgtcaggcagtgtgctgggtgtgagagcttaagagaaaactaagacgttactacttaagtgacaggaaacctttgaatataatatgcacattctatgcgctgaaagtgtacactgggaaatgaaaaccctccaagaaggcagcggttagtagcaagaactggcgatggagaggcggtgctggagagtcggtcctggagtcctgtgccccgaggagccccgatgagttgcaagcatcacagannnnnnnnnnnnnnnnnnnnnnnnnnnnnnnnnnnnnnnnnnnnnnnnnnnnnnnnnnnnnnnnnnnnnnnnnnnnnnnnnnnnnnnnnnnnnnnnnnnnnnnnnnnnnnnnnnnnnnnnnnnnnnnnnnnnnnnnntttcattgtctgtgaggaaatttgaaatacatgaacttacttgtccgtttcaatcctaaaactccacaataccctatataagcttggctgttacctttggaaatgcagagaatatgggggcatttttttcctatttttcaaaaagatattttcgggataatgaatggggaaggttttgaaaaatctagataattttagttaaatcaaggggttaaaagaaccctaccacttgcacatttgtatacattgtaattgcacagcatgttctagaataggtaaagtgaaagaaacacacctctgtcctaaaaaatttactaagagtacaaacaacaggaataataaagtcagcacccacagcattgtgtgggtgtaattgctagcaagctttctgaagcaggtgggttttagaagtgatttgaaggagaagagaagggtggtctgacatgcctcagtaggaaagctgttcaagtggaatggatggatgagaaaatgcaaacccagaataagaatatggagaaagagagaaacaaagtaagaactgctaagagaaagggggacatgcattaaaatatctcagcggagataaaagttataaagaacaaaggtaatttgggcacatacatggataaatgaaatgatctagtataagacaaaccacattttgtaggtaagacacaaaaactaccagaacacgaggtatttctttgacagaagactagctggaaggatacattagagatataaacaaaagagaatgactaggactccacaggagccttcatctaaagagaagtagaaggaagcaaagatttttattgcacagtgaacaggtatgagtcatttacatattaatttgttatgtgtaactaattatgtattgcagtagatacaaaatgggccgggcgcggtggctctggcttacacctgtaatcccagcactttgagaggccaaagtgggcggatcacttgaggccaggagttcgagaccagcctggccaacatagcaaaaccccatctctactaaaaatacaaaaaaaaattagctgggcgaggtagctcatgcctgtagtcttagctactcgggaggctgaggcaggagacttgtttaagcccaggaggtggaggttgcagtgagccgagatcgtgccattgcactccagcctgtgtgacagagcgagactctgtctcaaaaaaacaaaaaaacaaacaaattaaaaaaaaatgaataagacagagccttctacctagccttaaagagcttatagctgttcaggatcagttttattgaaataattctgatacaacatgtaaacgaattataagagaattttttaaatgagataaaaaatttgtctgttttatccttttgaaatttgtgatgactttttattaaatgatatcaagtactcataaaatgaaccaatctaatttgttttaggacagaaaccatatacttaggaaagtatttcttaatggattctaaaatactttattctccctaataatttttttcctagtttatggtgggattataagttatactaccactcttctggatggggtctctctgggcatgtgatgtgatttgatggtgatgcagtgtgcttacatactgtcgctactccttcacctctccaattgtccatccttgatatctaccagccgtagctccttattttggtaacagtgaaacagaaagaagtttcaatactttttaatgaaaacaatcagatgatcagaataattgatgaggaaaataggccctaattttgtgtaaccccaaattttgacttctcttttccttctcaggtttgtttctaaaagagtgattatttaaacccatattttcccaccttcaatttcttacctttcttgaatgacatgaacatttataaaacagtcaatgtaagaagttaactagaatttactatgaattataaatgtcttcaaataggaactaacaaaatagtatagccatgagtagcaagagacaaattccttttcctagctcaaaaataattagcacatgctctggtaattttttttttttttttttttttttttttttaccttcactacggcatcaatttagtctgttattcatcctcttccaattcactgatttctggtgctgtgtaaggtggtaggcagttttgcaagcagaaatagaccagtcttaggtaagtaccttatgaatgaaggtgatggatttagaatgactcattagattgtccattcaacagtcagtaaacaaaatgtattgactgcctactctgtggaaaacactatgggagattttattcaggtagattttttatggcatagaaataaacagcaactgaaaccataacattaaatgagatgatctagatgaagataccttatttggaaggtctcagtggactgtgtagggagggacatgagttggtcccttggaagagactccaaaatgtgaaggaggagagtaagcctaataaagcatctctctccatgggaaacttgggcacagttttttcagtgtttaatgtgagacatcaatgagttcaagtgtgtagaaagacaaattttgaagaaaatttgttaggagacaattttgaacttaaaaaagattatttgttgttctttattaattttaaacttaaagtaaacattattcttagaaataaaatgactctttattcctaaacttcaaggtagtaaattccttccatgagacatgtttggtatgatccatggaaatgactccatctttaacactgagttttgcttttaatgcatacctgtcagatttttctgaagactccactcaattatttcctggtttttgactattggggatacctttgaaaataaaatattttaatactattttatctaatatttaaagagaattcaataaaacattttaaaaatggctcaacttttttactcaattataaatgtagtagtagcttaaatttatatcttcatggagtttagggttttatttgtaaaaataaatgtattagatcattcttgcattgctataaagaaatacttgagactgggtaatttataaagaaaagtggcttaattggctcacagttctgcagtgctaccacctgctccacttcttgggaagtctcacggagcttttactcttgcaggagggaaagcaggagcaagcatctcccatgggaagaacgggagcaatagagagtggcggggaggtgccacacacttttaagtgaccgcatctcgtgagaactcactcactgtcgcagagacagaaccaagctttgagagatccacctccatgacccaaatacctcccaccaggggccactttcagcattgggaatcacaattcaacatgagctttggttgtatcaataaatatacttcatatacttaaataaatattttttctccctggtactataaaaattgcaactcagtcatttaaaacaagtatctataggttttttcttttctcttccttttcttgtctagtcagttggccagaagcaatcttctaatttagccctggctctcttctgaattgtctttctatttcccaccatctgtaagcaactgggctggcatgtagtagatggggtctcactcagtctgtcccccaggctggagtgcaatggcatggtcacagctcactgcagcctcaaactcctgagctcaagtgattctcctgactcagtctcccaagtagctagaaatacaggcacaaaccaccacacctgactaattttttaatattttgtggagatggggtcttgctaccttgcccagactagtcttgaactcctggattcaagtgatcctctcacctctgcctcccaaaatgctggagttataggcatgagccaccacaccaggccttgtaacagtttcaaactcaagaaaattattcccattttagacctcagatcacgtcctatctctcccagagagttttttctaactcttccagaccatattaatctgtcactctctgacatgttctgtcttctctttgcaatacaccaaaataggcacttggttctgaactgctttgccatgtcatttaggcaaaatacttaaaacactttaatgtttgtgtgttttatttccccaatcatattgtaatgccttgagtttagggatcacggttaatatctcttggttgttgaggtgttgccatgtgccaggcatgatgtaaagtgttacatggattttttatcaggacattcaccaccactgtaagacaatagcatccttttaactgtcacaagaatacaaattagaatattgatacatttgtttttcaatgaattatttgggcttttcatcattagtggctttcattacatttcaataaccatttttttcttctttcttcagtgacttattttcatacaaattcagaattacttagaaaatgactaggctaaattagtagaatgtctgagttattgagcatttgtggaaagctgctggcttattactttcactcacatgtagtatccatttgcttgccaacaaaatactggtgctactgctcttaaatatatattgcatttgcgattaatatattcattcttgggatggtaatgtatattgctatagtccttgaaaacagctttttcctcctagctaacttaaacctttttacacattcttaaccgcttctctcttcccattcacccaaccttgtcaccaacttgtgattttatttgtgttattagtcgtctcttggtatccatgggggattggttccgggatgccctgcggatgctgaagttctttataaaaacatgtacatgctctcatatactttaaatgatctctagattacttgtgatactgaatataatataagcgctatgtaaatagctgtcataatgtattggttttttatttgattattcttatggtattgtagtattattttttattttttcaaatttttcaaccagaggttgattgcagatgcgaaatccacaaatatggagggccaactaatttttaaagctatatttaataaacatttgtttaacccttgttaattgtcatgaaatttaaattagtggattcgagttgaaagaaattttaatgtggttccaaagttcacttaaaagggtgaaaactactcacctttgacaacagacagtttatatcatattttattccatccccataataacctgtcaaataaagagtaatacaggcagtaaatagtacctttagtaaataagtaagcattaaaaattactgtttagtgcaggtgtgctacgtggtaggcatggtaccaagcacttttatataattctcacttacttttcatatcgactctaagatgtaggttttattattttttcatttgcagagaaggaaactcagggtcatttaatgatttgtcacacaactaactatacagcaagttagtattacagaaagaaaatctagagattctctcctactaagactgctggatatatttggaatgagtactttatagcatcattgtacaacatcctgatttcagggttgtgaccaaatctgacactcgtccttccttaaaagccttgaaatagagggagctgagagctatgggacatcctggaaaaatggctctgtaactttggctttgatgttccaaacatatagcaatgattgataaaatataaagatagaaaaacaaatggacttagtcaagtccaaaacagttcttcgtctttgagatccagaaaccaaataagaaaaccacatggttattaaggctaaagccaggggtctgctgaacattttccagcaatagaaagtggtaattagggtttaatccctatggaacaaatccagatccactatttgaagcagggcctgggaggaaatttcttgttcacagcaagagactgggaaaaagtaattctgttgaccactaccaggaactaggatttttacctggaggattgaaggagtaggaagaaagacatggttttgtgacataaaactgaattacccatgtgttgcctctgtgatttaccttgcaatgtctctctatccctgcagcacagcagataggcagcaaatgcccctctgagacccagctctggtacagtagcctgggatgccctagtagaaccaatggcgaaactactagaaagggagaaatgagcacatagaaaaaaaaaaaatcactacaaatgggctttcaaccaagattccaaagtatgtgaatgaatcaaacactagtaaagcagaaaaaaaagaagaaaataattattttgaacagtctgacaaagactttgaaataagcatgtttagaagctcagaaagataaatgaagatatgatttccactgaaaagagtgacaaattatgaagcaaatccaagcagaagtaaaacaaaagcacttgaacgtttaaaactagaaatgttggaaatgaaaaatagtcattttaaataaaagctttgctagataggataaactctagactggtcagctgtgaagagagaatcagtgttttgtaagagtacagagaagatgatctagattagaacataagaagacaaatagattcttaaaatatgaatgaaagggcagttaaaatacatggaggatagactgagaggctccaatctgtgtctaataaggattctgatagaagtgaatggagagtgtcttagatagacttaataactgagtgattttaatcactgaaaattttaagaattgagtacataagtgagatctcaaattgaaattattatttttgtattgagcaagacaaatacacgtaaaggtacagtttgaaacatggccaaaaaaaaaaagaaaactgcagaacactgaggacaaagggaaaatcttgaaatagactaaaggaattaagagccaattctatcctatgaatcttagtcaagagtctgggactgggagcctaaggctaacgtggctaccgacagttccttcgctctcgtaagttacttttcctaccattcctggcattgtcaaagaccaaagcactacttaattatatggaaaacctccttttgaaatgcacctaaaatgtaattgtaaatttacctgcaaatgaccagaatataaactgtgttaaaatccagtgtgtgaaagacagtagaatcctggcttggttatacctgtatgactttagccaagtcacttaattaatctataaatgaggataataatccctcctttatctactcttaacaggactgtttcaagggattttttttttacatacaagttctttatagactaaagtatgaaacagtttataaaattatgtgagctatggttcctgacttcttagagtttatatattagatttatgtaaaaaacaaaaacaaaaacttcacaaacaaataccaaaatgtttgcaaagctacttaaaacaactaagcacaaattatttttggtgcatatcaagtgaaggagtctaaagtgaatagtggagatggggttaatcaggttaggttgagcttctaaaaactacatgttatgaattatcctgttcattttttccagtttttatgaaaatgttcatgtatacacctagattttatgatggttaacatgtagccatttacttatatatgattatatatgtttttttcttgaaacttttgaaagtaaattgcaaatatttcatccctaaatactcagtatgcatctcctaccaaaaagaatgtttacccacatgaccccaataccattatcacatctaaaaaaggtaacaataacatcccgatagcatctaataatcagctgatagtcagattgatatctaaattattctcaattgcctcaaaagccttcttatagctgtttccaccccctccccccaaatcaggatccacacattacatttgctcaagtctttttcagtctctttcatctgttcactttttttttcccatgacaataggccatttcttttgaagaatattctggatttgagggttttttttccccctcatagtaatagttgttcctcttttcaaagacaacaggccatttctctgaaagaatattctagatttgcatttttttctcatagtaatatttgttcccctatgcctgtatttactgaaaactggattgttaggcctaaagacttaattagattcaagtacacattttagataagatactatattggtgatgtatacttcatattgcaactcattaagaggtacacaatgtcacgtcatttccattcttagtgatattaagctaaatagtctggttagagtaattaccatcagctaaatgtaaagatatatcttttgctttgcaatgatcaaaggatggaatttgagtatctcagaataacctgtcttctactagtttcagcatccattaatgattatcctgaaccattttatttggcattgcaaaatggtgaatatctaattttgtcatcccttctgctgtcattcttctataaagaaaagctttcactcatcaaataggcacgacctacacttcctccttaaaaaagcaaggtgcttctgaccctttcattgccaattttcagaaaaagaaattgatgtaatagtcacctcacatggtaacaacttaattttttttcttttctgtttttgaggattactatgcactgattttttttaatctattcagtattttggtaaaagaaatcaaagcagtttgatttctacaaagtataagttttaataattattattttaaattactttttaaaatttggtaagactaaatgtgaagtctgagtcctaatggatggaatggaggggaatagggttaatcagaataattttttaaaactatatattattaagcatctctaatcatttttttaatttatgagatgttctttttaaaaagtctctgagtaccttaaccagagtgtaactgaaaacaagaatgtcaaaaaggcacatttaaattgttctcaaaatcaatcaaaaataatgaggtgctaggaaaaagttgtatccttgataattacatctatcagtatcagaaaacaaaagagaacaatcaggaaatgacaatcccactcccaagtagcacatttaaaaaggctaatgaaaaaaaaagtctcttttaaaaatgtactaaattagcatttcaagtaaattgacaacttaagcgttgataaaggccaatctggggcccaaacaatggaagttctgtttctacttttatctgcttttaaaagaaattatctcacttgactttttttgttgtcttttatataaatgtaagtaattgtcctaagggagatgacaatcctcatgtactctgcaagggtcagatcatacctggagtatggcacttcatttggggttctatttcttaaaacattgacctggagataggtaaccaggaagggaggtaattccaagtatttcttacattgtgcccctatgttcagtctgaaaaggggctaatgtaattgtcatattagacaatggattcaacctcttctttgtagcaccagagcttagagttagggccaatgggtgaaagtggcagaaaaacagatttgggtctagaattaggaagaattctctcataattttagccacacagaggtggaataaatttacctccaagggaatgagttccccaaggctgacactgttcagaggttataatccctttacttaaagatggtgtacaggtgtgcagggatctctcaaatattttgcgaataatctataattataatgagatatgctttaaaggtcatttaacatcaacgttttaaaaattaagggtaaaaatgaattttacatcatggctttaaaaagaaaacccttaacacatcccaatttgcatatcattgctttgtatttgggaaatgtgaaaaatatggtgaagtagagttcaagcttcagtattttaaaatcacggttcattgtttttgatcacagtaaattcttatctagccgtaactttaggagcttatagataagaatatggctttgttaataaaaaatataacatagtattttagacactgttttatgagtggagagaattaatgtttgaattatcagtagtggcaaaagcattttcattcaatgataaaagaaaacttatatgtgtcagttcattttgaagatagtagtaagtgctggcattttattattttggcttttcaagtgattttattctttattattagactggggaaaaaaaagccctagtatattctgccaacatattcatcagtcatcatttttggagacagttttcgacatattgtatgttttactgtgctaacaagagaaaagactagccattaagtttatgtttctttgtttttcagcaaggtcacatatcaggaataatgctagaagtatgctaataaacaatatataatgtaggtcatcagggagtaagaaatattttctaactagttctaaagggaaatagtgttaaaaaagggatagatgttacttacgtaacacatgttgctctatatgtcaccatcaaaagcatcttgtaaacagctcggtgtagtcaatcttccttggtgattgtcagggtgtttgaagtccgtgttagatttagattcagcacattcagttcgcaatatgcctaatgtacaaagaccgtcagatgatttagacagcttccaatggaaatatgcctgtacttccgtagtttacaaggaatattggccactgttgcagaagaaaatattatgttaaattacaataattaggaaaaatttatattcatggcatttataattttaaatcttgaattatgctaaatgtttgtgcttaactttggttttgttcagttctaaagaacttcagttccttaaaattgattgtaacttacaggctggtatttccttattaataccatcagtaaaacaattttatatgatttcaaatgaaacgataattctgtaaaaaacgcttataagaaaatgtcatttatgtgattttacaaatgtaattttctcatgtttgggaaattttaaaaatggattattttcataatggtttattttgtcttccaacatggtttttaattacaaatattaagtttcatcaaaaaggaatttatgtaagtatgtgttctggaaaacacagctaatactctatttattgagttcatctaataggtactgggactcaataataaagatgtaaaattataatggctgctttatgattcagaaatcagagagcctactagcatttagaatcaaaagtatttctcttcccagctgtacggcaccatgacatcaggcaaatctttctatttctctggacctcagtttcttcatttatgctataagaattataataaaaatcttgctctacttcacagggctgttgtgtaaaatgataaaatagtgttagaatgttcattatgatattatttctttataggatgaggtacatatttaaatactaatgcttagcaacttctaaaacatcatttaaattgtagactttagccaaaaattatatctctaaatattttagctagcatccatgaatcttaacttattagccgtattacttatggatatctagaagcaacaccccagttatgttggtcagaatgaaattgtgcctgatcttcaaagacactggtttctgaaactctgtagatttttttttaatactcatgtttttttaaactgtatttctgtaatacttctggttttaaaaaccttctgtttttgagtttagggatctttaaaaatatattatgccataattatgtgcttctgtttcttctaaatgtctgcaaatgaaaatatagtgttgggatcaagccataaggtctaagtaaggaattcgtagaacttgggccaaggggccctgtagtttagtttgttccttagcaacataggtaagatcagcatctcagaaaaatgttttttaaacaaagaaacaattaaaagtccatgtgtctaagtaactctgtttatacttgttttctcagaagaagacctatcaatgcatcaagtgtcagatggttttctacaatgaatgggatattcaggttcatgttgcaaatcacatgattggtgagtgacactctaaaccttattacagatagatgtttcttctgcttgtgtatatcaccattaaacagagttaaagatgaattaattgttcaaccatcattgtttttcctcggcatgattgattttttttttaatttctgttattagtcctgataaggtgttagcacattttattttctgcaagggctagtttagacttctgcagaggattatatatctactgccagtcaaaacacaggtgattaacaaattaaacttctaatcatttttgcattattgaaaactaacaggaatggttaatgaactggatgttagctttccatagagttttagacaggttttaatttcagaagttattatggtaatggcactgttgtgcgttgcttaagcatctttgtatcaaaatctaaagtagcgagtttttgtgatagggaaacataaataatttaaatagccataaaatagttttatatgtatggtttcaacagcctggaaataatcatgatcataaagatcatgtaaagaattcagtgatcattttttattccccaccaaattttccatagattttaataaaagtagtttggggaaagatttctgaagttactccaggccattgtttttaggattttgcatttatcacatggcctaaaaccaaaaggatatttttttaacttattcatattgtcccattatttcttaattcctcatggattactgcctatgttttttaatttgataagcatttagtaataacactaaacgttttaccagccagttaaactttatcaagcagatcatttttctactagtacaatgacaattgctattactttatgctatttttgttactcatttatgttttttatactatgagttttctatttcatactcacttcatggtatttcataataccataaataattataatatttaaaaagtcaaattaacctcatactctcctactatgaaactctgtaagacaggaaagaaaattcaacagtttagactatgaacttgttttcaggggggaataagtttgattgtatactaattagaaatattctaagaatgcttagtggaaggttgttcccctgtcatttctgatcattaaagctataacaaaacttcaatttttcttatataaattaatgaagataaattcaaaagcatgttggaaaattgattgataatttttcaataggatgtgctttatagttttcaaatgataggtcttctggggggttgttgcttataaatgactaagagcttatttgtgcaaaatggaacttatacataacagctaaaatattgatcaattcatctctgtattttccagatttaagtattaatattattcgtgatttctcatatattaaatagtatatccttcaatgtgacaatagcgttgacagctttagtgagtgattagaagataatggcaaaatgtaggagagattcaaatgtttccttgcaattcccttctgtttgagattgtaaaaaataccttatataaacttttaaaacagctttttagaggagaggagcagcttagaaaaaatgaattcctgccaaatgataaatgttaatatttcccgtctctttatttcttgagtagactgtgttggtggcagtcattcatgattctacctcatgctgcacttttagataggcttgaatgaaggcagttcttagaagtctgcagtttatgggaaattcagtgaaattttgtggtcatgcttctcattagttctattcaatgtaaacttacttttgtttctggatttattatttgtcccagtacatagatgaatatgttgaatatattttcaccacaatgttaatactcttttgcacatttagaatttcaattgaatgttcagcataacaggactttttgattttccaattttagtatcattttgcctataaacattaatcagtttgttttgtcttctttttaaattgctttatatcattcctatttgtatttattttatattccttgcatcattagtgctttcccaaggctttttcccttctaccttatagtggattaataagacacttacctcttgggacctgagcatttaacaattcacctttcatcagagaagcacattccattccttttcacagagggtctagttatttaatattcatgccatttttaataataaaaatatgtaattctcttgcacttgaggcctaaacaaatgagtagcatccatttaattgttttatttgttgaccatgcatccaagtccttacaccctatttgtgctgttagtatctagagagaatgcaaaaaccaagggagtcacaaaggctaagatacccctttttagaattccaatgtgctatttagtctttcaaatgatgcaggctgcattattttgttagctaaaatacctccattgagggtaggtatttttaggttgtgtatctgtgtgtgtgtttttttttttgtctaatcaaaaaataatctcaactagacatttaatagaggaagggggattagggactatctgaaaagcctcttactccttttgttaagagggtatatagtgtttttgcagattttgttttacatttcaatcaatgtagaggaaggattatgtcacctgatggaaaacaagatctacagatgacccaatgaggtgtaactttaaattccttctttactcaagtcatttgcatttgctcctgtggcacctatgtttgtgtgcaatctcagtgtcaagcaaccgccacacatctttctggatgtgctggtctcaggctgttggccagggacatttgtgaaagggaaatcaccaatgtttctaccaggtacataccagaggtgctcttcttaagtgcagttttgcagcaaggtgtggacacatggtctgagttgcgagaataattactcgataaaaatgcactagggaattgacttatgtctattaaggaaaaaaagaaaacctccctcttcaccacattttgacagagtttcagtatgaaatcagaccagtgactattcaggggtttcttttcttctttacacacacgcaaaaagagctacaaaacattttaacagctttcctggggaaaagatttccctcttttaagatctgtgccaatgagaaaatttttcctctcttcctttgctcatttcacatagtttatgttggcttttgacctgagaatacaacaagatacaagtgtgtattacgtgctttaatttcctattcacccttctcttttctgaaatcagcatagtaaatatttattgttattttcctctctgagctgtctgttattattattattctttggtatggattagcaaaaatagagatgaaacaagagaatttaaatgtgtttaacccagcaaagggattgcctcatataaaattatgaggctcaacagcatagagtaaatttgtaagtgctctgaataaagggctgttaggcatcagataatataaagagatgacattgccaagaactatttatgagaagcttaattttttcactctgataattcttgaccaataattaccagcctctaattatctattttagttagaaagaaatttcgatcactatggaggttggcattgcaactagcgcataaatccccaaagaaacaaatgtgttccaaacagccacaaacaactgtctcatgaaacatagtgagcaaattgcaagcggctggtggtagacaaccagcagtacactcaccatcgaaggccagtcagcttgacaaaggaatgatcaaaggggagaaataccattatccttggaattgattactatagttatggactttggaggacaagtagtcaggatatagctgtggccatttccaggcctccctttcaaagttcatggatggagaaaatgaatggaataggtacaagccatttacataaggattattttttaaaatatacttagaaatggttacttaatatgttttatttttttcatctgactagagagaccagtgttgtaatggcaaaattgtgtctaagtgtcaggataccccgttttgtaaaagataggaaaatccagaaatagtcactaataaacgtgtcctagatagatcaagtgtaatgttaaagcattttgaagaagcaaatatgtttgtctcttagaaaagcagaactagaatttaggattttaaaggatagctaataagaaaatactgatgcaaaaatactgactttttatttatatctctaataaatactcggtattttatagataatcacgattttcaaaaaatcagaaaaagattaagctctctccagcatatgtaggaagatacgtactctatgtgttgtgttacacatgatatatatcactgatgtcaaggcataaagaatgagtaaatccgttcttaacagtgtggtgaaattttagtctgttcttgtggcaggtggcattcatacttcctgcaatttgtttggtgcccaaggtcacaaatggcattcttttcctttcatttctttagtgggtggtgtactatgtgactaatcttcattattgttttgcgactttcagtatcacctctgaagcatttcagcttgagtgcacttgctttagaaaagactaaaaccagtattttgaggttcatagtagtttaggattttatgtcctaagggaaaatatccaaatatatggatctttgcataggaagagaaaggtccatgtctccctttaaactcttgctttcaccgactggtttcaaaagaatgaatagaaatggatcaacaataatgcctatatgtgtggctatacatatgtgtttataatctccatgctatcctaagaagctcaaaatcactgagattttttggaaccttgatttacattcattctaaatgagaagatgactgaacccttttttaaaaaaaatccttatttgattgcttacaaaattcagagaattaagaaacaagcatttggtgttaaatatgataaaacactggcttatttcatcaagagctggattaaaaaagatgaaatctgggcagtttaatggtaacagaaagctaccctcatgtgggcaatgctggcttatttgaaaagcccataaagggtttctacatggaccatacaaaagggatactttctctttaatagccatctgtacaggagagatgagaagtgggccaggtcatctctcctcagctgtcatgatattaacgtaggtaatggagcaagctgggcgttctgctgggtgttgtttttcatagatgttcatcgatttacacagataattctatttatttcttagagttggtccaagtgaaccaggcagaataacaaacaccaaagcatttcaaatgactttatctttgtttataacgtaacttttgtctaaaaaattgtgtcacacctactgtgcagatggctgcatgatttgtaaaccagccaaaacatttaaacaaatgtgtgatctggggatagattaaataaaggataaaatggagtgtgggccacaaattctaataatcagatgattttaagttgtgtgcagtgtggagtgatggtcacagagatagcagggaacgcttgccaatgacagcaaggtgccttatagatctcaggatggagcctgtggcctggtaggcctcagtttgagaaccgcacatttgctgtacagctggcagctctgtatggggacatcagataaaacttacgtaaaatgaagtgttattgcttagtatgaaattgttcagagagggaatttgcagacagtaactgaaaacagaattcatggtaccaatgaagcagactgtaaatatgaagagggtttaattatctccacaatttagcaaaaattcaggatgtatttagaaaggacatacgcgggcataaatataacatagctgtactgcttaccaagtgcaaagagggggccacaggaacgtaccaaggctccatatgatcagccttcctaaaaacaaagacaatttaaaagaaactcaaagaaaaatgacttcttggaggaaggcagagtttttaagagctcatcgtgattctttggattctcatttcttaaggaacctgggataaagtcttcaggtctgtcactcaatttcagggttaagctattaaaagacaaatcatgtgttttagcttgcgtctagcagctttgatttacaagaataaaaaatactggcagttagtgtactttttaatttataaaccccaaagatagcgtgctagacatttcttatgatgttaattttctgtgaggctgaggattgtggctgaggccatagatcgaagattcagtgtcttattactctttagaacacactgcccctaaaggggcctcagaaaaatgttgttctcaaggagaattactggatgccaccctgtcgtcctaggctcagcacagagacgctaggaagagaggccctaccagttggttacggccatgtgactggctgacatacaatggcagggcttctggacctcattttgtcctcacctttgacttccggtagaatgtatcactaatgtatcggtttttcactcactctttgatatgttccttatcagatgtgggtatctgtttctgaatgaagcttgcaaagcatttccgaatggagggcactaaaagtcatcagtaatacctaaaaagatatagatccctgcacagtcatgcttgcccatgcacacacacacatcgtgacctatttccacagaatccgttcacacacatcaaaggaaaaggtctctgatgacctatttccataggttatttcctagtttcagggccattaatagcagtaaacaaaggaaagggagccaatatggagagtgggtgtcgaacttcagctgctcatattgttgcatttggtgagctgatggggtttcgtaggtcacctttagaattatgcctatgacagcagtagctacctgccaagattgcaaggtatctcacagctctcaggatggcgcctgtggcccggtaggcctcagttggaggggtacacatttgctgtacagctggcagctctgtatggggcagccgtgtgggctgttagggagctggaaaggagacaagcatgaaatttcttctaaccccaactctgtttttctgtactgttggctgcttctcagttccttgacaaaaaaaccaatcaggcaccctttaatccgcctgtgattaccactggtataaaaagagaagcataatgaggaaaaatgcctcgttttgttgccttcaaaagccaacaaattggagttaacttgacaggaagtggcttaataattagattatttatttattcctgacacatatccccctgttactagtctcaggagaccctgtagatggtacgattttcaagctgccattacttcgctgtcttctgtgaacaaagaagctactgtctatcagtcaattaaatgcagtctttaagcagaggctgcgaagtcctcaatggagagagccctgggacattgtggctgatgattcctttctctgtactgtacatcacactctcaactgcagtccccacagagatggaataaagtcatgcattaaaatatcacttgttgatttgtttgctaatgaagagccattgaaatgtttgtgtatttctatggcaaaattgttgataaaagggcctgcttgccagcatattttaagtccatctgctgtgagtgcttatttaagagttattaaaattaaagtcaacaaacaacagaattaaaaaaaaaaaactctgaggtaacaagcgttttcttactattttcatcaaattaagtgaatcaaggcaggagaaatagagaaattgtatcgtttaagttcacgcttacattgcattaattcagacaccttgttttcgctgacataaaaatgtaagtcttcctcagagttttggggaactacatcttttaagtatgaaaagagattacagtctcttttcacactttaagaaaataatattctttaggaaaataatgttctttaggaaaataatgtgcttagaaattttacttttttctttaagatgaatggcatttttctagcggtttatctaacttaaagagcacttgtacaagattttccacagagcacagtgaggctttttaaaccaaactaataaaacgcctgtgagacgtacatatcagacacaatcttgcagccacatggaacgtacagaagtatgacttttcttctccatttgttcctctttatgttttcttctttttctttctttttctttttttttttttttttagcattactttatttccatgtaagtaagtggtgggtgacatttctactagacaaggtttttatctcttaattcatcaacctagtaccatggagtgttcactgtgtataaagcatgtcttcactggagttctctgggcttctattaattggctttatattttaagagtacatctgttattgagctgaaggtctggaggtggaagacttggataatattctgacagctctctgatgaaatatttagctatcggtctgttatttaaagggataaatttggaatattaaacagaggccactgaactttgaaaagagttccttcatttcatcagactttgtaaagagtaagtaaggctttaactatagttttcatgattacctgacaacatgctgtaaagaattaattcaagccgtcatcagatggctgtatttcttatttctaccctgttattccaagtcattttgttagaaaaagcttagatactcggaggtgttctataatacaaatgaatttgaaaccctttcattaattggtgattaatatatttcaggattagtttaagcagggctctacctcctgcccagtcaagtatgttctggttaatatccaattatctgcaccttcgtagttattatgtcttaatatttcagatatgataaccagaaacttgagagtaatgctaatgagaagcatagagcaagaattaaccaatgacatactcagtgatccttggtgaggagagaatctctttttttccccataacacattgcctcggcatcttttgagcactgactgaaaagtaagactttcaattacagcagacaaaaattagaaaaatcagtcgttctctcttttcagtcatattaacctgaatttacagtgttatgtttacctaaaaacattatttcagttcattttatgagggataaaaatagaaaacggagagcctgtttatattgtccaaacaggaaacatcatattctttatcttttccttttagcaaagccacaagttgttacactctcaaaggatgttttaatccagattaatttgggatccctgtaatatttcactaaggaaaaactttttcctgctacctcttcttccgtttctccccaaatttagcaccatgctgcgttcaggtttcacctctgtttatttatttattttttttacaggtcaattcacttttgaacaatctgacttagctcccacaaccgtgcctgttagggtgggatgcactgcttctaaccatgtagctttaaatagtgactttgtgcattgcccctttatatgctgtattgtaatgaagcaacatcagtaaattgcagtgaagggtgattgttgcacagggatgacaactacaccttggggtccatttgcaccagattattctttttattgttattattacttcccatcttctttactctcttgctgccgaacttactgttggcgaccggtacaacacagagggcatcttgaggaacactgcagacatcatttttttctcttatgcacataccaatcaccattcaattccaaaaccagagaccctgggtggttttgcagttctttatcgatgcctctttactttgttgacttcatttacaatgtctctcctcttcatcttcttaaaagaacaaatttactgtaaataaaagtgagacatttcttttcacccattttgtatagatgttataaatctgtagtcaaaatggtcaactattgcccatcctaatttgtccctttccccaaagaggtttaataattcattttaaaatagaggtctagatgggattacttcttaaagaaaagatttgtattttcaatatctttttaggtttgcttaagacatagataaaatcattatgaatattgtatacactagttgttttctttacaaaatagcctgtttcccgcccctggtctactgtttttacccagtaactaatagcaaaataatgtggattgaagtcagagattctgcactgttattgaacagaattgtgaacaagcttttaaccaagggataattagatgtgtatttaggggcactattactccttttgttgtcataattttagtacctgtgtccatttattttcaaattgttagtgcagctgttgttttgtttttctctctctgaggctgggctgttgcgcagcattcaaactaaaatctaggattaaaactgacacaccttcaatagaactatcaagtcttttaaaactggttggccggtgacgccagtcccacgctattcaaccacacacacttccaattgtgggccaaagagcattgatttttagctgtcatttctagtgcacatactgtagaattgaaatttaaaccttaatccactcagtaatgcaattaatttttaatgtgcagtaatactaattgaaatagcctgaatttagtaagtcaccacaagacattttcaaaagcaagagtctccactgagaactgggaggacagataatcattgttacagtgtttacagaataaatgtgaactctgcagacctccagtagaaagggggttttctttaaattagtctatattatatctcttcgagaaaaatacatcgtcaaagagaattcctactttctatctactgtaacaggttaaaatatgctattaacttatttaaaaggcataattgtagttagaaatattttaatgtatacaaaataatattcacactttttttaaaaaaaagcaattatgagtaggtgcaaatgaagtcacctgccaacaatgtcatggtcaggcaagagtctcagtgggtaatttccttatataattatgttttttgagatattatttccagattcaatgaatatgtgtgctgtatcagctgtctataaatctgttgccttgttttgatgtatttttggtgaaccaaaaaatataccatcccctatctgtttcaaagctatgttcctttagcttttacatattatttcaaaatggccttttaaatgttttgtgaagctctttttttcccttgccatagtaaagcaaattttgaacagtaaaatcaaataggttttcagtcatttctacactaaaaaggttctctaaccacatttatctgctagtaaatgaggactttttaaaatgcatctgttctgctgatgaatgggcttgcggagtgtttcaaacgagcaccagcattaagttgaagaaggcaaaccctgtatatcatgctttcatggctctcacattatactatttaatatgccgatagtactgttaaatatttagcaaagttcccttataaccctaccatctattcaaatgggattttaagacatttttgcagcacataagtaaaaatgatgctggagaactggaggcagttgtagcatggcttattttctaaatgaagtgtagggtaacgtggtacaaatgagttcaacagattcacacctactgaatacctcaaccaatttacattctttggattaaaggttcaaactggctttcattttgtcactaagtcaaagtgctgttagcattaattacatagagtactaacttgacattatagcatgttagtaagaagacctgaattgtgattattttaagctgtcctaacatcaattgagctttataataagtatttccattttttttaactgagtaggggaaggggaagaaagagagatgaggggaaatcgatttatagtccattcatagcatattatcaaatcaaattaggatatagtatattgaatcttttcagcctttaatttgggtatgctggagcaaataatgagtattagacagatattgttgtacacatggataatgcataatggatcacctttatcagtttttcttataatatttgatagttattacccaaataacagtaattattcttttaatctggagtgaaaattggtatctaggagccttaggcaaaaatattgccagtaaatatgatgctgacttcattactgtcatcacgttggtaggtttgaattcacatttaaacctttccatgcttatcagtataattagttttgaaggtgtaaaggtaaagactggtcgtttgttcagatttatatgaaatgtgtgtttgactcttctagaagcctgtttgctagactctaattttcatcctattttatatgcagccagtgaccacagtattcattcaaactgcacagagacacatctcatctgtaaaacacggcttgctgatcttatttgctatttgtattctcataagaagaaacataggtttcattatgatgcagtggaagtacattttgttttgagattacgtatatcacatatatgttcataccaagaattttataataaagaatgaataaaggagatagctttaagtatacatgaaggaaaagggaagggaagcgaaatgggcgtcacatataggtgtgtttaatatgcaatgcttgatgtatgttgacctcaggttacaagagtagaaaatcccattttccagcttgtttcaaatatagtaaaaatgctgcttcagttgctttatgctactcacattggggaaggtgcttatactgtgataattatcatcaaggaatattaatgcgttcagcatttgtaacccaaaaactcattatagcttaagctgtgcatcatctgtgaagagagaactttgccagaatttgctcttcacaggggttgcctcctgcttgctgcggagtggtcagagtactgcaagaggtcacttaggctatttttgaaagctgaagttttgcaatttttgaatcactaccttctgtccaaagagcatatcattcttgcctcaaaatgtccttcttctaattgaatgcatggtaaaatgcaaaatataataataataaataaataaataagaggtaactgtatctcattatgtagaattcaagaaggtcagcatatgtattccatatcaagataattgaagtattggtgtcttctcttctgtcatggagcaaagggattcatttacaccagtttccttaatgcaggtgcccttgggtttcagagagaaatgcccccactggggctccacattatagccctctggctggaaattgtgtaaataagactgcagggtcagccttcctttttcggtaccagtgtctataattagtctgtgacgacagtcctttatatgagcctaaaactgttcctgggatcattcctcatacatctaagacgtctatctaatgcataggtagatatttttgcatgtatgtttaaaatcattctctagggggatattgacttgatgggaactagaatctctgggtgtgtaaagaatcctataacttcatctgatcaaaatagctggttaggcagctccattataaattataggtggttagtttcctatgaacattgtgtcctcacctgtagtggggcagcttgttgaaagggagctgtgcgcctgtgatgtttttacgtgattaaatcccattatttttcccccactgatccattgcttgtcatttcccgtaagtaacattgctccatgctgcatgttatggtttgtgtgggccaggcagagagcactaatactgagttctatcaggctgtctggcattgcaggactgctatgtttctgaggtcaaattgtgaacctggccttgctcctgggaggactagaaaaatatgtttcataacttcccatagacctaagcgaagaggaagaaggaaaaacatgaagcccataggctcagtttagatgagctgaaaggttggaatttatcaagcaggaaagctgaccgttgtgtgggaggcttccttactgtgagggatcactgccgtgggtgcagaatcagtcctagctgaggcctttgggggatagggtaatcattcaaatagcccagcaggcacagacacacaagctgataatctggaataaacctgctgaaatagggatttacttacctgttaaaatcacttacatgaaggaatactgatagaatgggtaccacgaattcagggcagatactgtaggctgcttcactgaaagtaatttatgctgctgctgttgctgttgttgttgttgttgttgttgttttgaatgaggcagaaccttttattttatgcagcagagcactaatgccacaaaatggatggatttcctgaaccagagacaggttctcaatcgttttgggctggaatgctggcagtatggtggagaaatagagtagcagcagatcttctgtaaggatgtaaacttaataatctttatgaattttgagtaactcataactccacttcctcacccaaagaagcattatgaaaagattgcttctaaatccttcagacgttctctgcacttatgatagatgccatcctctttaccttgaggcattggaaataaatgtggggttttttttttttgcaagagataaaaacatatactttagaaggagcaaattgtattttcatgttttaagttcactatttgcactgatgtggtgagatccaaatgtgaagaattgcttttgacattatttctgtgtctcctgtatcccagaaccactgcattgttatgctgaaatgtaccatcacatgggataaatgtgatgttggaaacctgggaatagtatgtataatattgcattctatgtccagggtgcttaggacaattgtaacttctttagttactaaaacaatttaacttatcttattaaggatacattatcttataaggatacattagctaaaactacatgtgcatgtgtcttttaagaaaaaattataatcttccaagtgttgtgggtttgtttatgggcaaaaaagggctttcatttctaaacgaaaaagtttttttaactttctctaaaagtctgttttacataatctgtaccttgaactagcacatactatgttatatagtaaactttaaaatacatacatcaaaggtcttaacttgcatgactgatttcagaattctaattcagattttctgtcagtaactatggttttctatttttatggtcctttttaaagataaatttttgtcgtcttctttgtgtatttaaatgtgtgtgtgtcacatgcgtacatctgtgtgtggacatgtacccaccgtcagtctcttccaccacacactcactgctgcagcactccgtgtcttgtgtttagcgtgtttccaacagcttagggagatggtacaaaagtgaaatgaatactgtggagcttatattggagtctgatatttgaaagagagatattggaaaaggatgttttttggcttggctccttttatatgtaattgctgcttcattaggacttggaagagtttcctgtggttaaatttaatcaaatagctcagaataacaaacttgtacactcaaaattccaggacagttctctataagaagcatggttttcctaagtttaaaacaaacacatatacacacatgcacacacgtaaacacacacacatcactaccaccaccaacaactagtttgtaaaatgctgtgagtgccatctcaaacctaactccctattggtagtgatttaataaatgatcatgtatagaagtataaggcataagagcgaaaccccatctctactaaaaatacaaaaattagccagatgtggtggcatgtgtaatcctagctactctggaggctgaggcaggagaattgcttgaacccgggaggcagaggttgcagtgagccgagatcacaccactgcactccagcctgggggatagagggaaattccatccctgccaccaccaccaaaaaaaaaaaaaaaaaaaaaaaaaggaataaagaaaaagaagtataagtcttaagaaatacataagaaatacatttcaaagggtttggggtttgtttggttttgcacttgaacaggtgtcaagcattgattctcctgagccatgatatgaggttgttatcattacttttgttatacagataaggaaactgaggcgtgagcagaacagagctagtgtgcattagtgtacggagagaaactcacacttcttgaatctgtctacatcactttcagctggtgcagtattcatctcttcacacatgcacaagttgctcactgtgggagcctgtgctgaggtgttcttagcaattgctttgctatcattgcatcaaagcctgatgttgatgtcattttctaggcaataaaacctatccttggttcagataaaatttgatctttccattaaaagatttttccattatatctttccattataagtaaagacttagcctaggtattctcttctactttcttaaaacaaactactttgaaacagctaagtatgcttctgcatcagaattctttggcaatggtgggaaatggtgggaaataggcaacaaagtgacaaaaatggataaattcagggtaaatcgtcctgagtatgggacatggctttccataatactaatgtgtgaatgagcagcataaaaatgttcacgtctctgcaaagtagcaagtggttatgttcatatcattttgaaagctgagtggatagatttaaatagcaagagctttgttcggaatgatgtgtggaacccagaatcacagaccctgcgatacatgaaaacatatgtgcctcagtcctgtcttaatagcgcacatgttgtctaattattgttagaaatgggaaatggcttggaaacctccaacatttctagaagcctctttctgtaggtatctgtatatgaattcactataggatgattggaaagggagtaacgcagttactgcacattcatttaaacatgagaaaggaattgacatactatatgcagcttgacaatacgatttatgatgttcatcacagtttttttagcagagttccttttgaaccacagagataatttattagatgccagaatgtgttattagagaaggagtaatgaagaagaacactcttttatgttaatacttttttacattttgtatatgtcgctatgttaggcaaagggaattgaaacatgctctaaattccagtcacaggacaagaacaaaattgtgcaggtttcctcccaaaatccacgaggaacaatggccagtaaaaagaaagtgccatctgggtctggatgtgaggtcattgccaactcttcattggtgctggtagaaagcttacaattatgatgatgcatccttgttttataagtgttcttgcaattggagctgcaaactgattttagtttttattacagacgatatttttgcctagctaaaaagtctggtcatgtagtatatataagcttctctaaaatgtattttttaaaccagtccaattaactagcagcaaatttgcttactaggtgtgcatgtagatagcagccttctcaactcctgaaaaaaaaaaaaatcctcacaaagcagaaagtttgcattcctgtaagtcagaacgggtgtagattcttttcttggacatgctttatttttaaactccatattaaaatctgtaatgtgtaaggtaaatgacacgtttttcctactcaagttttctttgaattcatattttgattgatttgtgtgataccatgggtgcctatgaattagtgcagaggtctcctgcctcccacaccttcctttctttgactcttcctcttagccaagtggaattttaaattggtgacttaaaaccaaatggtcagcaaaaggcttgatctcttcagttcagggaaagatactctcccctgattttctttgaggttcacatctcttcatttaaaaccttcctctgtacctagcagtcataaaatagggtaagtttaaagtgtacaataaaatatgagcactaataaaactagcagtaaaaaaaaaaatcactgaaagtgacatgaaatttagcaggcaagaggttaaaactgttcgctgtgtgtaaaaattttacatagtgaggtcctcagatgtagaacagatgtaggcagaaggagaagggggctggtaagtgctcaggtcacagcgagtattgggagtaaacaccaggttccacgccagcgccgaatgttggagccagccagggagcgtgtgcttatgagtgtgtgcgtgcacgcgcacgtgtgctggtgagcatgtgtgagtgtctagaattttccgggagcagtttcatctttgtcatttattctgtaaggaaagcaacaccggggcggccgacttgggcaagctggtgtaatctgttgcactacgctgcgatccctcggagcccctgtaggcttcgctgccagttgtttgcctgcctctcctagtggaattcatttaaattaaagcagtggaatgaggcccaagtccccaaatgctgagtccctctccttcatcagcattccagcgaagagagtaattaaagcaaaaattaattctggtgtaagcagaggaggcacaaaataactgatattagaggctagatgatgaatgcctggcatcaagggaggtctcctgggaggataaaagatttcacagagtttttgcatatcacagttttctcattatgagacccgacgaagattgctcagtgcatacatgatgtgttaaaagagtagggtgaaaagcagacacttgttcaccagatacatcttaattagagcgctctttagcagacgggcttgcaaactctggtgataaatagactttcgagggggagatgtaaatttagagcgttggggttctgggagacttcctgttgtttgtgttgcattatggggtttattgtggctctaattgctgccagtttattacagatgacactaggacattgacataaatggagccataaaaagactcacacggctattgaaaatatgcctgtatataatggaaagctgcatactcattttgcctctcctaactgctccttacaaataaagtcatagctgtatgcagcagttaatcattttaaaactgagctgtgctgtggtttctagctgtattgtgtgtaaggcatgggcctcattatttacaggaatggtatcataaatgtgtaagtcatagagcctgatttataaacaattcataattttgtaaaggtggcatttttttctgcctcttcgaagtcctaggaaactttccatttattatttttaaaagaatactatggcatgtctgaattgaccataatacagtagcaaaaccgttgatccaagaaggtacaaggtatgataaatggccatttgattgtgtgacagtatgctcaattggtagggagggaggtcatttcaccacttaaatcaaagaatttgtagtctattaaaagtgacatgtgaacaagtccaggtatcacaagcttttcagttttgtaactcaaccaatatttatgctgaccatccacgttttctattctcaaaataactgaggctcattaacagcaataaggggaaggagtgacatgacatttaaatcctccggtatgacagctttacaaagtatgtggtaggctccatgcatcagtcatataagccaaccttgcttgagttgatccatttcaacttttacattacatagaaccccaatgatgtataaataattagtagaaaaactcacatttataaagtcctaattttgccatgctgtgatactgttttatcttcattctccccaaattttctgatttcttattacttccctgacccccatggattccagtgaggtttccctgaggaggaaaggtctaaccacttatacgtcggaggtaggaatggccccttcatcatgtcctgtgacacacaggctattgtgatgacttcttagtttttgaatgcccaacacataattgtaatgtactcaaagtcctacctccctcttcacttctgtattcctcagatcaccttggaaattggtgtagaatttccattaacatgtttgcacttagtgattcttctagttcattgacaggaatggtaatagtgctgtatcatctaattacattcgcttttaccgctggaccttggtcatgttaatgtggtaagtattttaggaaaaatgagaagacttgtaagtacttaacattttattgaaatttaattgaatagttaaggggtgattaaaaatctgaaattaacactctttagaaattaatgacagtcattaagatgtaatggggctgctcaccaacagtgctcagaaaggttgggggatttaaatttgcatgggggtcagagcagtgaaagatgttgtttatagtctcctgagccttgactgcaattttagagttggaacgaaagtgattctttttcttgttgtgttgccaggattactgtatctacagtaatggcaagttacattgggtgagtctgtgtgtccacgaaggtggagagatgaccacgcttggcgagcctgtgcagctgctaagctgcagaccaagcttgcttctctcagggcctccaaggactccctgaaccaatccaaacactcgctgtctcccccacctgccctctcaaaataagcagcagttcattatttatactagcttgaatcctgggtccccttatgagtagagactaatgttcacgtggaatggagtgatataatgtgtaacgattttttgatatgaatttccactccctggagacaacagcagcttcaccatcaccacctgaccagggtggagagatctaaaaagctaatatgttgtctctgtggtggtttcagagttagtgctcctcgaaaggaaactgtcacggagaagtgttcatcccaaaaatgtcctctgatgtttgcttagaaagtaattactgatctgattttttgttttccagaattctagaaaggtatacatataagtaagcattcttatttcaaattgatcgatgcaataatagtgatgttgtttcatttaaaaaaaagaattcaagttgatgtgatcacttccaaaacataaaaatgaattttttaaaaaatatgttaactcttgagttaattagtgctctgtattttcagtctttcggaaaacatactttttgccagataaaatgaaaggaatgaatcttagatacactttgagaataatgatattttacagagtattattgctgaagtaagggaagaatagaggaattattgagttagatttgaaaattggtttaataatctgacaaaatatttccagtgtttcaagtggatgttctatgttaaagaaatagcactggaacatgaccccttttttcttaaattttctttccattttcctccttagtactattggctaacttcgttttatatttttcccattctgctttatctcttgtttccacctgcagccaattttcaattattccccctcatgctagtaaacatggataatctaaaacactttatacaaatgatattcataaaaacatccacatactgctgtatgatacatttacagatacatttacagctcttccaccccaaaatgagaagtgcacgtggggtggttgccttaaacagtcaggtgacaaggaaacctttcactccttaccagaaagcagccttgggaatggttggctacaaaggaatttagcagggattggaggggagaaaggcttgggatggaatgtgtgatgaggaaaaggtgtccaggtcagagggattatgcacagttcaaataatgtgtgaggataatcaggaagtgactgcattttggcctccttgggggctcatcaaaccagcacctatcccctgattaacctctgcgttccatcagccatgtaaattagcacaggcccactagccctgggcctggaagaaatcaaactgtgggaatgtacatattttaataaaaattgaatatgtgtcccacagcatcactgtaggacgcactcagatttatcattctcactggcatctaatgcattattgctaattattgaatctggtaaatttggagaagagtatagaatactttgcgacaagagttttgtaaaaccgtttgcgtacttcagttacatgaagtaaaaagcaccatgcaacttcagttccttgggatttttattcacacaactttaacatgatatctgcctaatagtagagaattttatatgtacaggtggatattgggtggtgcatccttgagtaagcttcataattcatgtgcaaagcttggtttggatgatcacatataacccagaaaagatagctgagactttaagggaagatttaggagtaaacggggtatgttactacaagaatggaaatggaagtaaaggaactccctttccatttatatttgaaatttgtgtttagcatgtcagctttctacacattctctttcatgtcttatctactctaaaacgcatttagtaatgtctatcaccacagtacctgggtgcttaggtactaaaaagtgctttaagaatgcaatttgaagactgataaatcaagtctgtttagctcaggggaaagaaaagctaagtgggatttagtagaagggaataatattcctaaaaggaaatcagtttgatgccagtaagctttttgaagtagaaactaatttgaaagcatagaggtcatgactgaaatggaggactcgactggactatctcatattagcaatttgaggggaagtttctttaaacacaatagatggaatatagaatagcttgccaaaatcggcaatagaaagaggctcagtgagctagttgaatttttggaaagtacagcatactggggtagagccacaagcagcattttagaagctaatcctaggaggcgtgagaaatgtatttattgaatgtctgatataatttcaggcctaaatgggtgtatggttttcctctcaatcttcaaatgttctagcatatctatgctgtcactctctaaatttgaacattaatatgaagaagcaattaatactcttttcaattaaaacaattaatacatgtactctccacctcatgccccctcttcccccccaaaagagaactgcaggaatcatatcatatggtgtgtatcaacttatatgctgcaatacttgaggagaaataaacaatataacactgtttattacagggagacaaattacagtttttgtttcatgtgaaaagtttaggggtggcagcttgacagtaaattccattaaaatctaccctgccagagaatgccaagattgttcttcattcattttagcataaggtttaattttttgccgatttttaataccagtcagtcattcttagcatcattgaattaactctgaaccctatatcagtaaagagccttatgttgccccattttattattacagtgcagtgcagattagaattgcatctgttaagattatattgtgtattggatttcagtagacagaagcacagtagtctcatgaatataacggttggagccaataacctgtaaccatcacatacttgttctattgcaaaatctgaactagtaaggattacattttggaaaagattataaatctgtcaccactaatctaatctttacagtggctttgtaaccgttttaagactaacgatcattacttctcttgctctgattttaatcataacacatatttgatattccataactttcttttgttccattagcacatgcattataaagtgtacaacattaataaatagaggcataatgaatgtgactaattgattttggcagtcaaagactggcatactttttatacaaaagggaatccattcaaagaagcttaactgctattgagagcaagtcttcgatgcagtaatggtttctaatttcgattgtgtgtgaggtgagcagaatgcagttattcctagtaactcaccacttagtttttgttgttgttttgtttataatgctcatttatcagattctcatttccctaaataaaaattttatgtttcagtctacatatgaattctgtagcacaattatgaatgcaattattttaagttgtctgtctctcataactaaaggtacatgatatagacagtatgccacagcttatgttttttgtcccatctaactatattttcttaacactgacttcttaatactggaatcagattgtcccaataaataaatccactggtagcaactgatttatttggacacaaaacaaatttttaactcataaatgcaaatgccaaaatacaacatctagtagatgttagtgaaaaattaattccttgaaactccaagggagaaataggcctgaattgtatgatcagtcttacctttaaaaatgtgcatggccttcaaagccaattttgcctcctttataaaatctttcaacactaaattatgttacacggctacgatttaatagtggacgtgagatcaaattgggtgtcactgaagcattaatcaactaagtgtcattacagatagttaacaactcatgtgttaagctttgtcatttgaaaccagagatagtgtgtaccaacagactcatcacttagtgtagtcaaaactgatttagagaggatgaagaatgactattgttaagggtttacaagaactaaaatttatattaaaaacaactttttactttgcagtctggctctacggaaggacaaagatgttgtatttggctgtaattaggaaaaactctaatgggaagtcagtcattgccaagcacagtgcaattgattttccaccaatcagaatagggaatgagatgctctaagtctattattaaattatttatgaagtcatattcaatctgatcattatttctgacatttcaggttagtgaagattttccaatcactgtgaagataggaaccagaaggttggttttgtgacttgagcattgaacgccgcctttggtggttgtgcttaaatgagataagtgagttttccttaaaaaaaaaaaagaaagaaagaaaactacttctattaacatctgcagcttaactgaggtattgctagtcttattgactgtaaactcttgtttatgatttgaaatcagaataatgtttattgggaaagaatacaccctagatcagtattatattgttaataaaatggctgagtagtgacacactttaagtttccttcagaaaaagtcctaataagatgcaaaagtattttataattgcagcataagtgactcatacataccgaagaaaaacagtgaagatttataaggaccttattagtatagtgagattaacctttggatctcttactctgtttttctaaactgctaatccagttaccttaaacatattccaccatcctccacactctattccccaccctcatttcagtatcctagaagcaacttcaggacaattgctcttcaagaatcatgcaaattgtaggtcgtcatttatttaaaatataagagataccgattttaccatcttagatgtgtcatttgacctctggtttttcgtatttataaagtaaagggatggtatttaattattttaaactagtctttattaaaaaaaatagtgaaagtaagacaaatctcaacacaaaaattgctggctttgcacacaatacccattgtttcatcaatgacttgaaattctgggcctgtaccagacctggacatctgcagtcctgtgacaagatgtaccttgtatgagctgtccaccctcaggaagtcactttgtcattctgggtcagctgttttatctagcaagtgtggattgaaaataccagtactgggcactttcatgcaactctcatgaagatcaattcaaaagacatgttaaagttccttaaaaacagtaaagcaataggaaaataatagatgtccaaaaatatatgtattttgcaaaccactgtaggttccatagaaactagtgaggctaaattaagatgacctttttgttactgaaatagttggacagttaaaagggaaagccaaaccacctcaagaaggaaagcaaagtatatattctgtccatggaattataatatagtgccaggaaaatgtaggaggaataattgtggaaactattacctgttacagttcctttttctgtccctcacacaatatgaaatacacacacacacacacacacaccccagacacagaaaccagtcattgtaggacccagtgatacagtttgtgtactgagtctcctgctaaactgagatgatgggtaaactactgcagctgggagaaatactaacctgccttcccagtttactcacacttagtgtcgatcaggtcacactgacatagacacagagtggtgtatatgtcaaggaaggtactgtacgtgcctggaagatatctcaggtaattggcttgatacttccagcaggagtcaaaagtgtaaggaatgtgttcttactgtatttgtagctcacgcagtttagtgactttggcacgttctgactatctcttttgtggagataattgtatagatatttaactgtcttctccccttcttcccctatatttaaaatcaaggttttgcagttgtctattgtggactgctttttgttgggaagtctgtgcctctcctggtatgtgtttgggaccgggtgcacactacaccttttcagttccacagggataggaccagatggaagaatttgattatctagcagtagaggaccaactgttcagttggatacagaaccgggagaaaagggttgaagagatctaaaatggctgtcgtatgtggagccaacagtttccgaagggaaccaggcaggcactgaggtgtagtaatgcagaatctcttccaagtaccagctggggctttcaggagccgctatccccacagcagacactcagcaggctccaagcagcttgactttaccatatgtggaactttttattctccacctcgctccctagagggacgggccacagggacaccagaggcaggtgaattgctcttaatgcagagcactaaatcactgggttaacatgagaagcctggagagaggaaatggatctgcagaagactgactcggagtctcttaaccttggagctattctgagcaccaaaaaagataccgcataatgtttcattaggctttcaccttgtgcataccctcttttatgcgagtgaccttttcatccttgtacatattttctaaatgcttttaaaagccattcaatacttcagaatgctaactgtacattttttattcacacagaatcatacctttaaagtaacgagggagcggaacagcactgcaatctgtgatttgtgggaatttcttgctttctctccgttcagacaccccagtttgacagatggggcacaaagccacagagcaatccataactccagtttgtatcataaatttttagtccctcctcctccaccaaatgcctgcttaatggtagctagaatactcatgcaacagtgttggcatgaattggtataatttgagacatttcttcatattggccatagaaaagcattttttaaataaaaagaccaagaaggtttttgaggtttcaaaaataacaagcatccacctttgtccaaaaataagacaaaaatacagatttactcaatatggtccttcttcaagaattttggtcaggtaggttttgtgtcttccaattttactggatttatcttattcctaaaacacttctgtcattttggagtattttacctttagaattagtattaatactgatacctgcctttaaaaattcagcctattactgtagaagcacttacataaaacaagtgttttttgtatgttttaagattctgtgaactttgggctggtaaagagacaagcagcccacagaaatgtggaaaattgtgaatgtgaatctgtaaaaattaaagtatacttaagacagggcttccaggtgaactttcatggcaccatattgattaccatttggtgaccacttccctgtgagacagtaagtacccattcagatgaactaggttcacctgtgctaggaagagaacaattaaacctcactttcttaagccttaggaatgtgtgcttggctaaggctgaatcagcagaaaagcagtgatgagaaatatataaagtaaagcaaatttaagtttattattagttaatgaaaaaaagtaatcattattttccaacactaatagcatattagctcaataatattggttaatccatatcttcaacaaatattaatgtacgaactaaatcaaatactgcaccagtaatcatacagttataggtggagttggactaaacattaatatcaatatttaaatatgtggcgctgtcttataaaagaaagctaattctgccaattgtctagttatatgttttctataataattcatgttaacagaaacatggatgtttgtggcatgatttaggggattgcaggcagaagcagctatgttcctacataggaaaagatttgaattatatttttgtattaaaagtctacaaacaacagaaagaagaaagattgacagtgttcaatatagtgaagtgtatttctattacgtcagtgggtaatgtgtgcatatgtgtctttatctcttctttaaaaataatgatttgcaatctttttaatgtgcaggcataatgatctagaaccagaaatatatcctatggcaaaatgataacaagaatcttgtttaaaaaaatccagttaacttcagcccacacattgaggcaaattctatttatctagtgaatttcaaatttactcagctactttggaattttgaatatcgtgatagcaattcattctgtttatgcttcccacttgagctacagtcaaagggtagagaatgaagtatatagcaacaggtttgatttgtagaaaaatctgtaccccgtgtcttttatttcattaaaaagagtagaaaaacttgaatgtgatggaacagcagagattgtgttgagaaagtgagttttaaagatttttttcaaatctgtatttataaaggaaaactttaaaaaatggatagcacttttgtgttatatgtggactaacctacctttaagactttttgacaggagagactagaagcggttggtggtttctggaaataatggctgtaggctgtaactgatgatttaagccaattaaacacacagagtggttctttttggtgttgtttggcagaaaacgatgaaatggtgttgcctgataaggaagagcccagcgtatgtgtgatttcttatgcacatgtgctagaatcagtgcaactcataaattcaaattacttttaaaagctggtcatgatacatttgctcattaaccatatggaaaatggcactcaggaattttctacagtgtgttttcaaagaaagaatccaattgcaggcagacattccttagtacagtgtttatgcagctgtacttgtgattaaattacaccaactcaggcccacatgtagccacagaacttattactttgagtacaaagcaccttgtaggagtatgagaactctcattgtgatgttttttggcctcttggccactgtatcaagcaagcatcaaaagtcatgaatgtgctctgaggtctctggagaaggagctgtgggacagaacagagctgctcacactgtatgaggaactttgacagtctaccgggggacggtgggattgctgctgtcagcagttccaacagcgcaaacagtgtgaagaagcttccacagggattgaattactgaagacttctgctccgtgttttttggtataattgagagcacagagggagcttgatttctctgtcttatgatttgaaggtgaagacaagagcctgcagggctctgtcagagttatgggcatgctcaacccagacttcagaaaaatctaattcccataaaaccttacaaggctgaattgcttacctgaatataaaagatttactttcactgaatcatttaacacacaaccatattaattgcattttgaaaaagaaaagaagcatagaatacagtacaactgaaaaaccatacggggttaaaagagtgcttcagtttaaaatgcatgtttgaaagtgaaactggtgtgtacagatgctctgacatacttagccacacacgaacacgaaagtcatatctttcggaaagagcacgacatcggtgttcattattatctctattgaaaatgaattaataccccttcctctgtattctggaggggcagacctatccaggtgtattgcatttatactgcgcaagtgggtataactattattctgattacacaaaaacaaataagagtaaaaaatgccagctggtcatcttctgtcactttcagcataaatagtgaattgagtgcccccctcctgggggtgcccagggaggggcagcagtgtgatctcctggcactctaaccaccttttccttcctttttcacacatagtctgacccaaatgcttcccttgtatggggagaagccaaccgtgacaacttagtcccagagcgagggcaaaaatctcctgagatatgctcccaaataggaaaggatagcattgctatacccgcatgcagtttaaattaaactgatagtaacacacaggactactttgatcttcctagtttctttccgtgcaaaaatgtggtcaaaatgcatgataaatatgaaaccttcttgaaatggtagcttgctgtttggactcaggtgctggcctgggaggaagtgtttcatgtacaggctttcttcttgcaaaatgaaggtgttccatctttgaccaccacttaacctcatctattggggttggctctcctgccctgtcacgactacttggacatctttagacatgcttccatcagaaagcaagttaacccactccggggacagccctgcaaggcacagaagctgcaggagtatttacacagttaaccagcatactttatttaactattcctacttcaagctatttggcagggaagtgggggggataccaccctagaacaaataccaattgttagcttcactttcacattgccagcaagcagatcttttccaactgggagtaatatcctgttagctatgtttaattcctattttacctgggggattgagagtaccaaatgatttcagctgctcaggcattacatttcgatctgtcctctccttctgcccctgtctttctcacatactcctcctgggaccttcctatcatttatagtgaaaggacagcttttctgtaaacccaaaccagcaggccctgttccgaaaaggaaccttctgatatgtcgcgagggaaagacacacacctaccatcccacacacactgttctacctgtgtttttggcaaaaagcccccatacctgcaacacagcaattcatcctgcatcagatccatttctttttttcacttggcaaaatggttttgagcaggaacgtatgtgtatgtgtaacttttggttagaggcagtttacctttagccatgaaatgggcactgtgtacatggtgttaccacaggcgttctgttccaattgcattgtgtcttaacaacaaagccccccatgaaactcaataaaattaccaatttcacagttgattttcttcctgctctgctctgcagccctcacactcctggcctgtctccacacactgcaggggatggtgtcggaccaaaccaataacacggtgctaaaaaggggcttgatataaaccaggccaatcttaattctaattagtgtgtccagcaacttttaaatctttgagccatctttgttataaaaaatactgccatcagcttattatgaataggaagaagacagttatctgtgtggttgagatagcactgtttgattcaggccatacttgcattgcacagaacatatgtggatccattttatttatcatactatgctgagttttctcctctgatattattgactatgctaactttgataatttaaaatcaatcaaagctgtaggacctacggtatataaaccttggttcattgattagaaagcaagcattctagatctaattcagctactaactagctatgcaatcctgaattatagtctcttcttgcctgcatctctgcaaatgaaagagcaaaatacagatggaacaatggagaaaaatatatgcaagtgccattttatgttgatcttagattaatagttaaataatgaacatattttaaggcttaggtgaatccagtcttagcatattaaaccctacagggcttgttaactacagacaaaaaaaaaatctaacctaatgcctcctgtaagatacagcttaaaaatcatgcttaaattgtaagtgtcttgttctgtgattaaaatactccagacacagagatcacttcctttactttatttcaattactgctatttattcttgtaggaaccacatccaaccccaaatccatgcctgagttggatatgaattttgtcactgaagcatcattggcagtcattttcactgcatttttacatcaaataacagactgtctggtctgatggccaagccctgttggacttgctttacaatctctaatgtcttatagaaaacatttaaaaatgtattggcatgcaagagaagtttgttggatgattgattaatcaactgaatgaatgagtaaacttagatgataattttgtgtgttgcagaaatagatgtagtgatgccctagttatttagaaacactgaaaattattatagaattccgtatccatacattataataataaatttgaaatatcatcttgcttttatgtccttcaattattattcttatctttattttgtatctttagtttgattgaaccttatctatttttgcagtcttcatttgcaagtatcttagaatgatagttattctcatgtatgaatgttaaggcctttttttcccatcaattctaacttcattgaaacgactatttgtaacattgaacatttgatttcaggttggaacacagtcattgttctcttcatgatcacatacagaggaaggaaaataggttcaggcgagctaaaagagtgacccagcaatggagtttctcttgggaaaacatgagtcacagaggagatttaaattttcttacattttctgtcctgtactccactcccctgaggactaggaagtttgaaaatcccacagaaggtagttcccatgtgcccaggaaccactgcttgtcatgttgtaacccgccatcattgttaatgaagtggttggggaatttcagaagtctacctgcttgtctgtcttttgggctagaaatcagaatattagtagcaaaaagattgcagtgccctgttagtctgaaaatattgaacaaatcacatcattttagtgcttaacctactctctgtacattagtcagctctttcttgcattaactcaaatgaccagcaagccgttttaaaagttaacgcatcagtgtgtgatgtacatgcagtcttccattcattcaggagattctgtgattttgtaagtttcaaatcagctcattgtcttcaaaagagttttaagtgaaattaaatctagtcatttatatctgtcttcaaataattattttagactgtgactagtgggaagaattgaggaaacacaccattttacttacaaacagccttcattcacaatgctggccatttcaccacacatcatgaaccttaaaagtagctgccaacaaccattcccctccattgtgtccataaaaagtggcatttctttttctggacccccacagcaactgtcacacttgatttccatgagattttctatatgtacttcccaaataacgttaattgccttagaacaacttaaaatccttcatgttgaaggaaatgtgtccaaacaaaactgcccccaaccaccgtgtgtgtggtatgtgtgtgttttagaaaaattattagtgagcctgccttccatcaggtgctttgagggagaaggagacaaagggagtgtgacgtactaggaggcctctggtttgaggtgctcccgtcacaagccttcataatgagtatattgcatattgccatgagttatcatgactgtgacctgcctcaggaggtctcatgccacatctgtattaacaactgcatctgcttcagggtcaccttattagcttgccgcagctgagccaggggcctcaggaggtatcagactgggtcctcagggaggcctggtacttctgctctccttaaattcagtttggtgcccaaaatttaacatcaggacctgctgaattttatttggaattatctactctagcatctcttaacagaaaaaacacacacatatacacacacacatccccctaaaaattgtcaacctccccaaatgtcatctctcattcccattatggcatacggcttgtttgtttcacatgaaaagcaatggaaatatcagaggaaaagttctcaccttgatttgtttttcttctcaccacaggaatgtacaaagtgctgtaaagaacacaaaacctagagaacacatatgcgcgaacttatctgtggaacttttacttctaaacctgacaacgaagatagtaaacaaaaattcatctgaatgagtggtgatgtgtgtgtatgtatatgtgtaatgtgtgtgtgtgtgtgcataagtgcagtgtgtccatgtatgaaagaatccatgagtgagtcttagctcttgcaaccaaattcctaaaaagagccctttaatcacttgcttcaaattaatcacgtagtgtggaatttggccacatgtgcatcattcattcaccctctggacagtaagagggacagagaagcatcagttcaccagggaacatatctaggtcaacatcttacaggcaaaattcccagagtgcactggtggctgcactgttctatcctctgacgggcaaaagtttacccgatttcattttcatgactttttcatttaatgttgccttgacagtaaagacgaatagagtagtaacaaacatgcggctaaaataaccccctgatggctaatccagattgtgcctaacaaaattccaccttgaaccagaagagtgtcctggcaggtgagttgtctggtgcctttgcataccctcatcttcccatctctagaacttccaaagtatttccttaagcattttctgatatgattacaaactaatgacacattattttattttggcatttttaaggctattttcagctgtcatttgtagaataccttgcactgagcttagcatgacacatattgtctcatttactccacccgcataaccatgtgtactattatcttggtgttacactgagaacaccaaggccgaaggatactgagtagcttgtccaaagccacatatcctgagtctttcttagtgagtgtaactttgttgaccccgatgtgacatttctaaatttggcacagtgaagtggcccccttattctgtccagccctatcaaggttcacagcttctttcctctcccaagtattaactgtgtaactaccaaactactctgaattttgcagtgacccactcaatcagtacctagctggaggactttccctcatcatccacagatgtgatcgttatttagtcatcaatcttacaacccaaaatatctatggttttttttttgttagtgttagtcgtttctcctctgcagaaagcaacactcctgttttttacatgttccctggtttagattcttttctcagccagtaatagcagaaaacttaaacatctgtatgtctttctttagatcacaatttctttctaccctgcccccaggatattcctggatgctggggttatccaaactttgggcaacatagcaaataaatgtactgtgaagaaaataaaaagaaaattgtcatggaagaaactgtttacctcactttgtagaatacaccccaccatgccaagtgagcacaacttaattgataatgatcagcttctcggttacctttaaccattttcttgtaaccatatcctaaagttgcagcactttacatttcactgtaaagaaggctctgaatgggggcaaccgggcaaatcactctgatgggcagacttggataaagcagtcttctgtgattttatattcttatttatctctcacactttacatgtttgctggatgtttccttctttcatttttttgtttggtagttttacctttctttttttttttttaagatggagtcgcactgtgtcacacaggctggaatgcagtggtgtaatctcagctcactgcaacctccaccttctgggttcaagtgattctcctgcctcagcctccagagtagctctgattacaggcacacaccaccacaccggctaattttttgtatttttagtagagatggggtttcaccacgttggccaggctggtcttgaatgcctggcctcaagtgatccacctgcctcgacctcccaaagtgcttgggattacaggtgtgagccaccacacccggctggtattttttcctcttcttacctcatttcatttccttttcttcttccttccctgtgttctttagcatcctcaactgttttacagagtgtctcttttcatgctttcgtggtttcatggataatagtgtttccttttcctttgaagatttcttccctaaaaatcagagaataacaatatagagaagttattcctgtatttcctttgaataatctgtatttttgatgattatggccaattgggaaaatgcagaataattaattaaaatttaaattaattaaaaaattaattactcagaactgtaagaggtggtacattgtagcattttggaatgttttcttcaagttttttctttcttcagccttttaaaaaatttatgcaaatatacatgcacatgcatatatactttaaatatatatatgatcttactatatacaatataatattttaaatggtttctgcttttcctcctcaaaattagtacataatacacctatccctttgtcattaaatatcttcaaagatatcaagtatttaacgaaaccacaactattctatgagataggtactactgttatccccattttatattagagaaaactaagcactaaaaggttaagtaggccaggcgcagtggctgatgcctgtaatcccagcactttgggaggccgaggtgagtgaatcacctgaggtcaggagttcaagaccagcctggccaacatagtgaaaccccgtctctactaaaaatacaaaaaaattagctgggcatggtggcaggtacctgtaatcccagctcctctggaggctgaggcaggagaatccccttaagaacccaggagacagagcttgcagtgagccaacacagcaccattgcactccagcctggatgacagtgcaagactccgtctcaaaaaaaaaaaagaaggtttagtagcttccccaaggccacacaggtaatagttggcaggatttgaactgagcagtttggaagttcagagactggttctaaatcactgagacacagggactccttctttatattctttatatgccttaatgattgcaagacagttcctcacacacttgtgcccatctttgcttaagcaatccacttagacgttttgcacggtctacactggacactgaattgttaccaacgtgttgctcttctaatagtattatctctgattatctccttaggataaattctgtgagtaagaaagtaaaagaacactcttaatgctcttcatttgaactttcccgtttctgatcactgaagttatactgaatcacatctctatctttgtatgtgaatacccattcctcataaacttgaccacactaaatcgtagacttttttaaacagacattttacattttaaaccctccatcagatatgtagcaacaatctgtcattttaattttcaattttttattgttagtgagattgattatttgcttttttttatttttatttttgtgagatggagtctcactctgtcacccaggctggaggcagtggtgcaatctcggctcactgcaaactccgcctcccaggttcaagcgattctcccacctcagcccccgggtagctgggactgcaggtgcccatcaccatgcccagctagtttttctgtttttagtagagacaggttttcgtcatgttggccaggctggtctcgaactcctggcctcaagtgatctgcccgcctcggcctcttaaagttctgggattacagcatgagccacctttgccatttctatttgttgttattttggcaagagctccttcatgcctcatgtccactaaaaattggtttgctgtcttcatattgatttctaagaactcttcacgttttaagactatgagatgttttgtctttcagaatactattttccctttatttgctatttacctttttagtagtgtttaatatgcatatatttttcattcttaggtatttttaaatgtaacatatagattttccatatatatgaaaaacaattacatatatatggggtactagtagcctttgcaaattacaacagtcatcagatgaagaaaatactcttgcctggattgtatatataggtaatgtataaaatttaagtcaagatttcaatggattaaaccaggtccagtctttctactttgctcattagactttttaaagtgtattgaaatatatatgcacatgtgtgaattttgcatctctgctttgaagagacgaatgagcgtgagaaaatgtttcttctgaaataaagaacactgatgtataggtttttatgcagtgaaatcccccacacagaatgcaagtacctagaggaaaggcactgtgggaagttcatagaaatggatgctgatgggaactggactctcaatttggctctgccattctaattgagtggcattaaacaagtccatttccccttattttttaaaattgtctgtatttaaggtatagaacatgatgttacaagataaatacatatagtaaaatagttataataatgggaaaacctaacaaatctatcatttcacatagttacccatttccgcctgctgtggtcagagcagctataatctcctcattttagcaaaaattctgagtacagtacactatcactaactatagtccttatgttgtacattagctctgttgactagttcttcctacatatttgctttatgtcctttaaacttaatatctttcccactgttttattctctatatattttatttaaccttttattaagattacacatataagtgagaatattcaatatttttctttttgtgcctggcttatttcatttagcacaatgtcctcctggttcatccatgttgtacaaatggcaggattgcctcctttttttaagactgaataatattctattgcatatatttataccacagtttatccatttgttcatacatccaaacatatatggacaactaattttggacaaggacaccaaaaagacacagtgaggaaaggataggcctttccatacatgctactgggaaaaccagatttccatttgcaaaagaatgaaattgggcccttatcttacactgtacacaaaaataaactcaaaatggataaaagacctaaatgtaagacctaaaaccataaaattcctagaagaaaacattggagagaagctctttgacattggctttggtaatgatttcttggatatcacactaaaaaccctaggctaccaaaacaaatataaataaatagggctacatcaaactaaaaaacttctgcagagcagaaaaaaatctgctgtggaaaaaagcaacaaaatgaaaagggaattgctagattgggaaaaaatatttgctaactttatatcagagaatgggtcaataggcaagattaataaagaactcatacaactcaataggaagaaaacatacaacccaattaaaaaatgggtaaagaacttgaatagatgacaggacttgaagtaaacttccccaaatatgatataaaaatggccaacagttacaagaaagagtgctcaacatcactaatcaaggaaatgcaaatcaaaaccactatgagatatcacctcacacctggtaggatagcaattactaaacgacaagatatcacaaatgttgatgagggtatggagaaaaggaaacccttgtctgttggtgagaatgtaggttggtgcaaccattatagaaaacagtatggatgctcctaaagaaataaaaaatagaagtaatataggacccagcaatccctcttctggccatatacccaaagaaaatgaaatcaccacctcgtaaagatatctgcactcccatgttcattgtgcattattcacaatagccaaaatatggaaagaacttaagtcttcatcaatgcatgagtcatcttatttttaaagagaaggtgtgtactagacaatttctaaggtcttgttcagctcacccttctctgagtttatcaaaaagtgtattttatcaccttttagcttctagctcatctgatttgagttatttacaggtagattatttgagttatttataggtgattttattaaatttcagggtattgaaggctaataaaatttcttcccccaaagcacttgggatgaggttggtacctcaacttatattaagaatttgttgattgagtgattaaacttctgaagttcacttttgcctattttgcctcttttccttcacccctacctgatggttccttagaaccatcccatcagagctaggtgaatgactcaggtattcacctattttgagatgtctctgagaaaaatctttttgtccacatttcatgtcagttggccaacttgtataaaccttggtaattaattaatggagaaacagcaatagcaattttagaactggtgtagagattagcagcttcgggccacagcatgtttctaatttaataatggctttaatagttgtagaaaggaagccttttaagaaaaagttcatgttgaatttgggacttttttccccaaatagcttgaaccagaatgaaatcaacaattctttccatccaggataccctcattttactaatggaattgactattagggaagagtaggttcagatttggaagatggtaaaccatctgaatggacacagaacacagaacttgacacttcctcgttgcttctttaatcttgtcattgtttctgtgacttctccttttgccctattcctgatttcttagaaccattgacattagaactggaaatactcaggattgtatgagggagataaagtatctgtgcttgttttgttgtgttcttgatattacgactggtgaacctttgtcgcttcctttagaactgtgcaaaggcatgttggagaggagaaggaggagaagaggaatgggttataggacaaaagaaaaaaaaagcaatcatgctaaagcctttgaagtgttagacgatccatctgcctgtttgagtctgaggctgaatccctttttaaaatgcatcaaatgtttgagtgtgaagttcggtcctgacagcatctgtgattctctgtggagacatccgcagtgcagtttcccagatgctgtctgtattcacacgagaagagtttgatccaaagacctagccagactgggaccatgtggagttgaagtagacaggccgtttcagcaaggccctgtgaagtctcagtagccaggccccataaaatcagagtgggacgagcttgaggcttttaattccaacctgaagccatgttgtcaagcttctcattatcccagtaccagaaggtaataagagagggggcagggtagaacaggcttccccatgacttcataaatcctgcttgtgatgaaatgtgtataggcagtgtaggaaataaatttttaatttgaaagcacagatttttattagagagttgtagtatcatgatttccatttacatgaccaagtgaattacttaaaatattagtataaattatatgcaacttgaaagtttagctgaccaacattctccatactgacagcattacgatccacttagtaatagtacttcatgtaccaaaatacatagtaaacacagccatcagcaccattagaaaatatacatttaaaaccttaaacctagctgtttcactatttgtcagtaactattttataaagatcacagggtttatgttttaagacaaatatctatacattttatggtgtttggggggtatttcgggtcagatttcaggaagagtaacttccatcccatcgtggccatccccaagactcttgtagaaaagcagtagctctgtaacttttgcattttatctctagtaattccactgttttcattaatgccagcgaagtatcaaaaatagaagacaacacggaagagcagaaaaaaagagattaaattcattcctcatgaaattaaacctgtagcagatctcagacctatctgcaaaacttcaagatgtatgtagtcaagagagttttctgtgaacgggcgtttttccacttaccataacacaatatcataattttccggggtctcctctcctttgtacccgatgtaaaacttttaaaaaaatgttaaattttctctggcagtaaaaatcccttggtaattggttagacacttagggaggggcatttagttttagagatcactagaggatagctttcttttctttcttttttttttcttttttttttttgagaccgagtctcgctctgttgcccaggttggagtgcagtggcacgatctcagcttgctgcaacctctgcctcctagattcaagtgattctcctacatcagcctcccgagtagctgggaccacaggtgtgcgccaccacgccaggttaatttttgtttttttagtagagacggggttttgccattttggccaggctggtctcaaactcctgacctcaagtgatccacccgcctcggcctcccaaagtgttgagattacaggcgtgagccaccatgcccagcctagaggatagttttctaaattgcctttgtagtgtactaaataaatgtctaaacaaaggtattctgatcttccgggtggctagggcttcaaaaatgtgtagaaagattccacagtgagggttcataaaaacggtcttttgggatcattcctcattaatactctgggagatctgtgtaggcagtggaatgctatgttagtgcttatgctctctcatgtaaaaaaataaccatttcaagccagcatcaagagatctgccaacccccgttccataagaaaggactggactttgcttagatcttttgttcatagaagtcattcattatttgtgcaacatgaatcctcaagtgaaatcctctttaactctgattgacagtcttagcttatttttggggggcttttctagtatttaaacctggatcctgggctgtgaaagagagctgtgagtttctcactagtctgcttgtctgaacagcaagctcagattcaacttctgcatgatgcctgccttgactccttcctaccctactgctaagcgagaagccctaagggagtggggtgcagagggaaagagttgaaagaaacgataaaagtctcgtccagactactagctgaacacctaaagactcaccacctcccaaaagagcctggtccagtcttcaaagttctgcttaaagagtgggccattcagtcagtcaatcatttattcactcaacatatcattgggggtaaaaagataaacagaatgttatttttcttctaggtgataatagtaacaacataaatcattaaaatctgctaagtcacaaggtgttagaagatgaccagaagtgattaaatgaacatgcctaagagggtcaaagaaggtttatcaaagaaacttctgagcagaatcttcaatgatgagtacagagtcccaggaaggccaaggaagaaggatatgaatcagaggaagagtgtatctaaagcatggatttctaaaagattcagggagacactcactcctcagagaccctgtttccaagccaaggaagttgggttttatttttagggcgatgaagaggctttgaacagattttagtcaggggagcaacataagacctggatcagggccaggtgcggtggctcacacctgtgatcccagcactttgggaggccaaggcagaaggatcacttcccagctactcgggggctgaggcgggaggatcacttgagccaaggaggtcaaggctacagtgagccgtgatcacaccactgtacttcagtctgggtgacagagcgagactctgtctcaaaaaaaaaaaaaaagaaaaaagaaaaaaaaagagctggagccagctggagagtagaattgaaggggtgagagaccacatggggggaaatataactagcccaagagatttagaggtggatcagaactaaaaccatgggaatggaaatggagaagaaatggaatttagaaatatttaggagttatgacccaatagatgtgaaagataaaagagaggaagggatcccgggatactctgagtctgtgtctgaaatttccattcactagtccacatggaaaaaagtccttattctactataaagtccttcatgtattttattgtggctgacatcttcttctcttggtttttctccaagatcaacatcctctggtctcttcaaacactgcttatatgtcctggtttcaaaaccatcatcacttctccaactttgctcctttagcctgtacttatttatttatttacctataattttttatttccgtaggttttagggaaacaggtggtatttggttacgtgagtaagttctttaggggtgatatgtgggatttgggtgcacccatcaccgaagcagtatacactgtactcaatttgtagtcttttatccctcacccacttcccagccttaccccctgagtccccaaagtccattgtatcattcttatgcctttgcatccttatagcttagttcccacttatgagtgagagcatacaatgtttggttttccattcctgagttactgcactgagaataactggatggtctccagttccatccaggttgctgtgaatgccattaacttgtttctttttattaacctgtactcatttagttattatctaatataagccagggactttcattaattgtgggtacaaagatatactgagcatatctcagggagctcatgatccataggcagaaagaccaaaaacaagaatagttattgctctctgttataaaaaagttttgatggaggtgtctgtagaggggtggttctcagaattttttctgctcagagcatatctgatatctgtgactgacatcatcagctatcattgctcacccaggtggcagagtctcatgagcaccattgtctcatctttcattatggactctatgagcacccattatgaactactacaagatatgaacacccagaagtgaggcatagcttcactttagctgtggcccccagcttcttaagaatcagtgaagtaaaggttgcaacagaaatgtcatacaaaatttatagcattctcaatgagagtgctgcctgtgggaatgcagttaaccatctatagatagaacatcggggtgcaacaagagatgagaccagctcttccatgtaactcagccttgagtctggtttaaacatgagccaatataaaggtctctattagccataaaatatgggcttcctttaataaaatcattgcctgcacagatatctatgataattatgacatcatagataattataagaatatcaaccttatatattggccccacatcttctggttatcaaagcaaatttacacgtgttttaccatttaatactcactataggaaagttctatgaggaaagaatcattctctacccataacacacacagactgaaagaagacctacatctatggctgattcaatcatagcaccttagaagttacacagtagcacctgtcttccccttcataccgcatggagggtctgcctcctgtctttaaggttcagcagctacatggacaaagacctgtgccttaatgcttcatcctgtgtgccagaagcaagacagcagactatatttggccagtggacacccttcacttatcttcacctatcaatagttttagggatgtggtgaaaaaagaaaagtcctttcaaattaggaagacatcatgggtacagttcctcttctgtacatttgttttatgctccgagttcatttatgtgagcacactgaaaagggacataacagaagctggtacttgtataaataatagattggttgctatatttatagcaccaagctattatattgactaaggaatagtagtcttaaataattgtatcttttaggcatttctgatgttaagcattaaaatatcatgtcttcccaatctctccttgagccctaatttatgacaagtgaaaagacttttttttttaattcgaatgctctgaaaaccaatccttcactgactatgaccgaaatttgtcactcacaaaacacagttatcttacagttttgcagcaggtagacctccctttgctagtacaggttcagggtatctggaaataaactgaacattttgctgaagggctttttaatttctcataaggatttatccattgacctagcctgtttccagaatatttatacttaaaagaaagcaggaagggaggaatggagggaaagaagaaggagagaaggaaaagaacagaacagaaactttaatttttttaaaactcaatgcatagaaatcagtgaacataaaatagatgacagatgtgaatacatagtgaccaaaaactttgaactttatcccatttccagaccacaagaatatccatcctctggtgagcctcgtatctatactcaatcaggataactaagaatggcataaataagtcctgtgcaaataattatgtcacgtccatttatgcttcacattcatacatgccctactaattgaatcaagtgtttaatcccaggattcattatctatttccctatctaagtcttttttcccatttatatttagcacccagctgtccccttctccaaatggtcaactgctgtctcataaaagccttcagattggcctccggaacccctagctttgtgcagcaattttctcagtaggggccagctggatcttggtgtgtccctgctgctggcttggaattgttaaagaaagcaagctgcatggagatggggatagaactcagcccttcctagcagatattccaggtagagccaggcatggtgttcggtcaggacagggtacggctgccttttgtagtagtcagaataaagcaataaaaagatcagttaaaatgcttgctggaagttattgatagaaaaattctttctgcacgaaagattataaacagagtgttatctgaagatggatttgttttaatttggcattgatgtatttgatacctggtaggatcaaagaaaacagaatcaaagggagaaatacaagcagccctgtttctctgaatataggcctcttttatagatataaaatctcaggactggagtgctcaaatttatttgtactgatgtttgtttaaagatcaatattaaataaattggtctggaagctatagtcataaagcagctgtcgaactaatgtaatcccacaatgccattttgtctactgcatgaaacctggttaactgtgtacttctaataacgtggaaatctgttgaaaaagaaaatagctgaaccggattttctgaacttggactaacctgcagtcaaatgtgaggggaatttggaaaatttatagtttggtcccttgcaagatggtgattgattcatttttatggccaagtattaaaggttcatataacctaaaacttccttataaaatatgtaaaaatgcccccttagactctattattacacttcagtattaaaggtaaatctcaagacccttgttatgactggttttgttgaatgttgacattattattatatttcatcttattgttggcatttgttgactgatttgtttttgatcattgtctttgcagttggcttgttaactgtgagctgggatgcattgttgtgtttataaacctcaaattttaaaatgtttgccctgctctgtatcctgcaaactttcagaagaagaaaaccaaagcagaaaaccctgtggtcatgtatcctatatctgatgcctatgtaatcatactcctactatctttgtcacacatttttgagcatccagttttgttttatttacaaacacgtaagatgtgactcctgctatcaaggagcataggatatttatacctgtatctaggtataaagggtttatcacaatgtaataaaacatgggtaaaaaatcatatgagaaggataaattgtgaagacagtggagagcaatgcattttataccaccgagtcatcaaggaggaagaggacttgaactgggccttgatctacaccactgttttttggttagggaaaggagaactaaacaatgatatggcataattttcatagaccctaaagaaatagttacgattaaccaggccaagtggcaagggttataaaagtgaaaaacagtttttctaataaagatggggggctttttttgaaaagcagatagtggagtagccttttttcagagaaaccaatgtcatggcataaaagatgctcatttttatgtatttttctctatcctttctagttttctatagggctccctgcttgttttctttgttgctaaatgctttttatatatcctagccccaaaggacacctggaagggtagttttataaattgcttatatgacaactatgagaattaagcaagtcttttgatttcctggaattgcatattcctataaattgcttatatgacaattatgagaattaagcaactcttttgatttcctgaaatttcctggaattgtttattgttcattatccacttaggagggttagtaagctcagtggttagaaaaacaggcctgagtgttagattaacaagtagccaaaactctgcacttgctagctgtgtgacatggggcaagtgacacaaccttgcaaagactcagtctcctaatccataaaataggaataataatagctaactaataaggttgtttgaaggttgaagtaaaataatctattaaaaacattaagcaccatgcctggtacacaattaagactttataaatggtaactgttgtcatcatctctctttctaaaggtttcccatgttgtcatatcctagaaggcctgaaacagtttcatttccactttctaagcactaggaactatagcgttttccagaagaagattaaacactagaagggaataaattagatgatattattaatttgtaaaagtgaaatcaaacctatggaaaagctggaatttcgaatgctgtttttgtttctgaaggctcagagtgtgttttgaataggtagaagtgtaagaaagtatttagtcctgttaactcttaaaccaagtacttcttaagtcttttgtccttgctcaaaaagaggttgttgggcatcacaatattggatgtcaggatttgtcactcgggtcattcgtgctcagtgacagacccaagcttaagtcaaatggaatatgtcttttgagcactcctaccactcaaatatggatgaagtgacatccgatatgatgaagtggaagaagtttgttttttattttcattttgttgatggttgtggtggtggtggttgtgccataggttttgccactgttgagagtaaacaaaaactatagatcgataacaccaaagaggcctaggaggttaagttatttgttttaaaaagttttaaccttcaagaattcagtactctcatcctttcagtaatattgatgtaaatatttagggaaattcagggatgtcaataaagagggggagaaatggcaaagggagactgatatttctcttgatggctaactggctttgtgtagttaagagaacacatagtggacaatggccagaaaagccctgcatgatattgaaacctcagtctggttacaaaagtcaaagttagcttcaagcacagtatggaaaactatgtccacaaccagggctacagagatagtttttttcagcatgaaagggtgcgatcttggaggagttccacagacagtcatctgcagccagcagagctcttgcatgctggtgaacttacttacatatgtgagtcacacaaaggggagaatggagttctttgttccacgtctgtgggataactgagttttgtatgatataaatgggggcttagcactgcagtagatattttcttggacagcatgtagggacaatagatctttagcctttatcttgagattctaaaatcactctttcctcctgcgttttccagttaagcaaaggctaactttaaaaatgtgaagatgttttcatttgaatagtttcaataaatatctgctttcctcaacttcaagtgtttcagccttggtttctttgattttttttttctttaaagccttaatcatagataactacatggcaatgagttgcatttcttacctgggtttgttctatcactctggaatgttttaaatgtccaaaagtgatttcagttagcgtcttgatttagcatctttaaaaatccatgtatatgtatccagtttatatatttctacttttcttgataaagatatgaaacttaaagtaaaattgtagctgattgtgctgaattattactctaagatagattcatcaaatctcccagctgtataagacagggcttactaatgaagttccctatcaaaaagaaaagcctaattttgatttggcttaggtaatgaacttctttttcctggtgtgattatctgcatggggtggctaaaagagtagcaagagagagtgcgctcacagaagcattatgcaaaatgtcttttgtctctttttgctgggatatattaaattttcaatgtagtctatgtaatataaaattatgataatgacttttggcccactgtgaaggcagcttgctggtcctgagcgtgtgtgtctggcttgagcactaggatacactgtgggagttgccttttctattaacaaacctctagatacctaatgatgaattttctttcaccaaatgttctccttttgtctaaaatacaagcattttctaaattgcttttgagaaaaacaagagagacagagaggtctatggcactaacaagggatactgaaacaaagcaaaggattcagttagcatcattcttgtaattataaaccaaccaaaaggttgtttcatgtaccagtgaaaatatttactagcttattggtataactgattgtatcacttagtaagaggacaaattgaacaattgcctcataaaatatttctgttgcttctagtcttgtgaaatttgatggctgaatttattatggatagttatcgcaactttctgtctctacaggcccttctaatttgggaaaacacgttgtttcttttttaaatttttaaataatagaaatgtataaaataatagaaatttgtatttttgttacttagcatctttgctacaaggtatctgaagaaagcttcatgaagatagttacaaatactatatatgtcatatcacttttaattttaaaatgatggtgaactttaaactgaaggctagcagtttattctaaacaaaaccatccttgcccagaacaagaccttttgatggtcctcagagccagtttacaagatacacaagaaaatctatctcatttacttacacacttcatatttccttaatttttcatctctttactcctgaaagcaaacatctacatgaaaaacaggactctaactattggtagttatatccccatctcttaccagcttgacatgataataaatttctgtttaggcattcacagttattagggaaactcctgtgatgtcacaaagcatagataagatatttgctataaaactagctttagagaaaatccactctttgatactatgttcaaaatgctaaaaaaaagagtataaatgtagaaaatatgataaaaagtacatgctgacactagatgtgttatttcaaagttttgcggagcatcagatgcttattaagtcctctagttatggtagtctgtgtcaagggaaggtcaatgccaagtatatctgcatatctgttgataacaacatgaacatctctagcaggtgtgattttgtttatagtcagattaatatctttggaactgaattaccataacctgttagaatagttcattaaaattgcttttaaaacccgaaccaaaggacacatgtgaaataggaatctcttaaataacagtctcctgaattttatttctaaaactaatagaaattatcacaaagtagtgttaatgaatacttctgctacctttcttagatgcaaaaaaataacttacaaaagggaatgtacaggatctatgaaaatctaaaaaaaaaaatcaaatttcaacatattggttaaaatgtgtggcattttgtagtgagctggctctagtttttctctcttctgggcttgggttctcaaggttccattgcttagatattctaagacttggtagccacatcttttccatgaaagtactattctccttgtcatcagaaaagaagtcccaagaactcacaaggtaggcagggaggaagcagattaagaattaggtcgtgtgttaattagctgtcattccattgaaggccactgagaatgaggccagttccgatgatgttatttcaatcagttttgtttgggaatgagaagccatttttgaatctagacaatgcttatggcaattgcttgatcttcttttttaaaattaattttaaaagtcagtagtgatgcatctgaataacccaggtgctatgcctggtgagctgcctgagcttggtagtagccagagatggatgagagaacttgaaagatctaggaaattaggttggtaaagtccaaacggtgtcagtctggtttatttgatgaggtgctgtgcttctgtgactactctactgctgagccaaaaaacaggatccctttggtccaagctcattcgtccatatgttccctttttggtgtgatgggggaggagggtggaaacagccctttaggaaaaacatttagtgtcttaagctacacaagatgatgtttgcatagcagaaagacagttcttggcagcaaatttttatgtttttgcccttaattctgtgtctgtgttttatcagctaaaccagacaggcgcaaatgagcaaaaacttcctagcgcatggaatgttggaaagttacactggtcaccgacagtcatatggtgatgttttggagagggtcatggctctataattggaaaactggggcttattttgtttatactcattagagtattgccgaaaaagctgagcatggagtaatcatttacaagataaccaggagggcaagaaaggctttaaattaaagacaccctaacctgtggacaataaacactctcctgaaaactaaccagaaaatcccaagtcagatgaccagccacctttgagcctctgtagactacaaagagtgtaaatcctgaagtaaaagtacacacaggcttccatctctggcaaagagcagtaagttattcacttcatagagacttattcaactgaagacttttctttacatgtagaaccactaagggaactctagaaccaaatttccattttctgtgctctaaggaagaacggcccccaggggatgccctaacttccaaagactatttcattacctaaggtcttacaaagcatgtgggtagtgtggtactaaaaggtattgcattttctagcacaatttggcaggaccaccacaccttttgtgcacatcacatataaacagccagctttttttcttaacttttttcatgaaacaaacacgtaatttttaatttactactcagagggtgctgagaacaaaattcctctaattcagtcaaaacgtttgtccaaataagctgagggtgccatttcattaaagcattgttctggtcaccaacagctggaacccattgagttgctggaggcacttgtcattgttaagctttcagttttcttttctttcgatctgcttcttgagaggaatcaggtgaggcaagattctgtgtaatgggtctgtttgaagatttcttgaagaagcgagagtgcctttggatttgattttgttcatcttgttgggtaaatatctgtgtttctgctttttgccgcttagcttgtctctgaagtaattgagtccattgaaagcagaatgttaagcaggcctttgattttacttcagccaaacccatgtgtttgcatcagcgattattctgtaatcttggcatcatcacagttgtatgtgcactttgttttctacactaaaaaatcttcaggaatgtaacaggaccaatacaaatgccctccctctcccattttcccttgttgggagctatatcttaaaggaatcatttgtcattcttatcaaaacggcactggccttctcccctctgtctccccatgtgttgaaaaatgtagccattattatcccacccagttttatgcatcttccagatgatttaactgaactgatgctatggaggatatgctgactggcacttttcccatgcttaatgtgttaacaaaagccaatggtgtcagttttaacagttttagctaaattcccacgacactcttaacaaacgctgaaacctctgccatgtcttaccctgacagatttcctgccgtcattgcacacttaaaataaatgtcatccccaatcaaaaagttcacgttttctctgacaatataatttgttactttgttcctgctttatctctttctttggcacagaaatctcagccgagagatgttacttttcttcatgttggctgctttcctttttgttcttccaagtatctgagtggaataagaaagggaagctaagaagggactgccttttcatttcattcaggagtagatagaaatttctgatttgtgatttgatgaagcaaattcatgtaaatgatgagttgataccatggtctcctttcacccggtgtctttgtccatttgcgctgctatataccataaactaggggcttataagcaacagaaaattatttctcacagtgctggaggctgagaagttggagatcaaggcacctgcagattgtgtgtctggtgagggccagcttcctgcttcatagacagtggcttgtttccgtgtaccttacttggtgaaggggcaaggaagttattcgggatttcttttataagggcattaatcccatttgtgagggctccaatctcagaacctgaaggcctaatacctcctaataccaccaccttcagggataggatttaaacatatgagttgggagggagacatacacattcagtccactgcactcaaagacctagtgctgtattacttaacacagagcacttgtagattgaaggaatcaaactaggttccaaagaaagaacttggactttggagtggacctgggctagaatattggctctctgtgtgtaataatgggcaggtcaggtaacatttctggccttgattgtcttacctgaaaagggctgtaacacctctactagaggcactcagcagatggcagctctcttctgtgtcatacctttcccaagggctgtggactgtaagaccaggatatttccctgggacagctcttctgcactgacttttcctgtatggtcttttgctacagattcctttgctcttaaaggcttattgtcttttttttttttttttttttttttgagacagagtcttgctctgtcgcccaggctagagtgcagtggtgtgatctcagctcctggattcaacctctgcctcctgggttcaagccattctcctgctttagcctcccgagtagctgggattacaggtgcctgccaccacacccagctaattttttttatttttagtagagacggggtttcaccatgctggccaggctggtcttgaaatcccgacttcatcatccacccacctcagcctcccaaagtgctgggattacaggcgtgagccaccgtgcccagcgtctttttgcattactaacttggtggaggcacatggaacgcttactcaacaacccaacaggcatatagattcttcttgatatagaaaagagtttgcctttcttctgcacagaaaaatatcccagcagctaaaacccaaccatcttgtacaatgtccttacttgctggacttaacagagttccctccagtgccctgtggcctgttgaatgagtaaggcagtgttcgtgggtagagcacaagataggatgggaatcacaaggccaggctcctgccaccaaattgatacgtggaaatgaggccaagccagttctcttctctcaacctcagttcctcagtttccttttatgttaaatcggggcattgaatgaaatggtctttaaggctcttccaggacaaaattattataatttgaaaagtatgaaagatctgtcacctgcaactattattttttgatcatacattttctgttcattagctttgagatggtccacagacttctaagctaatgctttatcgatgaaatcagctcctttcttcctgcttttcctgagctctgtcctccccacccccaccctccactctctttctcagagaataagaggtggctttcacagcagctggttaatttccctggtttcacactactgtttaatgatccgtttctcgtgtgccacctctctcatctacggaaagataggtacaaattgtacctataaaaattagaatattattcagggttatcttttttctttcaaaattttcaacctcaaaataactttccgatatttgttttccttcacaagttctttgaaatatgttgaggtctttgacaccctctgttttcagatgctgagagagtagatgcctttaatattctcagttgtattcaaagcatagcagttgaatccctgggaggtatcagccctggaactggaccagagtatgaagcatgtgggcaaggttgggcttgctggttcctcagtctcccaggaagtccttggtactgttttgtgtctggttctaccagcggaggccctatcccagtgggtgaggatgtctgtgtggaagtccttacttaagaaagacctgagaaattgattgcttgtaaaatggagtcactaaacaagggcttacagaaggagagtttctgaacacccccattaataaagactttttttgcttttagtaaaacagtgctgcataaagaacggtggccttaggattaggcatccttaggatcaaacgctagctttgccacttactaactaacacatggaagtctcttattttctctgggacttggttcctcagctgttaaatgaaggcgttggactcgatgtctgtcccagttcttccccaatgaggttgaggctcactgctgggatttaggaggtgtgtgtgcacacacatgtgctctgtctgtctgcttgtccataaggaagtgcagaatctggacaggaaaaatgaagaagacggacttgatttcctgctgacattttcctctgagccagtcagatcagtcagctgcactggactccatgggaccagtcttcatacctgtgattgtctgcttagtggaaggtctaaatgtggtaatacaaatgaattggccattaccggcgagacaaatcctgataatacagttaggaactgtcagaggaatccgccaaagaaacaagagcaaagcttgtaggggcagcctacttccaaatatcccagttctaacagtagagaaacctttgcccgaggtgatactgtggggcagggtttgaaggagccttctccaccacttatagctgctggattgtaaaggttattttggtttgtgttttaaaaggaaagctatttgcactcatgccatacactgtggttgttctttaacactgccttggcaagcagaggagttttcaggaaggacgttagcaagaagggttatagattttggctgttttaggaagacgcagtctttcaattacatttaaaaagcaccagaaatggaacacttgtttttatagacgtaatcggatttggactggactgtggtgtggcgagactcatcctggaggttacaaggagacagaggaggatccttttgggaggtcagagggcacagcagcaggaaccaggcctccctgcctgtatttttcccaaggtctcttgtattcccccagtccaacaaccacattcggcacactcactcacacacacatgtggtgtcccatttggtttaacagttcaaattcatataggaactttcaatttgaaattcagctctgtgggtgatcttttggggcggagaatatttcaacataatctaatggaatgaaataattttctgttttattactagactccaaaacaaaggatctggcgtctggtgcccacacctctgtaatcagtgcatgacaggagagacagcgtagcctagtgattaactctggtgtccctggagtcaggaatccctcttcccactccctgcttctgcccttctcacgtggtcttgggtgagtcattcaccctttctcaacctgaacctctccttctatgaaaacaataaaactgatcattgataataatagtaatacctcaaagggctatagaaagaattcaatgaggtcacatatgcaaagagctcagagcagcacctaacagtaattacccaacccatgttagacattattgttgttattattgttgtgtttttaatacttagcctttctgactcttgttttcttacctgaaatgtgaaagagttgaactaggtgatctgaaaactcctctatctccaaagcttactaaaatattgatgtaaaatagggactatatagaagtattttaaacaaattggcatgaacataatatcaacaaatcactatgcactttctgcattaattgcatagaaatgaaatttttctttccaaagaaactgtatatccagaagaagaaaacattgggaagccaacaactttttttatatattattacgaaatttttggtgcatttcttttaacaaaatagcttattgatttatgtgaagggaaaaaggggaatatttctgtctactttaattttctctgatttttttgttgagtagcaataatgtattttatcttgtataatctttcaaaagccttcacgtttttaacaagatcttacagctgtttatatgttatactgaaatataatattgactaagctgacatatatattaaaaagcaaccaaggaataaagggtattgttttggtatataaatcaaaaataatacagcaactggtctttcagtgattaaagctgcctttccctttaataactctcctaagaaacaggaaatgtaatttccctacacctttcctggggctctccaatcagctaggtcctctgggggttccctactgtatattccttcatcaacaaggagtcccccaaggggcccacacacactctgttaaaattagctgtgctccacattagtgacgggagctgagtattcctcagaggggtacacagttgtatggtgctgcttcctgtttgagcaaaatcatatctttaattgcagagaatttttttcattacctgttaattgataaatcatgcttgctcctgctgctgtggcttgtgtagcaaacctggtcatggagccgtctccagcccaacccccatcatccttccaacccaaacaaaaaggaaaagaaacattatggccagagaaggaaaacaagcaggttggatttctgggcagtagcctcaaggagttgcattaaaacaaaacaaagacatacacacacacacacacacacacacacacacacacgtatacatatacatgtatgtatgtgtacatatataaaataaggtaaagaagccatttaaaatgtttctcttttctttccccctccttttgtcattcttgtccttttattcatgtttctaatctgggtagcaagaggccactgtcttggcaagaacagtaaaaatcctgagtatagtgaaataatttagctgataattccccactgtataattttctacgcttcctgctagctgaccttgtgggctcctgtcaagttgctaagggaaatccagcaggactccagctcagttcctttacttttaagaagtattacaggatagagtggtgtgtttgtggcagcttagttatggggccgtacattctgtgtttgatcaaatagcactaagcaccccctccccaccacttgcttggatcttctcctcccacccctctttttgtggtagctggaagatggagaaattgctgcaaagtgttgagctggaatcatgagcttgatggatgtcatcagaatgtgcctggatcccttggggcgtggccaggggaggaggctggccaaactgaagacatctaatggagccttttatctcagagatgtcagtcttagtccagattgggatggagtgaaaagctgcaaccgctgcaataaaaattgttttggagttggaacacatcacccccaattccttgctgtctgaagtccgcttcccacatccccagtcttgctgggctacatcagatgcagtttgggcaggtagtagaaggcagagtaagcagatgggaatattgtctttatcataatgttcacagaccaggcaaaagttaccctgctcattaggaatgggacacaatacaccattgatttgtgtccaagtaattcccaggtaattataggccatcgatctaactgagcagtagctatggtggttatattctgcaaatctcatgttgcctcacacctggtgactgcagcgccattacatnnnnnnnnnnnnnnnnnnnnnnnnnnnnnnnnnnnnnnnnnnnnnnnnnnnnnngatctagaacagtttcctccttaagcttcctttggccacagggatgtgtggagactgtgggatggttccagaagtctttaggaagcctgatgacttgtacttgcagccactctgcaagccttgttctttaaaattccgtctgttaggatacaagaggtaaggcagcttcctgtttgtagttgctgtttataggccgccagcagtaagacaggaattgcatcagctggctggttttgtgtctcagctgtcaccaaaagagtgtagtaatattcctgattaaatgtcattactctgtggcacaaaaatgggaacactgacatgattttggatctgttcctgttaaaattcagccctagtagcaaattatgtctgctatggattaaacacagctatttttgagctatattctattgcaggctcagaatttttatcaataagtctacacattatacccattgattccctcaggcctttaactaaaacattaaaaaaaaagagaccctaagtaatagaatgttgaaaactattgttcaatcagcagctgctgtcgactcaaaataatgtggttaatgtcctagattaaaataaattgatgataataaagttgatttggtaacaggaggtaaaactatagtgtgagaaaataaagtttatttttgtatgcattgttgcatatatggatatgtttagatacacaatagtctccattacctaggaagaatttattacttgtatcataattatcttttagtggcttatatgtctataatcagatgataaatggttatgtgggtgaaagagaaaagaaagtgaggtcttaaagaatttgaaaagtcaattctaaggaaatagtcacagattgttacttcttgccagaattaaaattacatcattgccaaatcttagcctcaagaaaatgaactgtaaaacctgctcatttgtccacttccagttcctttagctgattacaagctcatagccagatgggagcaaacagaagtagtgaggggagacatttgactcttaaccacaaatgcacgtagaatctatattaggccatgttaatacattcatctagattaggataataaattcaactgcatttgacaatactggtagatggtattatttattgaactctaccaagagaccttgaaatggaatatatgaagctgcttcctcaattgtaggtactgtgtccactgacctggcatttagcagataatgtgatatcactgactaagcggcaattaggaaacctaccaagaccgcccatccaacagaccaacacaccttttgcttcgggaactcagctgatgccgcacacatgtcctgctgttgaataggttccactctcagatcggggcagacggtagaatttatgctcccgtttggcatctgtatgtttccagatcggggctttgtctcctcctcttgctagataagttgaaacattgacaggcagcgcgttcctttttctccccttttattacagtaatttataagatattttagctaacaggagaacggcccaagggggcattctcatgttaattaccaaatgtgggcttgtcaaaatcaaatagctccaggaataatgcaagtagctctgcatcattatattgtttggccctcaacccaatattagctactttttaaaatctgggttcattaggcttttaaatttaaaagaggaatcactactgggagccttcagaagaatgtaaagcacagccagcagtgccagagtttaatgtaaatgacattaaaaaatagtttcatatcacatactcagggaaacataaaacaaaacaaaacaaaattgtgcctgaaattaaagtatttatttttctctttactagcagtctgaaatggaagacagtgtttaatagatgattatttcaggagtgtgcagttgctcatgttttattcctaaacatcctaccatttattgcagtcatcaagttagtgactccaaggaaatggaaaaagttagaagttataaaacactagtctgcttagaagatacagtaggtggaaatgtaggattctttgttgaggagcatatcctaaaagttattcaaagatttgtagtttgtgatgaagatccttttcccagaaaaatgttcccagtactcccgtttcacaccatcactcaagtagctgcccctttcatcactgtttttatctggcttaccttgataacctcctttttctgactttgggatctcttgtgcctttaagtccagaatcttgggtagggagaggcaaataagtatgtgtaacttgtaaaaaatcctttctttctagcttctgccatgctcttggctgcatacaggagtaaaagtagatggaattggcgacaatgtcaatgaaggacataagtaaacagctggtgatgtcaacaagaagttaaaagtaagatttgctacactaaactacaatgtggaataatcctctggtgtataatcaagagttcactatatatacaagtgagaattagagaagtgtgaactattaaaatattaactagaggatattactatagaggttgtggtgaatcagagcttgaagattcacctcccgatgtttactgaacaagcatttattcagcacctactatgtacaaggctctgggctagatacgagggatataaagacaaatgcaacacagtggttttctaaaggagcttgggtcaaatttggcaccagacatgcaaatgaatatttatgtcatgatagatatttgtcttaggaaagctaggtaccatgatcaactggagcacaggaaaaagtatttgacaaggactgcctgggaagcttaggggacacttcgttaggaagagaactccctaactaatattcgaagaatgagctggaatttgcaaggccaaggaaggattttcctgtgtgtacaaaacttcttgggaaaattgtacgtgggatgaatggaatgaaatgatccagggtggacagagaaatggagccttaccagaccatcaagaaccttgtatgccatgccaaggactttaagttttatcttgcagcccatggttttcttgatgaaatttgagcatgagggtgatatgttcagattttcttgtaacagggtcattctggcatcagagtggattgagggcactgttggaagccacaggagcagtaagaagcaatcttctctttctcatgctttcttccctttggttctctgtggctgctaccaaacttttctgattacactattcattttccacataagtataccatggagactctccaatcggaaaaaaagatatattttggattgtgtaggattgattgattgattgattgattgattgattgatttttagagacaggatctcattctttcacccaggctggagtgcagtggtgtgatcataacccacttcagcctcaaactgctgggctccagtgatcctcccacctcagcctcccaagtagctgggactacaggcatgcaccacaacacctggctaattattgaattttttgtagagatggggtctcgctatgttgcccaggcctatctccaactcctagccttaaggaatcatctcacctcagcttcccaaagtgctgggataacaagtgtgagccatagtgcctgggctggatttatttctaatgaataaactttcttaaagcagttttagttttacaaaagagtttaacagaaagtaccatttccatattgtttttcccccatgactttattctcccatcattaacatcttgcagtggtatggtacatttgctacaattgatgaaccaataatgatacattaaagttcacggtttatattagggttcactctgttttgcacagttctatagattttgcatatcatgtgtccacaattatagtatcttacagaatagtttcactgcccaaaaaattttctttgttctatctactcatccctctgctccttcccctgaagccctagtaactactgatattttttttactgtctccatagttttgccttttgcagaatgtcatatacttggaataatacaggatgtagcttttcagactggcttcttttacttacaatatgcatttgagattcatccatgtgtttcatgacttgatagctcatttctttctattgctgcataatattccattaaattggcataccacacttcatttattcatttatctattgaaagacatcttagttgttgcttccagtttgggcagttataactaaagctgctgtaaacattcgtgtgcaggtttttgtgtggacatacattttcaaatcatttggggaaatacctaggagctcaattgctgaaataatatgttaatattatgcttagctttataagaaagctccaaactgtctttcagtgaggcagtataattttgtattcccaccacaataaatgggggtttctgtggctcagcatcattgccagcatttggttttgtcagtgtttcggaaatcagtcattctgacaggtacagagtgctatctcatcattatttttgttcacaattcactaatgacacatgatgcagagcatctttttatgtacctatttgccatctgtgtatcttcttcggtgaagtgtccagatcataccccccaccccgccactttctaattgagttgtttgttttctaattactggatcttaagactattacatattttagatacaagtcctttatcagacatgtgtttgcaaatatattctctcattatatagcttatcttttcaatctcctaatattgtcttttgcagagcagaagtttttaacttcaatgaagcttatcttcttgaattttctttcatggatcatgcttttagtgttctatctaaaaatttattgccaaacacccggtacctagattttcctgttgtcttctagaagttttgattttgtactttacatttagtctatgatccatcttgagttagtttttgtgaaatgtgtaagatctgtgtctagaaatctagacacagattaattattaataataataattattattattattattattccgtgtgaaagtctagttctagcatcatttgtttaggaaattatactttcaccattagattacccttgcttctttgtccaagatcagttgactatatttgtgtgaatcaattcagggctctctattctgcttcattgattcatttgtctgtcctttcactaataccatactatcttgatttctgtagttttataataggtcttgaagttgagtggcattagttctctgattttgctcttcttcagtatcattttggctattctggttcttttgccttttgtataaactatagaatctttttgtcaatatccacaaaaataacatgctggaatttagattgggattgtgttaaatttattggtcaagttgggaagaattgacatcttaacaatattgagttgttctatccattaacatgaaatatgtttccatttatgttgatctttttaaatctcttgcatcagagttttgtagtttatctcatatagaccttgtacatatatcattaggtctatacgtaggtatttaaattttttgaaattaatatgaatgatgtgttctcaatttcaaattcttattgctcattgcttgtatgtaagactgcagttgacttgtatattaaccttgtatcttgcaacattgctgtaattgcttattagttccaggattttcttcgttgtggttgattctctgggattttctacataggcaatcacgtattctgtaaacaaagttttaatgtctttttttccagtctgtatattttttatctttttcttatatcagctacaactttcagtatgatattgaaagggaatgttgagaggagacatctttgccttgtttcagatcttagagggaaagcttctagcttcttaccactggtatgatgttagttatagatttttgtagatattcttcatgaaattgaagcagttaccccctattgctagttttgtcagagtttttatcatgaatggatgttggattttgtcaaattctttttttgtatctgttgatacgattttttttttctttagtctcttgacatgatagattacatcaactgattttcaaatgttgaacttgccttgcatacctagaagaatcccactgggtcatacggtataattgttttatgtattgttggattcaatttgctaatattttattgagaatatttttcatctgtgttcatgaggcatagtggtctattgttttcctttcttgtaatgtctttgtctggtttctgtattaggtaaaggctggcatcatagaatgagttgggaaatgttctctctgattctgttttctgaaacaaattttagagaattggtgtcatttgtttcttcgatgtttgatacatttcactattttccattatccattatttattttcttttccacagagaccaaatcaaccaagtctgttttggattgggttaatttttttgttttaatttatttttctttaatacatgtactcttaaactcacaaacatgactataaaacagtccgtgcatgctctccaaaagcaaaattattataagtgattaccacacttgaaatgtacatatattctcttaatgcaatcaatattttccaaaactcaaatttctgaatataaattcatatttgttggctcctttccaaatcattctggatcgtatctttttttaggtctttttctaaaacattattgtgtttttgattaggcaagttgcataaattctcctttttcctcagtttccttttttaacaaaagcattaataatagtacctaacatcctaaagttattatttccattatttgaatgagttaatacatgtagaggatgtagatctatgctgggcatatagtaagtgcttaataaaatttagccattgttaatattaatgctattactctgctaggaagtctctatgtcggtcctctttatcccactctgtatcttgtcctactactgtcacctacagatcaaaatctaaatcccctattttaaagttcaggaccttcaacaacctgacctttatatccattgtaaggtttttgttatctacccacacaaaaatctccttttcaaactgattatttcacttcccccaaacagcttccacatcatatttcctccctcaattgcatcccccagcccaatcactcattaatagtatggcgtgtctttgtatttaaagtatagctttgcaacatttgtcaatctgagctttattaaagtattccccaccaataatacaaacccatgatgtttttagatctggcacagaccttatgagtcacttggcccaaatgaataaaccaagtcctggagaggtcagatggcttatccaagtttatggtgctggaggctatcagactaagatgtcctttcctgcagtgccaaaaaatacaagtgcagtaattacaataatttaattctttggtttttttaatttttaattttgtgttacattccaaataacacattaatcactgtaggtattagaagtagaattttctcctgatttccaagatttatcttattgtgcttatctctaatgtaggaaattttaaagtataaaaagacttttatccacttaaatagatatttctagaatggttgtatgtggctcctattcagtcctttaatagtccccaggaggtaaacgttattcatgagtgactttacttacttcacaaaacagagctgcttcttcagttgaataaagatttttaaatatgacacaggtacagagaaggaagtaaatatctgtataactaattgaaactacagagggaatagaaaaacagaatgttgttattaataatccctctttttatgtggaataaactattcatttgaggaactagaacacagagtagatattgcttcatttaaatttataatattactgtgtagaatgtaagcataatatcaatagcctgacttcatttatgagtttgcaacttaaaaagttagatgctggagaaggaaagaaggatattttctggtcaatttaattgggaaaaaagtgttgagaaaccaaagattgcttgtgagacctgtttaggggttagagaaaattgctcgtgtattaccatgtggtctgtgtcaccaggtagtcgaatccactttcaagttttcaaggttattcattcctgtgagatgtcctagaggagtctatccagtttcttgaggctcttcctaggatccaaattcctaactaaaaactgtataaaggcaaacataacatttatgaggaccattgaaggggaatatggtgcacaaatattctgacgccaaaaagcttgctacaactagaaatagaatgtcagataaaatatacaatttcctaacttcatacttgagtaatggccaaattcttgcaaaatgtggactaatatccacattaaaacttaaagtgccagccactactggatagcaagcaagtttatttcttggaaataatagcaaaaccacaaccaaatcatacctttctgcttatagtatttaaaaaaaaaaaaagcagttttgaaaactaaatctatcctggagaaattccctagagaaagtgcatgacaccattacacatacatacacacacgcacacacacacaccattagtgcccacttattggatgccacatagtcaaagagatagctgatgcaatcctactaacccataatcaaacttgtttaatacacacaacatacacacacacatatacacatacacacacaagacctattcaagatggtttaccaattactgtttcattttaggaagagagattaaaccacaaattgaacatgaggtatgtcttgatatctgttagtattgggcctaattttcttaatatgaatagactgttttgaaatttattgttaatcaaacagttctataaactgaaaagtgtaaaatgccaaactgttgaattgaatcaaagacctcatttcattcaatcaataaattagataaatataagactaatgttcaacaatggattattgtctatcatattcccatgtggctagataagattcaaatttcactgaaaataaaaacagaagaaaatccaccgtttcctttgaggtataaactgctagatttatgggatcaaatattatgtggagggtgaatttatacctccaggatactatcggatccatgcatactctttgaggtacttgtagtagacacataatatcaactaattgaaatcacttttatatatactgtgctcataaatggtgtccaggaaattttggttgaatgttttaacataatgccataataacacttccataagcaatataaaactacttgaagtagaactagttgttactgtgagcatagcttggatttatatagctcaaaacatttgcacatatatctttctaacacctatggtttaaaatcaggagctttggaagctgtatcaacactgttagaggagtgtatttgacatagatgttaatttgtttggaacaaaatatctctgcttatttgatgtaacttaaatagatagaatttttactagcattttaactgtcagcacagttaagtcatttatttgtttctccaattgaaaataagataaagtttgcacaacacaagaacagcaatacgacaaaaatggagaaggaaatctgagtaagagttaaggacaagaaaagggggaaatgttcagtacaaataaaagaagcaaaaaataaaggatggctctgaaattagcttatatttacactgtaaattcataaaggcactctcaattcttcaacttttatcatttcaccaaatgatctgcttatgaaaagcagtcaattgccatgactttattcatgtattacttagtttctgaagcaggacccagtggccagtaagctaaggagaaaaaatgaagcaggactgcagctgttgttaaaaataaaaggtatacaaaattagggtagttactttagttcttccccacctcctcctcatcctgtatctcttcacagatccttctacttgttgatgggtacagaaaggggaacagaagaaaaacttacccagttacaaataaaagatgactagagatttttgctctcctcgctcttgcagttgaaaataatagaaatttagagaaaagagcattctgtcggcttcttgttttcataagaaagctgagatccataaatgatccatcacttaacgcaggctccaagcagcactggggccaggacacagatttcttggctcccagtcccgcaagtatatctctacaagatactggaatgatggcttatggaaataacaatcagtcgagtgaatttgaattgtttacaaagctaaaggtgatgatttatcaaaaaggttaaagaagggatcatttctttcatgagaagatcttttaaaaaatcctctatcatccaaaccagcatctggcaaaaatgtttctaaattctgagaaccccaaaccattagtaactaaatatggaattcatgtttcttatagaaagcacattaggtcaaggtaggtcaaggttatattagaaagtgtatttttatgaatgttaatacgcactttaaagtgcactggagtcctctgtaaaatcactgcatacagtctactctccctcccttccctctgcaaggaaactggagaatgcaacaaccaaggctcagggttgtgattgaggagacttgcaactcagtttcttcctttacagtgaatagttgcatcacctaggttaatctctttactatcaggaaatgaggagattgcttgaaggtactttagctctaaaggtttttgacttggaaaacattaatcttatttcacggaattatttcaattgactgaggaggtttgtcactttcccttttgtccttatgtcattttctttatcatttctgtgttttcttttaaactgagtcttgactcagtattttagtccccagtaatgccattgtgactatggaaaaaatatagcatgctttacaacagttccctgacgatgtggtctgtaagtgaatctttgaggcaaaaacaaaacaaaacagtgtttgcttctcttacttctttgttctaataattatctgtacttacaaatgactcatataatgagtcatttgtaagtacagataattattagacatctctgtaataatcttccaaatcccaaatagaggaatgtctagtttatatttttaatatttggtataatggtcaccacttacagtagatctagcttaagaagcagatagaatctcatcctaagttaagggctctatatttgaccaaaccaaaacacctgtgactggctgagtgcgtgtgaattacaccttccccactgccacactggaccaagtttcatgtcccattctgtaagctagttcctgatgtttttttctctccttcctttttttcatcatgatctaaaacttgtcagtttctattctttctttgataatacttatactacaagttaccaattttttctgtgccacccacaaccaaaatttatttcttttcttcacattcacaagctaccttcattccaatcagagggagaagtgagacattaaatttcttaactgcttcatcagtaatagatcaacattcaggtccataaaaagtggagataaatctatattagaaattcactttacttcttgaatatattctaaaagtcactcacttatttgataggatatatgtaattctagattttacattggggcttgtttttaaataaatattagacatttccaggtagaatataattttaggtacaatattcagaatatagtatatacttaaaaccatgaaaataccaaaaattataacttaaattatctgaatgttcatgacactctgtcacttgacagttacctatttttcagatatttttctgtacatctccttcagggattttagtcataggtatattagccacttgaaattgtcccacagttcattgatactttgttcattttttttcactaccttgtctctctgtttcattttggatagtttctgttgctctgtctttaatttgctaatcttttcttctgtaatgtctaatctgctgttaaatccatctgtatttttcatctcttcaagttcaatatggatctttttatctctttcatgtccctattgaacaccttcagtgtttcttctatgtcttgaatacacagaaatgtagttatagcttttttaatgtctttttctactaattttatcatgtgtcatttctgtgtcagttaatattgattgattttttgctttgccctatgtgttgcattttcctgcttctttacgtgtttggtgatttttcattggatgccagacattgtgaattttaccttgctgggtactggatatttttgtatttatataactactcttgagctttgttttgggaagcagttaagttaagtttgtaatagtttgatcctttgaggccttatttatatttggggggaggagttgcagagcaacctttaatttagggctaatttttccgcactactgatgcaacacccttctgcatactctacccagtactttctcctctcagagcccctcctgttgttccttcactgtccccctccagtggtggggaaggggatggtggtcactctgctgggtgctttctacttccacatgcagttatttcatgtcatctaacacttttttaagactttctggctgggtgctgtggctcatgactgtaatcccagcactttgagaggccaaggagggcagatcgcaaggtcaggagtttgagaccagcctggccaacatggtgaaaccccgtctctactgaaaatgcaaaaattagccaggcatggtggcaggtgcctgtagtcacagctgctcgaggctgaggcaggagaattgcttgaacctgggaggcggaggttgcagtgagctgagatcgcgggcaacagagcgagactttgtctcaaaaaaaaaaaaaaaaaggaagaagaagaagaaggctgggcgcggtggctactcgggaggctgaggcaggagaatggcgtgaacctgggaggcggagtttgcagtgagccgagatggcaccactgcactccagcctgggagacagagcgagactctgtctcaaaaaaaaaaaaaaaaaaaatactccttcttccctttcactctattatttaggggttaaggaaaaacaaattcagtattatttttttgttttggatttttctccaaaaacttcttgaccaaactatgaaatttactactgagaaagataaacttgagagcatagatgacccatgacctgaaccaggtttcttaccaccttcctgaacagcaggtctatgctgtgttgcccccactgccagtgtcttactgcagagtgaaggtgaaagtgactgtaatgagaaaagactgcttcaaaagtgagaagaagggagccaaggtatttgttcacagatcagtttttaattctaaaggggttgatctgtttattacagtaataagaataagaaaaggaaaataattttatttgatttttattccttttttttatatctatcaatgtcccttttagtatactcatgtggctgactgaattatggttataggccagtcctactaggtttttttgtttgtttgtttgtttgtggtttttttttttgtttgtttgttttagatggagttttgctcttgttgcccagcctggagtgcagtggtgggatctcagctcaatgcaacctctgcttccagattcaagtgattcacctgcctcagcctcccaagtagctgggactacaggcgcatgccaccacacccagctaatttttcgtatttttagtagagatggggtttcatcgtgttggccaggctggtcttgaactcctgacctcgggtgatctgcccaccttggcctcccaaagtgctgggattacaggtgtgagccaccatgcctggcctgatcctacaagttttataaaatctgtttaaggggttgatattaaggttatgctgacctcataagaggaatttctgaagagtttaagataggtgttattttttccataaatgcttgttagaattcaccaatgaaaccatctgatctggaattgtgtctacctttcttccttccttttttaataagttcaatttctttaatagacaaaaaaggctgttcagattttctgtttaattttgtgtcaaatttgttggcataaaattgtaatattctcttattggcctttaaatatctataggattaatagtgccacttattcgttcctgataatttgatatactgataatttgtactgtcttttcttccaatcagtttagctaagtttgtcaattctgcagatgttttcaaatgatcaattttcttattttattaacttttccatggtttattttgtatttcattgatttctatttttatctttattgtttcttttcttatactgatttacgtttaatttacccttctttttctagcttcttaaggtaaaacttaagtcattagttttagacaattttatgtttctaatacaagcatctgtatctcttaaatttctttctaaaaaatgtgttagctgcatcccgtaaattttaaaatattaaattttcagtatctttcctttcaaagtatattctaatttcccttgtgatttctttttggacccatggattatttttttaattttaattttttaattttaatttcccaatatttgaggttttcctagatatctaattgttactcatttctaatttaattccatatgaatagagagcatactctgtgtgattttaattctattaaatttattgatacttgttctatgggtgaacatatggtcaatcttgatgaatgtattatgtgcacttgaaaacagtatgcattctgcagatgttgagtataatgttctgtagctatcaattaggtcaaggtggttgagagtgttgttgaaatcatcatctatgtgtctagtcattggcgggggcagggagctagtgttctatcaattgctaaggcaggcattcaaatatttatatgtgattataagattgtctttttaattgctaagagacgttcaaatatccataattgttaagattatctttttttcattatattctgtccgtttttgccttatatattttgaaactcttcttaggtgcatacacatttatgtctgttatattttccagagcagttggcttattttgcattatgaaatatctctttttatctctggcaatatgatcttgaagtctgatattaatatagcccctctagcattctcatgcttactgtattcgtagtatgtatttgttccatccatttgctttcaacttctctttattgttaatgtgtatctcttatagacatcatatagttggagcttccatttttattcattctgacaatctttcttttaattagtgttcagtacattataatgtgatgtaattattaatgtggttagatttaggcctcccatgtctttgctatttgcctcatttttttgagtcatttcttccttttcttcccccttttggactttctgaatagtttttataattccattatcatttatttgtaggcatttcagctatatccctttgccttattattttagtggttgttgtagggattttaatatatataattaactttcacagtctccttagagttaatatcttaccactttatttttattaaatgtagacactttgtaaccatatgtcaatctgtgatatagatttcatatgtattatgtctacataggtaataaaccccataagataatgctataattttttgctctaagtaatcatacatttgttaaagaaattaaaaagaaaaataattatttaatgtatactagatatttactgtttatgttgctcttaattcttccctgaagacccaagctttcatctggtctaatatcccatcagtctgaagaagaactctttatagttcagttctgctaaagataaattctcttagtttttcttatatggaaatattttaatttcaccttccttcttgaaggatattctttattggatataaaattataggttgacagatttctgtagtattttaataccttaaaggcattagtctgctgtcttctgagatctattgactctagtgagaagacagaaatcattcaaatcattgttttgctctgtgtaatatgcttttatgagtttggggtttgtttttgttttctatttggggagaggttttttgttttgttttttcctgcttttaaaatgttccctttgtattgcttttgaactatttgactaggatatgcttatgtggttttcttatacttttccttcttggagtttgcgagattcatgagtctgtagagttgtatctttcactaaatttgggacattttgccattattttttaaactattattttttcccgttttctttctcacattaaaactacagttacccatgtgttgatattatcctactggttattgaggctctgttcatttctcttgagttatttctattagtctattttcacattcattgactttttcctttatcatattcattaaggtgttaagcccatacagggattattttatttcaaaaattataattttcagtttaagaatttccatttgatacccttttataggctatttttcctcttttgtgatttcctatgttttcattcatgaagaatatattttcctttatatcattaagcatagttataatagctgctttaaaatccttggatgctagttctaacatctaagttaattgtcttttctcttaaaaataggtcacattgtctattttctttgtaaattgtatcttggacattgtaagtgttatgttgtggatacgatggattctgatacattcttccagaggaggctgatatttttgttttagcagacaggtacctctattgaactcagactgcaaaccatcatttggaccgtagctcaaatgtcagcactctctctatttatatagagagagagagtgagggaaaacactagaaaggaaagagcttggtagagatggggaaacacatactgtatacaaactcttcataaatccctgaccaaattctgaaccatacaagagcaggactgactggaagcaatctaattaaggatttgtgtgtgtgtgtgtgtgtgtgtgtgtgtgtatatatatgtgtgtgtgtgtgtgtgtatatatatgtgtgtgtgtgtatgtatgtatatgtgtgtgtgtatatatatacgtatatatacatatatacatatatatgtgtatatatacgtatatatatacatatatatacgtatatatacacatatatatatacgtatatatatatatacgtatatatatatgtaacagattttccccttactttccagtggctatgcttgccccaaattatgttttctagttcttcaagtcagacataactgaagctttctattggagtactgacatccacatgcgtataaaatatgttttttttaaaaaggaggaaattcatcttgtgttattcccttcttcatccaagtgttgactctccagactctgcctgcttttattcacatgctaatgccttcaggttgatgattgtttgtcttttgtctgaaatttatagtagttatctgcaagaggtttgctctagtaggagtttattctgccaatccaagtggcactcccattccacaaggtttagtgtgtagggtgatcctagagaatgtggagatttaatgtactctaaatataattttaaaccatgtttaaggggttaccttttgttagtttttgtagtttgtttatttttaaataaactgattcccagaatggccctcagttggagtctcactcaaccccaatgcaacccattatctaaatctaaccaccaccttccaaagaacccactttctcattctaacccaccttctccaatcaactccttgtctttttctcaccctggattctattccaatggcagttcagattgcccctgatcatttagcacagcttctgggtagggccactgataagagcattttcttcttcctggagtgcctaaaactcttagcagctgagttctacagtgctccagtgccacaggagaataccatcacaacagatcgcttcagtcacccattgttcttgagccaccctggtcactgaaagttccagaataaaaatgtcattttattcaaatatttggtctttttaccaccttaaccctaagtgcttatctctattaatatactgctttgaatattaggttgtctaggccaggatagctagagcattattgaggttttcctggcggagaaattgaggtcaagctctttgtaaactcactggagtcaggccctgcctcaaagcaagctgtggctgaatagacaaccagccttgagcagcctcaactccctcaaaacccactcccctgaggaagacaggagattggggcttgaacattcatcactgaatgacttttttgttagtaatttagtaactctgttttcttaagtatgtaatggagactgtaatacacagaacacaactgcttcacaggaatgtaatgtgaattcatgatatgagaatgggaagcattataagttactgagaagacaaatctaaacatgcatgttacttttatttattatttagagagtctttactatataatactttatgaacagaaaagcccatgattcatgccctgccataggtataagaaccagctaatgaaaagtgccattgattttctttttctgtttttttttattcgttaaatttaaaggggaaaagagatacattaaattccaattctaataatagcccccaatggggactaagtggctaagacaatgggaaaaaagacctttcagcagtaggatttgctttgagcctaaatgaagtctgccatgatcgtattatttagtgaaatgaaatcatggaaagaagttgatgacttctggtcagccctcaaagaataagtgtcagatccccaaattatgtccacggtagtaattaagcttcactctctgcagagagccctcagtgacttaagaggcagtgcttttgagaatcccagactatagatttccagttattcaagtaacaaatggatgccttcactgtcttttctactcccttccattggcatagaaagggaccctgaattcagcttttgtgtgttaataggacaccattagaaaacagcaaatttataaaggaaaacaatattcataggaaaaaaaataaaacaagaatttacaaaaggaatattagcaaagaacaataaactacgttgcacatacattttctgaagcaggagctgacacttttaatgaaaacttctgtgacatccttgaggcatttctgaagaaccagagtacttgtaattaattgtattaatcacaaagactaaatttatccttagcttctatagtgtgttaaggatagagatgtttacccaagaagaaagctaacatggcattctcctatgcggatgtaattttcacttgacagagtgagtatttgtgtggtaggtgtttgcttttcatttacccacttagagttttttcatccttttggaaatttattgatttatttcgtggagtgcagagaggaggaaaagaaaaggactatgatttgtgacaagtgtacttcctgagtgaaatacttatttatcctgcccactatgctattctctccatcatctcttatcagttagtctttgtatattataaaccagaaatctaagacctcattaacctcacaatttgtcaacaaattataacagctgtaatttttaaaaatatagacctcagttttccccaatttgacctctaaagaattgcattttgaccactcctatcaaaaatatggagtagggggaaatttgtaatctcttggtataaaaatgacatcctcttttccaccagtattgcagcattggaaagcaggcatgaaaggtttgcactgtggatatctatatcccatcttgccaaaggataaataaagggcattcattcatcagctttcaagctgccaccctcttttctttcccccaacccccacccctccctgaaattgggaggagggagattctgattatttttgcctatttctagcagagctaggcatgaacaattaaatttagggcttccctgtggtctgtgaataacagtgcacagtgctaaccatgagggcacaaggcagaaaacaaaaaaaaaggcttttttattttttgtttacccttcaggacactgtttaccttatcactgaagggaaagttatcatctcatctttttaggaaattgtactgggtttattctctagtttccagtctcaaactgtccagtgatagagtgagtatgtcagcctggggctagaagatttctgtaaggccctgctctctcccccgtctctgtgtgtgtgtgtgtgtgtgtgtgtgtgtgtgtgtgtgtgtgtgtgtgtgtgtgtgtccgtccgtccgtccttcggtctgcctgcctgtctgtctgtctcaggcatttgctgtctctagcacactcccacttcctcgttctctccacgctatctcattcccttttccttgatttttctgtcaaacctttttctttttctgcctttcaaccagaatgattttttcccttttctccctctctaaatttacttcacagcagattgtcttgtagtaaatcaccaaaaacctaaatagcactaaagcattctgatacaacattagcatttgcttaacaagcacaagataaacattaaacaaagaactgcatttctttattagaggctgcaagatacataatccatgagcacaagaaacatgggacccagtggatatgcagatgtgtgttatttcattggcgctgggcggccttgttagaaaaggttttcatctgaaggcttgggggtggatggttgactgtccctggtggggctgtaactagatacagagactgttgcaagctaggctgggctccctggtggacctgctgattggacagcctgaggaaaacttgggaagcatcgggaagtgaactcaatcaccttggggatgatagggtagagccagatgaaggcatttgacttcttttgtaactcccactaaggacagattgccagtgcgatccagcctccataactgcaaatcaggccctttccccatgccgatttcattagaatggccagcatggtgcaaagaggaaaaaaaaaaaaaggttagacacagtaattttacaggcaggcgggtacaaaaaaaatctgcataattaagcagtcaaggctgctaataggggagtttatatgctctgggaccaggcaagggcagcacatatggatatagcactggatattaaatctacggcatgcagacttacttcagggccctcagagaaaaggctaattatagagagaggaattgtgtttactggtctgtcttgggcaaagatggtgaaagaagtgcaaccaagttttgcagttannnnnnnnnnnnnnnnnnnnnnnnnnnnnnnnnnnnnnnnnnnnnnnnnnnnnnnnnnnnnnnnnnnnnnnnnnnnnnnnnnnnnnnnnnnnnnnnnnnnnnnnnnnnnnnnnnnnnnnnnnnnnnnnnnnnnnnnnnnnnnnnnnnnnnnnnnnnnnnnnnnnnnnnnnnnnnnnnnnnnnnnnnnnnnnnnnnnnttagcagtttagctagccctgtttaaaaatgtcagtgcttctgggcatgagctcagagtcagcacttaaatataaatggtgaatttgagtggaagttgtagtgggcaggggtacgcctttctagaaagggtgtgtttctggaaggggccctgatgggatgaacattaacatttcataatgcagatcaaaggtaaagagaaaacccaaaggcccctttgtcacgggcccctagcgactgcctcatacatgagctgagatgatatctggatattattaaagagattcatttcatatttgtatgtatgtatgcagatatgtatgcatgcacttatttatttatttaactccatacaaagaacattttctgaagaggacaggagagtaggccatttgccccaggctgaatgtgccaaagcatgcctggttgtttcagaggactggagcctcctgcagatttggtttccagagaagcagtctggaccctttgtcctttagggaagcttcccacggaaaacagcagccctctcctcatagtgatctgcggctgtgggcacaggccatttgtgagcttgttgtgcattccattactccgccacgccgaggagggccagagaagaatcccactgcctcgtctcaagatgcagtaaaacctcgggcttatgaaagtaaacagcatctgatcagccagatactgggtcaggcttgcctgacatctgtgctcttcttagaggcagggaattcagtgctaatgagaagactcgagcctgtgccttggaaattgagagttgcaaaggctaatgaatgggcagtttagccccttaaaaagaaggaaagcatcacattggcacacagggtgttgtgcacctcttccttgtctgcacattgttcactgactgaccaggggtgtcagctttacttgagaacagctggtcagatattatgtagcagttggcaaagagggtaaagttcttgagagactagtatgatgcaaacacccaacgcagatatttcatactgaatttttaaaatgtatttttccctagtaactattaagttaattgagcctttaaaatcacatgagtcctcagaattttcgttaaacacaatgacttctaatatcgtctggtttctagaggttacaatgaggtagcactctaaagaaattgtgattgcccatagattagtaaggacagtgtgggacaagtggaatgcagtagcattgaagtgcttattcagaccattcttttaatctcattcttaaaatgtaaaataaagaaaactttgcagggaaggccaagtagaggtcagcacctggaaaatggtagcagccaaatgtagactgcctagggaggaagctgggcaccgtttttctgcttgtcgagaaaatagaacactagcaggcagtaaggaggccctgctaaataaaaggaaaataggccaggtgtggtggctcacgcctgtaattccagcacttcgggaggctgaggagggtggaacacttaaggccaggagttcgagaccagcctggccaacatggtgaaaccccatctctactaaaaatacaaaaattagccaggcgtggtggtgggtgcctgtagtcccagctactctgtaggctgaggtaggagaatcacttgaacctgggaggtggaggaggttgtagtgagctaagattgtaccctgcactccagcctgggtgacagagcaagactctctctcaaaaaaaaaggagggggaaatgttattttttagatagaaataaatacaggagacagtgcttctatatttgaaacacacaattttttttttttttacttttgggctagtcaaaagtaagatagctgggcaagaagcctgtcacaagtaaaggaatggtgtgaatttgaaaagatctctttgacgacatattgaattatttgaggatacaaagaagaatcaaccatgtgcttctacctcgttcatgggtggacttgaaatcccttataaccctgcggcttcaccaaagctgtctcttccctccctctctcattctctccctctttttctttcttttttggtctcctgccttccattcattcagtcaacaacaacaaaaaccatataaaacaaaaccccacacttttgggattttggatcaggcaggatgcaagggggcaggcaggacccaaggcgcaggcccacctctcctcacctcctcagtcccgctgatagcattctgctgagcggactcggtgtttcagcccttacagccattgcctcagttttacctcccagatcctgcaagacccaccactgctttggggcagctgacagaactgactgtagatgggaaacccactttgataaaactctgctgtctcctgtctttctcctgtctaaacacactcctggaagcagggtccctttctgccccacagcctatggcttcttctcccttttcttccttctctgtttttcctatatggaggagaagaggaagaatatagaagaagaaaatcaatataagaattataaagattaaaaacacttggtatagttcaaactaaatacaaaacagctttggcacagcagaagaaataatcagcaggataaacagacaatcttcagaatgggagaaaatgtttgcaaattgtgccgccaacagaggactgatatccagattccacaatgatctcaaacagcacaacaagaaaaaaacaaacaattccattaaaaagtgggcaaaggacatgagcagacattcctcaaaagaaagacatacaagtggccaggaaacatgcaaaaatgctcaacatcactaatcatcagagaaatgcaaactaaaaccacaatgaggtatcatcttacaccagtcagaacggtattattaaaaagtcaaaaagcaacatatgttgtcaaggatgcagagaaaagggaacacttatatactgttggtgagaatgtaaattagtacaacctctatgaaaaacagttgggagatttctcaaataattaaaaataaaactaccattccacccagcaatcccactactgggcttctacccaaaggagaagaaatcatataaaaagacacctgcgtacctgtgttattgcagcactagtcacagtggcaaagcaatggaatcaacctaaatgcccatcaatggatgattggataaagaaaatgaagtacatttataccatggaatactatgcagccataaaaaagaatgaagtcgtgtcctttgcagcaacatggatagagctggagaccattatcctaagtgaactaactcagaaaatcaaattaccacatattctcacttataagtgggaactaaacaatggatacacatggacataaagatggaaataatagaaactgggaactccaaagtgggggagggttgggggcgtgagggttaaaaaaatacctattgagtacagtgttcactatttgggtgatgggtacactgaacggacgtccagatctcaccattatgcaatatattcatgtaacaaacctgcacatgtaccctctgaatctaaaatttaaaaattaaattaaaatcaaataaattaatttttaaaatctagccaggtgcagtggctcacacctgtaatcccagcactttgggaggctgaggtgggtggatcacttgaggtcaggagtttgagaccatcctggccactatggcgaaaccccatctctactaaaaatataaaaattagctgggcatggtgacacaacgcctgtagtctcagctactcaggaggctgaggcaggagaatcacttgaaccagggaggcggagatggcagtgagccaagatcgagccactgcactccaacctgggcaacagagtgagactctgtctcagaaaaagaaatatcaaatttctaaccatagctctattgtatttggtaactggaaattccccctgcttatttttttcatagtttgcagctatgggaaacaggttttaaaatggaataagaactatgaattccaatatctattattactaacattgccaaaatgataaaacactaaaatggtaattgtaaaagcagtaaaaagataagacataaacgtgaaaaaaaagaaaaacttataccatatatgttacatcttcaaagttgtttgtgtaaccccaaaaacaacttttaaaattatatatctcctcatgcttttaatttggcacctataaaaattttttaatcataaattaagtcattgaaaaaatgcaattttcagtgcactgtatattgcatatactttaagtatatttttatcattaacatttatctcattcaattggatgagatacttgccatgtaatttaaaggacaaagccagtcttcactgtcaaagtcataagccaaaacaaacttacacttaatgtcagaaaaagtctgactttgacttgaaaatgaaagtgttaatatgcattcctgtgacaataatctcacttctaaattctagctctaagagagatggagaaggcacaagccttgtgagtctcccacctggatgaaaaaggcactgccctcttcagcatgttgtaccatgacaaattttgctttcacccttgcggatctattccacagcaggtatccagtttttgaatcccccagaagatttttgcagcccaggacaaaacatgagtaagattgagaaagggcaggaagtactcccacattttgtacaataggacaaggttaagtataaggagaggcgagataggggaaccagcagaccacaggctgcttgcaggcagatcagttttaggaaagagtccatgtggagttttaacactgaaaatcagttccctctgaattattaccgcagtctgcatacttctttgaaagcctctatgtacactcaggttgtgcattcacagtttagtggtacacatagctgccttccatgtatacccagcttgaagactcttggagtattctaaatattatttaaaaactcaaagaaaatatttacaaggatgaatatgataacttccatttctgattatataaatgactagatattcagagaaagtcttccagtatagatctaaaaattatgcatcaaaactgtttaatcttttaaaataactggctgaagtgttgggaaaacagagtaagatctgtatcctagataataagaaggtaaaaatgctgagtgttaaaagatatttcaacaaaggaacaaacatttgtttcattcttaataacaagaataactcacatttactgagtagttaccataggccaagtattatgctagatactttatatatgttattttgattgagtctcacttctacagtcccacgacataggtacttgatattcccgtttaatagatgatttgacgaaggcaaggataaataacctatgtgaaatggctcagcttgttagtggcagggttgggcatcccacccgctaagtgatcccaaagcctttgttttttgaacctctccaccatgtcgcatgggaagaaaggctttggggatgatgcctgtgctgatttctataaatactgtctcttctgtacactatagtgtaagttactttacatctgtagtagaggtctgtgtttgctaacataccaggcctagtacatgccttgtataccaagaatttccctcccactgtggaagcaacttttgtgacagtagaaaagatgacagattataaaactggactcactagtaatgatctgcttactaaccaagctcaaaccctatgttaaaataagaggattttaaaatatatatattttaaaagatgtagtgggtgactattcagtatctgagcattcatcagaaattaatatttaagcaacacacaagcaggcttaattgcattcgtgacctgctttcttatatattggggagggtggagatgaaaatggagaacacacagtagaagcattttactgccagagtagaactttacaatcgcaccaggggaccttttggtaatgttggtaatgtgctgctattgtgatttaggaaagaaaaatgctactgctgggctttattttcaacggatttttttttaaacatcaattaatgcaatcaaatgtagtacagggaaatctaactttttatttacatttctgggggccgggagggtttgtttgtttttgttaaccccaatcatttgagctgtacagtatatggttttcctggtattttccaaatcaactcagtaagtgatatttagcagtatatgtgaaactctccacatgaggaagagaaaacaaccttgtaacgggtaccatttgttgggaaacaaatgattctgtcttgtttcatacagtttgaaaataatgacattttggattttcaaacagtttgttaataaaatgaatcatatcagttttctcacccataagagcaaaattgaaataggttatttcttcatgaattagtcagattttttaatgccaagttttaaattaaatcttgataaattcagaaacaacaacaacaacaacaaaacgaataccacatttttggccttaatgaaaccttaaaagggccctaaaataaaccatcaaaataaccagaaaggcccaagctgaaagtatatttttctaattttctctttattgctgttcactgccttaactaaacatacgttatcaacacaagtagatggatgatctcctatcttcctgggcatagggacccagtaaactaagcatcatacacgatttaactaaaaatttgctccgatactgaaatttagttgttttcttttctctaatctggaatctaaatccatatttgagccaggctctcagtaactacccatatcacttcaagcaaatcagtaaagctcttcctaggacttgagttacctggagaaatttgtgttattgagcagattaattgagaatggatgtatataaacccacacccacacattttgaaaattgtaaagggctatataaatacagtagttattatatttataatcatcctcagagataaggggaggagaatgtaccattgttataatcttagcaacaataagagtctcatttttatggggccttcgacatgcccatgagtttgacttgtgtagacacttccttcaacatcttgtgcttaaaagtcaagttggcctaagcacaaagtctgatattttgcagaagatgagatcatatttagacctactcgggtgaattaaggccatagtgattactttgatttggaatttccctgctgttatcagtttaagatagaatttctaatattcatttcaaaagagagatgcctagattctaggtcctgtgtgtcactggttgcattcttccccttcctctcgatgttccctttggagacgtgtctagctgaattgtgagtatctggtagaggaagaagaagattcagactgaactacatgagccagaatgccagtctgtctcttcatcaatcccatgctgtcctattgagagagcaatagttatgtctaattctttgagaattattttatttttaattctttaaaatagcccagggcaaaatttaattaagaaaacatctcttcccgtcccagagaaaaaaaattattttgcctgggcatttttctctaaatataagtatctatgcatgctgaattattgcaattggctgaaaatatgctgaaattatgtattcacttttttattttctgcacattcataccatgctaatctctatttacccactcttgtttcaatttctgaactgtcttttctcctgtattctgagatgagaacttttgttactggttcagatcagaccctacgtctcctgttttacgcaacaattacagttccacaaaattatataaaggtattcgcttttctccagattgtcaaatttaaaaatcctcatgctaatctttgtctttaaggaaccaaacattgctactgctttccagaagcaaagaaaagggcaagaggccaggtcatccctataggtcactttctgtcctggacttttatgatttctttaccaagaatgaaaccaataagtgagctaaatatgacttgctttcagaaaggaaataaactttacagtccttggcatcagacttctacttagattgtttaagacagcattggaattctgtgcttattgtatcacatatcatgcaaggcaaaacagagcctttaaatatataaaatgttttaaggccattgacagatattttagtgagattatgtcagtagatttccttttgtgttaggagagtcattatcagcctttatattgacatagtatacaatttttaaattttttaagtggatcttgaatgagctggttcaggttatagaaaaattgtcataaagataggggattaaaaatttattgtgccccagacatatttataatttggcattatagacttagaaatatttaatagctttaaagaaggtaatataaggaattatcatcggagaaagagcactccataactattatgtctcattctttatttaacagatagacttattaactaatccatggtttttgttgggccctttttcatagtctttagctttggtttttgacatagcaaaaatacccagagacatctacttcttcatcacacttcataactaagtagaaatgagaaagaaatctttcttaccacgagtcttttgtctttccttcctcccttcctccctcccttccttatttcctccttccctccctccctccctcccttcctctcacccttctttcttccctcccttactccttctctcttcccatcacagaggataacaactgtctcacttagatagctcttgattgacagaaaacagcagaaggaactagaaatgagtatgattcattgatatgccagtaacatcttggcttcagcatacagtgtctagatgtgctagtgtatccagaatggtgcccaagagagaaaagtaggttaggaatatattgagctgacctattttccatacgtaagtatggggttatgtttctagtaagccacacactttgggttatgcatgcagtctcggtttcttctcaaacactcaatttaacactatatcggggaatgatccaggtacttgaagaagtacagttagctataggcagaatagaattaagaaatcagtgtttgtttttgagtaattataactccataaaggagcactcaagcccagcctccacagggttttgggtaacagtttaagcaaatcattgggttattgtcatacagagcatcagcgttcagccactccatcacaggttgtataatcgggaagatttccttcagactgacagctcagacccaagtgctttacctagcccctctaggagcaccatctagggagataaaattccccatatctagagatatctctatctctagatatgggaaatttaacttcctataaccaaattttccagccttccaacaggtgcatcacatcaacttaggcttcccttccctaaaaggagaagaaaagctttcaaggggtgagagagactttaacagtagctgcttaagacatagggggatgaggtggatttgaataaattcaggccttgatttgtcagggagcaaaggcgtcaccaggttggcatggaaatagaaatagctccttgcacatcaataagagatctagaaaacagtaactgctgttttgtttccttgacaacttacattgtactaagggaggaaataacttcttttttaagtgaaggttggtgggacagtataatcttggattcgggaagcctgaattctggtgctggccatgaccataaggcttttctgtcatgggtgtgttggttaatatctatagtctcaggccatgcatggcagcacacacctgtagtcctggctattcaagaaggattgcctgagccgaggagcttgaggctgcagggagctatgagcacatatactgtactctagcctgggcaacagagcaaagacccctttactctaaaaaataaaaataaaaactatatatatatatagtctcaattttctcatcttttaaaaaagtccttagttagagcatctccaagctccttctaaattttatccagtgctccagtgttcagccaaatgtaccatgttgactctttccctttcttttttcctccactctcctcgttgcttgcttctcctcaattttacatgaaaatctttgaaaatacttaagccaaaaaatacagttttgtgaggtatttattagaatgtcttttaatttaaaaaattatcttttaatttaaaaaaaatgccaaatagtagccagccaattcttgtgtgccttcccagtcgtgtgtcccatatcacatttcagatttctctgagcattaggagtgttatttgtttttggagggatattaattgctttatagtagttttaggccatcgtctatttttcttcaaacataaaagctttatccaaaatatagtctggaagaagacactacatggattcatgtgctgtacatttatttttcttttaagtgtatcattgctgtattttcctttgctgatatattttgacaccttatagttgtaacctgctgttctctttaattgcttattgttattaattatatagtggtaacgtagttggctgcttgagccacttggctgtaaagaaattcatttatcattattgctgttggagctacagaaaattaccagcattctatccagagatgaatgttgttgagttcacatccagtaaaattttgaacatgggtcaaatctgtaagtgttttctccctactgcttccctttgcttctgctagtctgtgctttgagtacctacattttctttcatcttttgtttcagtccttgatttgctgccctttcagtgaagtttacatattgttctcagcactccattcagtggcctgtccaaagaataccttttcttttctcctcatattcctgactataaattttccttcctagaatttatttatagtaagattcctgcctttacaactttgttacatgcacatttcattttaaatcattaatgctgactggagattgccttaagccatgcctttctgtgaaaggggtcatcatgcccttaaaaacatctacaaaccccttctcctcattctgtaaatgatcagctgtacagctgtccgttgggatatgcaggggattgattctaggatacccacttccatgcatgcacaagtccctcagtatatgtggaacccctatatgcaggtttcacatcccgtgagtactatattttcagtccacatttggttgaaaaaaatctgcaggtaagtggacccacacagttctaaccatgttgttctagggccaactgtatttagattcctaaattggaaaactgccagcatactgaatgactgaatgaaagaatgaatgatgtacacatgcaaacatgggggcgtttatttacacacatccagctatttactgatatctgtagtttctttaaaatctgggtttaatttagaatacatgaccccacagctgcatgtgccacagaacagccaggccagaatgctcctctgccttctggcagcatgacattaaattcacactagttaagccaacttaaattgagcctccttgaaccttcctaaataaaactagtggccttaattacaatcaggcaatttaaaggttatggagctctaactagtactgcagtatatcactttaataatgcacaggcaaatttctctaaggggtggcatcgtttgattagaagaattcaagtttcacagcacatttccaataaactgtttttagaaatcttattgcgtttattgtgccattaccttttttttttttaattcttcaaggccaagtttctaaggtcacaccaatagaacaataaaaatgtgactcatttgcaaatagcatgcagtattgtgatttttgcattgctgcttaatggttttcttaccattgccacaaagtgaaaggagcaggattgagccccttggaaattagagagattttggcccccttaacacccccatgtgccattgcagatatgacgtgtgcttttgtggtgaactgtgattctattaataaacagaatcagaaggagagaagatgtcatctttgcaataagtaatcaataatatagtttcttagaaagaaaattagctttgaaaatgcttgacttagtttctcatctaaacctgtgagcacttaaaacccatggttgtcaaggaccataacatttgcagaagctgttgaacctcactcaatttcttgtgtttgtttgatttgcttttgttgtttaaaaaatcatcagcagtagcaagccgtgctttctagcaaggataaacagcttttcagtgtttggagactttctccttcagataactagtggctttatgccaagaagaagaagattaaaaaaaaaaaaaaagaaagaaagaaaaaaagaaaaggccctgacccttgccataaactcagcacagcaacaggaaaacatgcctgatgagtgccgtgtccagcacatggcttgtgttgcgggccccccgctgtgtggaattaatattgactcttgcactgtctcagttctcaaagatgttttcccaatagatttaactttaaagcaggttacatttagtttatgctgcatgaactatcctctttcgatcttaccaatttgtgggggttttgtacagtactcaaaggtaaatatacctgtacttccactactgccggaagtcccagatgtaagggcattaatagaaggtatttgatatcaaacaagagaaattttaaacaaagagtataataaatgcatatacatctggtttagccaattaattaaaagaatggagctttgtaacatgagaatacagacaattaataaaaattgtttattggtcatggatgtacggtatagagacttctctatgacttgggacaaataaaaggtaattatcccttctttgatatggcactttttggtatttcagatataagatacataataatatttttcttctggaaataagggataagttttggcttatcagtttcttgccagggataagttggcaaattagacagctactttgttaatgctttatttgccagagtattttcatcttattttgggaaataaagaagccaagcactgtaaggtggattttgccagtccgctatgttatatgcacagggtttaatgcacaagggaacggagcaaaattttgaaacccaactgacaaacaatagatattgttttaccatcagtcttggcattttattctgatgaaattaaatatagggtttgctaagtagttatttcccatgaattcaataaatatttattgagttccagctatgagccatgtactgttctaggtacttcgtgtacatcaatgagcaaaacagacaaatacccttgccctcctggaacttgcactgtagcaagaataggtgaataaccccaaactgagttctcaacactcttatggcattgagatggtcagagctgccacacaccactctttgtaggcaaggcaaaaactgaaatgcgttgctgaattggaaacactgctgtcttcaatcattccattcatctagtctgttatgtgaaatggaaacaaatgttttatacttgtatttgcgtgctcacaaactttctttcaagtcagagaacagaacagcactaaagattaggtgacaaaaattttttgaaagaaaaaatgtactctcctgtattcaagtgggtataaatgagggggagaattgactgttcaagtaaactggatccttttcagtgcaacacagtggcactgtgttaacaacatccaagttgtttaaaagcaactccaatatctaatcaaacctggaggacatacatcagacttagttggtctcagtcctcactcccgtccttatccctgcccttgccttttccagaatatttgctaagaaatatccactactttcttcttttcttggctaacaatttttttcttgggatggggagaggaagaatcaaagtgattttatcagtgcccttccaaaactggtgtttgcagtttttttttaataaaaaaaaaatgagggcaaagttttacctttaaagctatttgtaggcaccatgttttctctgagacttcaaccatggggtccatgtttagattcagaatgtgaagaagaaaagaaggaactagaggagctaatgtactggccaggtttgaaaaacattgtagtctgtgtgcttatccccattccctacttgtgccaaaataccactgctgagtcccctcagttgaaggaaagccacctttttggtgggctgtttgttttactgtttattgtttgaacaacattccaatgttttctcctacatgagaatattctaataagtacttcacacaacctataataatagccaaggaattggacgatattgcatctcagagcatctaaaatcccactgcctgcctctcctctccctacccacctggacctcctgctagtttccaagctgctgatgtttatggggctctaggcagcccccgggctctttaaaatctgctgggtaccatgcagcctaccccagttgaatcatttcctgctccagccctgctgataatgagaagttcaaggcaggaaataacagtggcaatatcagtggctttgcttataaagtccaaaagcattgtagcctttagaccattggctaaaaacagccagtaactaagttaaggtaagcttgcacctgtagatctcctggaagtgagattctgactgaggcacacaggatgtgtatcctgcggctcttgagatacctaagggttaggcactttgtgcacacagtcagggtccaggaacctggagctcatttcctcatgtcccagtgtccttttcctcttattgtaagagtctcatgcctgtgtcttctgttcctctctcatgtggcgtagaaatactgacagtgccagacactcccatattgccagtgacaaaactcctagaaggtgctagcgtcggtcttcaggctgcattcattttcatggcaactcgttcaaaaaaaataagggcagaactttttaactggtatgagaaaaaacgttcccacaatatgcaattctctcaaattctgccttactttgggggcttaatgactaatctaccggcagactttgaagcctaagtcatattctccattgccaaattagcaccacagtgtgtttatgttacagtcatgaaacatgtgctgtatataatacaacaaattatcgtggctgagtgctatggccctggaaagaatgtgatggctgtgtgcatggcaaattatactgcagtctgcctatttttctactcctggtttctagggcgagccaatgtagccgaggggtgagttttgtcatgtatggcttttctttgttactcctcggacccctagcttataaatgtgtgcttggaaattaactcaaggaagaggagaagcaaagtaaagggtgggaggttgggaattgggttagggcatagttttcttagatttaaaaatatatatgaggatacagtggtaacacacattcgaactggataagttacaactgtagggcatttgattcctctgtttggattctgagggcagagtttactcccactcagatcagagcttttaagtatggccccggccacatggtgatatagcaggaggggtttctatctgtggactttagcctatagatttatgcagtggaagaggctggaggacccttctggccagtcttgagggtaaaagggagaaggagttctacttataaactgttacaaattggccctcagtaatggctgtagcgttgatcagacgatataagggggcccccagtgattcctgggataacagcagcatgtaagtcagccactgaacatttgcttgtagccactctagatttttgtttttattgaaggaaaaggagtataaacatgggacacacagtctggaggctgcttaaagggtttctcttgtttaaagcttatattgaaatgtcagtgtcttgtgttaaactaccaattgccaccttggagctcataatttaaacctgtgcttgagcatccaaatggtaactaatatttctcctgttataaaacaggctaataaatagttatgtaggtccaggttttataaattggaggtatagaagttgtcattcatctttgaactggctttagacaagcagatggttttcttagagcacaaaattttgtaagtgattagcacgtttcctactaagtcagtgaggttgtagtccaattatgtatgcagacgctttcctttgaaacatttaatattggagtaaatatttacattagcatcagtctcttttatgtagacttgattcctgtttacatttatgttcacagttaaatgaagattaacaaatggaaataattattttagatgaaatttctatacatgtgaaatgatttcttaattatactcaaagcagctttggtcatgcctttccagtgggtgaccaagacaggaagttgctggcttccagcatgttctcaatggtaaaggccccactctgacactggacccccattgctaggcacatatacctccctcagtatccaacagagaggggtattctgtgtgttctggaaagatacaggctcatacagaaagctccatgtttgctcatatagctaaattgcattctgatagttctttctccctttccttgtgctaatttttgtttttgtacatacgtggctagaatacttttaagtttaattgggcaaaactagagtttttctagacttcataatattgctcatttcctatctaattttttagctagcaaaatttcagtgttgtaatcagtcttcattaatagggtttagaaaaggtaggtttttccctctctctttcaatttcaaagtaccctacaaggcaaattgtgctcattgtagaaaatctggagaatatagataagcaaaaaggagaagaaaaatctagaagtttcgttcgaagatcccatctataattcttaattaaaaaatagggctgtactagcctattatatccttaatggaatattgtaatggttattaaatcaattgactctgaatctctttttaataaatgagtcaggctgtattatccaattactgtcagctgctacctttccagagagcagaattggttattttgattgaattttttaagctttttggcacctttaggaagaggaggaggaaagacacaattcaggttatgctttgtgggcaaaatcctgaatagaggtgctgatagtatcccatcaagaacattggctttaaaaataaaacagcagttacatttactgttctttactaccttataccagataggggaaagaaaggagagttttgaaaagagatggggtttaactcagccagatcccccccacccaattctaagggttttcaagaattctttgaaaagtcagacatggctctcagccatacaaaggtaaatatggaattagaagagaagagttaaagactctgaataaggataaacttttgaaattcttactataaataagtttcattttcttttactacctgtgctgccctcaattaaaaaaaaatacaaaatgaattatattaaccagttgttagaatgttttgtgttactatctctctttctcattatacatttgaccttgaggtaataagcaagtgtgaagatgggggaagggagtagggaaatgaacaaaggtgagagaaaaggagggactctaaatgtccacctaagagcttattggcttttgctcatcttataatgtgctgtgtaacaattcatatatattttctctcctatggaaataactaggagatcagtaactaggaaagacctcacagtgtaacttaaaaataaaaggcaggtagaacttccaactttttttttaacattataacgtgcttttaagctgtaaaaagagttctgaaaatggtagatgtgattgttatcattgctgtcacttagcgctttcacaaataaaagatagaatatgtagaaaataagtcttccctaataatgcataaatacctttatgcctgtgtgtcacctttttatgaattcacttgactgaatttggattatttaacattttgggatgcaacttctcttttctttgggtaagaaatacataaaaatgaatgagtacattttccctgcactcatacacatatgtcttatttatttttccttctcttatttttccaaacaaaatactcatagtcaagaaagataatattacattacagaacatcctaatgtgcataattcactttatgctcatgtgacagtcaattgttatccccaggaaaacctgccagatctattacatcacacctattgcaagttttaaaattctggaacaagtgtatatcagttcatatccataggccatctcttggttcttgtgcaaagcacacataattttaaaaggagatgaaaacccgtagtaaccttcttactattcaaaataaaggtatgtagcattaaggaaatagagaacttttaaagttagcaagtatttttctgaagatgcacttgccaatccaatttcttacaataaatagtgttttttatatttcttaatgtctaaaatctggaaattttttggtgacttcaggattttaaaaaaaggaaacagatgaaaaaacccttgatcttatataatccctaaagctttttgtataaccccttgtcatgtcagtatgcacaattaaactccctcttacataattataatcaaggaatttactgtgccacccagatacagagtaggtttttatctcttgtgaaatgtagacagtactgggtggcttaattagtgctttgcttctctttttacaaattccaatcctctgcttctaaagactcatacttgtatgggaagaaagattaggaatacaaatagagtgattttactcacagttagctaataattactcactttgtaattgggacgtggtattaccagtaatatcagctggcagaggacttacacatgcatgttgtctttgaatgaaagaaaataactgcagtgtagacttgttacccttgtagtgtgacggtgtctttcattccctagacctagaatgtcttagtagcattttttaatcattgctaataggagaatataaaagtgtaatgtgataacaagccaggttaaagtgcagcctctaccctttagtaagtagtcttggaagtagtgggtgtgtgccccaccatatctattaagatatgtcccctgaggccagagtgcccaggtttgaatctagactgcctgcgttcaagttctggctcttccaattatgagtgcttgtgactcagagcaaagttacttaaactctctgcgcctcatttttctcatctgtaaaatgagactaatagtagtttttctcatagggttttagtgcaattaaatgaatttgtgtctctgagcagttctgaaacacagcaaacactaaatcagtgtcagctaggctgctagctctagtgcccctggttttttataccttacaattgcacaatgaaataagttaggataatccttacattttaaacttcaattttaaattttaattttaaatgtttaaaatccataaatgtttaaaataacagtgtctatgtataacacaaactctccactttatatagcaatgttatgacatcaaaatatttttctgccccctcattcttaagatatccaagaaaaattcagggctagtcaagtgagcctggaggtcacaaaagtgctttggagaaacagaagcagagtctggttctgggggtaaaattgaaactgtcttccagagttaagggagagatgaactaggaagaatatgggagactggaggtgcgaagcagagaaaagggcatttgtaagagactgtcctattaatgatacttcaaaattgccagaaattcttggaaatagaaaaagatagtctgtatcaactgaataccactgaagacctatggttagaaatagacacttccaggaccctctggataagccagagtagaatcactgaggaagaagctgtccacacttttttattttagggctttggaaatacagaccccagaaaatcatggtaatgagagaaaaggaaatgcctcattattgatacaccaattatattttaaaagtgtaataaaatgcattagccttaagataaaatctgacttctgattatctttggattttaaattccagaactgttttaaattgatataaactcatgaataatgtgaaataaccagaaaccatatataatactacatatgtatattaggtgatggaaatagtttaatatatgcaattaaagataactctctagtgtattaaagatatgacaggttttcatcatttctcttcatgtgttttccttgacagatgaaggactgaaccatgaatgcaaactctgcagccagacctttgactctcctgccaaactccagtgccacctgatagagcacagcttcgaagggatgggaggcaccttcaagtgtccagtctgctttacaggtgggaagattatttcaggannnnnnnnnnnnnnnnnnnnnnnnnnnnnnnnnnnnnnnnnnnnnnnnnnnnnnnnnnnttcaatttggggggaagatgtttgatttctgctttattagcattattgattgcagcctacttaaaggctcacatgagcaggaaggttaactgtcaggatgaacaaaggcatttcaagttctctcagaagtttgcacttttccatttggaaaactacatacatgttgtgttcacttttttttttctctcgatgttaaaggttaccaagggtaaggctgcctgcacagagctgctttttaatcacaagatgttcaactaaaagtgcagccgtgttgtcagcgcatgtctgctacttaaacatggagaatttcataacattctccaccagaaatacaaagatagtattaaaactcaccccaaattctctgacatggaaaacagattagatgaggcatttactgcctatgaaattggatttttagagtagaagttgatctacacttatacttttaagaagaaattttttaacagatacgatagcattgcagattttagcagaaaaaaaaaagtaaatctgaaactctcatttgaagcccatggaggttgaaatatgatcacacatatttgtggtattcccctaacaatgacaaagttattttggaaaatcctttgtgattattttgcatgtgttttggactcagtggttaagcccctcaagcaatgcctttttatttgttggaggagggagaatatatccttctctcaaggatgacttctttgtttgcagagcaaaattccaagcattgattatttaccttcactgaactgagcctatagatttctattctgtgataaagaggggccatgttcattgcacagctagcacaattactaactgagtacgttgatggctctgccttcaacagttgcctgtttggctccttcattcaataattccatcagccactctccatccttcttttggaactctttttattcttccaggtttatacttaaaaatatatactgctatggtttaccatcagtagtatatatcctaacatacaacgagtcaagagtctaggttctttataaaagctcataagtcttcataaaggaggactgggtcataggtcacctcacgattaagacccctaataaaataggtctttcatgttgtagccagaagcctcataaaatgtactgagttatatgcagattagctgcaaatctatgtaaaaacctcatttcttcttgttgatacggataaagagacaaaaatgcattaatcgtgcacagtctgcattttctgtgcagacagacgtgaattgttttagcgtatcttgaagtaatttagaaataacaatttttaaaaaatgcttccaatataaagtgtgttaggtgggaaaggaaatctgagcagttttttaaggtaatgagaaatgtgattaaaatgtatgactcacaagaacaatattctaatattttaggttggctggcaattagaataattttaatgattagagtggagtcaaagtcaaatgccaacatctttaataaatcctttccctgcctatacagattaatattgtagatgcaaacttttttaggtcacagtgcaccaggcatccatcagaagtcagttctgccaacccaaacactgcctctggcatatacaatttaattattaatagcgtgtctcctaggtaaactgttacacagtcttagggccttgttttgtagtcattaaaattgaacatgtttatattattgaaacccttgcattcagtgtgtaggctgagttgatcttaaagtatccaaagagaatttacctgccgttctgtttcacatttatagacagtgccccagagtagctgtgggatatgatttttagcattaacacatttaaatagagaactgtttgctagctataactttaggcaaacacaataaacagggttttggcatctatgatttcttaacctgtgggttgctgagaaataggagtcatttctgttgagacagagctatgcatttgacagttttcggctttattttttaaagatttatagggagcagggcctccataaacctttactttggagctgtttgggttgaattaggtgctccgtagagtgcatcttaacaaaagccagagacccaaccatgagcaaatgtgactcagctctccccaggtctcaggcagtaagtcacacctgggaggcgtgctgtccggcctgctgtctgttcatgcagagtcatcgactgagggcatttcggaaacaaaataacccaagttcatcattcttttatcatttcagtatttgttcaagcaaacaagttgcagcagcatattttctctgcccatggacaagaagacaagatctatgactgtacacaatgtccacagaagtttttcttccaaacagagctgcaggtaatgtcctcatggggaggactgggattgaactcagttgctattcttatagtaaacaggggcattttaaatctggattcacagtatcactcaccctgggccaccatgatgctttgtgtgtattgggggcaaagggaaaattagagcctggattaatagacaccaaagtaattttgcctctggctgctgtcaatcataaaaagaactagaacagacctataattggaccttctgacccagtgtgatagacttagaggtcaggtttattggactgtgggatcattcaccttgcttgtcatgactcattctcccaaatcctgttttattcatgttctgttcccactgggctccaagctgggtggatgtccaggttattgttgtcctgaggggcttaaaattggaagggagaggggaagaaaagaaagaaatcgtactcttgtccagtatgtatatcttccatttaatggaatagaataactgttacttaaccaaagccttatagttgaaaattttgcacccaaagacattgaatctagccttgagtggtccacttgattaatgtgtgagtaaccttggactgtaagtcctctgaacctcagatatgaagaaataaacaaacatcacacttatagggctgttatacagtgaaaatgaaatgatgggtatggatataagatataaacataggaagatttggttattcttatttttcttagctatagactggtagtttaaaaaaaatgagtcagagacctagattctattccagaagtatcatgtattataaaggaaaataatttattttttaatgttacttcaccttgaaaatgggtataatgtcttatccttatttttctgatgaaatgatctgagagtaacatgctttttgttcaatcttattggttcccgtggaggagaatagagtcgaactgaaaattattctgttggccgggcacggtggctcacacctgtaatcccagcactttgggaggccgaggtgggaggatcacgaggtcaggagatcgataccatcctggctaacacggtgaaaccccatctctactaaaaatacaaaaaaaaaattagccaggcacagtggcgggcggctgtagtcccagctacttgagaggctgaggcaggagaatggcatgaacccgggaggcggagcttgcggtgagccgagatcacaccactgcactccagcctgggcaccagagcgnnnnnnnnnnnnnnnnnnnnnnnnnnnnnnnnnnnnnnnnnnnnnnnnnnnnnnnnnnnnnnnnnnnnnnnnnnnnnnnnnnnnnnnnnnnnnnnnnnnnnnnnnnnnnctcaaaaaaaaaaaaaagaaaagaaaagaaaattattctgttattatgagtattattattaacaacacaggtatttagcctaaaatgagggttgcagttaattttcacagtgaatccctgaaccaaatgaaagagctgatctggttgacttgggagaggcaagactgagggactgggagcccacccactcctcagtcttccatcccacattgggtcctggggcaacttcgtgcttccttgggccctgatgaaacgagatttatgtgagttatgtgtcaaaataaggaatttgcagtttatcttctcagttatcattctaaaagtgaacaaatagtaagttaaggagatgaaatacaaaatataagaaagaatgcttgagcccatttagttgtcataacgtgtcagtggatccaaattaaagttactatcttaccttgtatcgcttctaaaaatgctattctgtcacatgtgttcatgaattgaatatagaagatgggccaagttagactattgtttaaaaatacatcttattaaaataatctaaatttctgtttgaaaaaaatactacatttttattgcataggtatcaaagcataagtcattttgattttgtgaatctataaaggatatggccaaaacacctagtgatactgttaattagtatgtaaactgtgaggcagaattaagtaatcgtttaaaatcaaagctgtagagtttctttagagactgattcctacctagtgttcttgaaaacaaaaatgtttgcaacaaacttccacttttgtactgtattagtagattcttacctggtggtaccatcaatgtctttcattaaaagaactcagcactgtggcagcggtggcctctgacccattgtagagcagacaaaattaagcaattaatcacatccttcaagattccaggtttcctttatgatgatgtattttcaggttttattctatgtggaacatatagtattcactcttttctacgattagtatagaccaatcacagactccttgatctcaggatgcctttacattcttagaaattattgaggaccacaaaaggctttggtttatgtgagttactatcattttccatcttaaaaatcaaaactgagaaatctattaaatacaagaatacaagcacatattctattagctgtcagagagatgatgtcatcacatatcaggtagcgtctagaaaacttcactgtaccctcttgagataatgagagtgtaaagggcaaataatgtctaatattattgtgaaaatagtttgaccttacagacctctcataagtgtttaggagaccacagaagtccctgggccaccctttgagaaccacaggcatagaaattttagtgcagaacacacaactctttttgagtttttgtgacctttttagtcaaacatctaccaaaacatttctgactcgctcatacaaattgtgatctgggccaaacagagacttactctgtaatccaaaactatgagccttatatttccaatcccacaactctaaattatatatatttgctcttgatgcgaatactcaggtttaatatgtgaatcattccttagataagaacagtatttatggtgagtatgtgataattattatgaatctgagatgagatattgactacacagtcaatatttcgcaaaactataattcatagttattggaatctctatgtgggtctagtttctgaaatcctcaataatgtcagtggctttagtttcaacacattaagaaaaatggatcagagttaacttgactttttctagttttgaaagtgtttttatttttatattttaacttttggcattcatggtcctttgcatttgctttcattacccaaattgcatttataccagtgcttagaggatggaattaatgtaattttaaaatattgatttattttatttgctgtatagaaaatgggatggtaagtgtacaaaaaccatgaaacagttttgttattttcctaggacaagtgaaaaaaaattttctaaaattcaggtgacaatagaaaataggatctataaccaaaataaccacagagtagaaaaatgaagccattttatcagccactgtagttcatgccttggtgtgcaaaataaatgtaaattttaaaccacttgaactcatctacttttttatgccaccaaagttcagaaataaggacttttcacaagagactataaaactaaatgtctaagaactgcaatcctattagagattttaaagtatacaatttatttggcttttctatcaaggtgagaataataggttaagtttaggataagcattctggaattgaccatcaacatcactatggatatcttttaaatgtacatgaatgattttatgaccataatacataatttacatttcttttggtttatgcccagttgaaaatatgaagcatttttttgtggatagaagtgctttgttaggtatagaatttatatatatgcgtatatatgcgcatatatatatatgagggaatgttaacgaaaattacttgccaccatatatgtatacacacacacacacacacacacacacacacatatatatatggggatgtataagtatgtatacatgcatgtatatatactatgtgtgtacatacactatgtatgtacacatatatatagtggtgtgttaccttcatttgcattgcctacaaagccagtcagaatgtagataattcttcactatacattgttcatctttaggagatcaagcactcaggcaccatcctttgaatatcacaaaccacaagtcctttaagatttaggccagatgaagcccttatttctatgaaacgtttaatctaagtcacactttttgccagtgtagaagttacgttcatcacacaacccataaaccttgctgaccaaatgttctacatatacagatatatatctggactggaattttatataatgtgtataatataaaattatatcatattatacttatatatatatatacacataaaaatataatataatttgtagcaagatataacctttctcttttggcagagtttccctccatttttgcaagaaattctaatacacttcaaaggccacctagcgtgctgccaggagaggagatgtgctttggaataagagtccattatttcaactcaatgaacattttattattttttaagtgaatgaatgtgttcaatgtttcacatgttttcctaatagacctcaaaatttttcagcagaacctaaggaagctgctttgagagaggatggtatggtccaagaataatatcctacaatgcatatttgtatccaaagtggtttatgcaggtgtgagcaagtggtgtttgtaaaaatcctgttgaatagaccacattctttcagtacactaattgctgtttaattggtgcctccagaaaagctactattggatggcaatgatcaaatcatcctctctcccaatgtgtccacatagaaagttctgtcaggcctcttgttataaatttaatgaagattgagggaattcctgcagtacgggtagaagaaattggtctagttgaactttaggctctgaaattctagtatttcaattccttttgaatcaaagattatcttaatacccagcccttcccttcattaagtcatgagtgcagtgtttcctacattcaaagtgcagtagtaatttgacatttgagggatataccgagactttcagaaatcactaaggtttaaatgtgtaattgtcactatagctatttgatttccttctcaaatcacttccaccaaatcacctgattttgatgcatatttttcacaccacagtttaactggtgcttgagtgttatggtcatattgctgaaggaaaaatgaattactgcctatgggatgggacgtataagacaacaatacagcattaaattgtcaccattgagtggcttgctgggtcacttgctaacttagctactggtcctaaaccagcttctcagtgagtataacacaaaatctgtctcacattattaaataatatgtgatgaggcctttaggagtccttgttaatagtcagaattacaactgctatattacatactgctatagtccccatgccattattaagaaaatatacttattaaaaatatttacaggccaggcacagtggctcatgcctgtaatcccaacactttgagaggctgaggcaggcggatcacttgagcccaagagattgagaccagcctggacaacatggtgaaagcctcatctctaccaaaaaaaaaaaaaaaaaaaaaaaaaaaaaattacccaggttgaggtgcctgtggtcccaggtactcaggaggctgaggtgggaggatcacctgaacctggggaggttgaggctgcagtgagccatgattgcaccactgcactccagcctgggcgacagagagagagagagaccttgtctcaagaaaacaaacaaacaaacaaacaaacaaaatatatatatgtaaatatataattccatctttttaaattcaccatgatgccagacacttcaagacatacttaaaataattagacatatatttacaatctactaggaaagagaagataggcaaagaaatagctactatatgaggtgatatgtaatcaattgttataaatcttcccagaaaaggtgtttcttctccagctgggagaattgggtgggaggcacccctgctggtttggatggatggttatggaattcggagaacataatagacactcacagaacgttggctctgtgaccttcttgctgctttcctagtgctgacctaagtgaacaaaatccagattcatcattatttgaaaacaaaatctctacctcagacatatcagaactttcctgagttctctgttctagcttacgagaataattttgcaatgagtcatatctggacatggtttcatgttaatcagtttccaggtaaaaattcttatttttaaacatttatctttttcaagtgattaggagtcttgggctttgttttggtttttaacctctaactacaaaactaaacatgtatacttgctttcagaaatgtattccaaactaatacactcccctgtctttcatccaattacggaggtgtggctaagacaaacggttttattttaccccttcacgaaagacaaggtagaatctgagtgtagtttggaaaaaagttttagtttattttttcatattttcctccaagcgaggctgaaatcctcttttgcaaacaagaggaatgaaagggtgtgtattcacagcacatccaaaggaagtaaccctcatccccgttttctcactttttcatatttttcaagggcttactttttatttcctacagagcttaatttttttttttttttttttttttttgagacggagtcttgctcggtcgcccaggctggagtgcaatggcaccatcttggctcactgcaacctccgcctcctaggttcaagcaattctcctgccttagcctcccaagtaactgggattacaggttcacactgccacacccagctaattttttgtgtgtgtattttagtagagatggggtttcaccatgttgcccaggctggtctcaaacccctgagctcaggcaatccacccgccttggcctcccaaagtgctaggattacaggcgtgagccatcacaccaggccaaaatttcttttattatccccacacaaaatataaaactcaaaaccctgttatgtcttgcctcttatcatgtgttcttctgctgggacccctgggttggaaatatttgcccatcaccacatctagatctggcatatccgggtcctatactgatcagtttggaggaaagccagtgtgggggattgtaattcccaccccttcctggatggtctgggcctcattcctttgctctttacatccttagatccactgtgcccctgtgtatctcttgttcttggggctgaaatcgcagcccttaagcacatcacaaagacttcaaaagtcacaggagtataaattgtgtcaaatgagcacgtggttctggaactggtccatttcatacatcacctcatttctttgctttgtgggcctgcagggctttggaagtaaattggtgctacagcaacttccacttaatttgctcagtggttaaattgatctatctcttttatttgatcggatctccaggaaccgaatcatttgcattgatttattgattggtgctatgttttcaccattagttttgatcactttcagctgttaatattggataattcaatcaggattgattggccttaccattgaaggcagaaagttaatcacataggacacaaacaggacatggctaagctaacctcagtttgttattctctctccgttccaaccccccatcatctatgcagtagcaaaaagactagagtttttcttaagcaaaggagggaggttgcagttgtatagcattcataatgcgtctaaaggtaagatagttttatttggctttttaataaaattgcatctagaaattaagcaagcatacagaaagataagcatgattatcacaatgaactcatttggactaaatgagtaaatgcattttcaattacctgttttgtacaataaatgcctcatctgtgtgtgcatgcttggaggcacaacctgggctcacctttttctaaatttggcccttcctgcttcaccatgtgtcctggtagtcaaattttcaagaatcaagtggttaatatgactgaagtaagggcaacagaggtaattgcaataagctgaaaccactttatttgcatttgaattgtttctacagcaccccagctcagtttttaaaaattctccatccattaatttcttgatgttcatattgatggctggttttcgctattaaaagagggagcaccacctcttcattctaggactcgctccctcctccaacagccctgttgttagcgagctgccattacattatttttttgtctggcccagagttgacgacagatggccatctccgaactgccatcagtgcggctttatggagcatccagccagggtgtactgaagagcactgtggccagttctgcagccccctccctcccaccccctggaaatgttcatcacctctgccacattctgctttggctgggctctgctggccctgccatcttccatgtcgccaagacagcctgctgccatagcaccggaagatctgcctccattaggaaggaaagactgcatgtgtgactgtcttgtaaagacagagctctgtctcagcgcctttgtagtcggatcctttggagaaatccagaaatccaaatttccaaaacattctgcaatctagagaggcacatggaattgccacctgtttctattttagatgtttgcaccacacatggatcagtttcctcacattagcagagacaaagtggcaagaatagaccctttatgtttacaaactttcctctaactattggaaaacaccacttccatatccagctgttgtgacaattagggtaagaaagatagtaatcatgggcttccactataaatcccctgaaacgagcaaagaatccattccagcgtcttcctgatccatcaatgtggcgatccctcggacagccgggtgaaatgagctgctgctgtgcatttggagaaagattgataggctgctcttgatcgagtttgctaaggccaggcagcttcagagccaaacgtgtattttaagaggaattcacatttgtatcctttattgttatatttgcaacgaatctacagcttggaacaggctctgccctgcagctatgaaggagtaagttccccttattggagagagagagtagtgttctgtaaaagcctgagatgtggcggcgagatgaatagtgcttaaaagctgtgcttgcggtgctgtcatttagaacagcaactccgaggctttaaacgggagtgaaaggcagggtaaacgagtcctttaatagtggtgaaattttaaactgcctaaaataacaggtctccttcattgataacttcattgaatgagtgagtggaaactaactggccaggaactgctttcccataggagggccaagtttgcaaaagcggggctttttccttgggcccctccatgtctgggaggacagcttctttcctgcgtgatccctgcccctgccttgatagcagctcctggctggcaggagaccatccttcactggaaacccaaagcgcccataaaagacttcctttttcacattgccaaaacttaattttataattgtctgacttacaccactgggcacatctgctaagcttgtgtgccttctagacatataaaaggctactgtgataccattaaatatcagcagtgtgctttgctgtgctttgagtttataagggtgaaaggtgattgtgcaggaaaatggaacagtatatttgctgtgagacaggcaccaagacttcactcccatactcagttataattcatgacagtactggtgggaagcccttatccctctgtggagttaatgcatctccactgaagcctgctgagagcaccttgcgtccccccccaccatctgtgcgctcacttcctagctgtcttctctctttcactctctctctctnnnnnnnnnnnnnnnnnnnnctttcactctctctctctctctctctaactttttcctgagatctcttggtgttagtatagtcagactgctactgaattgtaaaactggttctccaaagcagaattgtcatttaactaggggaagagctggggagaatgtattacagcattgtttaatgtctcatttagaaaatgtcgattagaaattagagaagcagcaatgccttaaacccgtcgctgactccgagagccgaggctgtgctgctaatcatcaatgagtaagagggacccatggcctgagcgtggatggaggccagggacacaaaacaaggtgtgcatcacaacccaaactaaccaaccctgtgctgaacctgagttcagtgttctggaagtcgaacttgagtgagaccaaggtcctgagaactgcttgcccactctgtccattggcctgggccaaccagtggcatgagcgccaatccagaccccacgcactggcgccatctgccatgcgatgccacccactctgaggaccagaactaattgccttggagctacccaagtctcagttcaaaatgatcaaacccctgggttgtacagaacttcacttaaaagagcagtggtgatttgtgcgatgcaagccacagtctaaagtgaaagaagccaagatggtcaaacttgttgcagcccagagccggcagagggtcacagaaataggtggtttgttcccactctgtcctatccctttgtgttctctcccacctcccccgccctctgcactcccactttctgctgggagcccagaaggtgatgggacatgcagagggcgtgtgctgaaacaaaggatgaaactgcacctcgttcatagccaacccaagattaatgtgcaacgtttcatagtatatattcttgccatactccattgttagtactccttttaaaagataaatcaaatccgggtctgaaataccagtgtatgcatttaacagatgtgatgccataggggacctactgtgttataagctgcagaaatggcctttttatgccttagactccacttattccaaaggggctttagaactgcagcggcggggtgagaggtcatgcattaagacagcagcacccacgcataattctgcctcgcgtgtaattggctcacggtctcattctgatgtttgggtggcattagtcacatcgtctcgttcatcctgcaaaggaaaagtagggcaagaatggccgtgttcactgtccaggttttcttgggtgaaagatcactttgagatgacacagctgagtagtcagcctgaaatcctggttggtattttattaattttgcaccaagataaatcctgaaattctgacaaactccatgacaggtgaaattccttctttcagaatctgcgcagcaagaggctgctcatttcgttctgttccgaggcaggcaacaggagggcagctttataatcagccctcaaaggacccccagccgccccagagtctcgggctgattgaataactcctgggcctcttcccctaggcctccatcagcgggggccctgtggaaagccatctcccgcagactggcactgaagtgagctttaaaccaccattttctgctctccagaggagcccggagtactaaaagatagatggactgcagatattttatgagaaactgtcagaagaagagcagagtaaatgttttttttttcttcttctttgagtcacacactacatcactgttgaatttctcccagaatcttttacatttcaagtgagaaattaattggttgctaacctttaattctccccgcctccctcttcttcgttgtcttcctcttttttttcttaaatattcacacagaggccctctgcttaaccacagttgcagaaaatcagtaccatttgcaatgaaatatttataatgacagaatgaaaaattggattcattttctggactgtagccgaacagtctgcaactttggtgcggcattgtttagcatctctcatccctccctttcattggcgtcgttttcggaaacataacgcatggacgttcacctatgctttggagggatgcctaccaaaacacagagcctgtttttactcttaaaaaaaacataagaggagaaaggcacatgtttgtgttgtgctgctatgtggggggcacgcggatgtggcccataaaaaggtagagaggacgtgaactctgtcaaaaggaagggcgtgcttgctctgtagggaagagctgggagaagtttataaggaatacaggagacagtctggcctggactttgtagcagagcacaaatagcaatcagcatgccatcgtatcttggggcagatttataaggggaacgggaaggcagaacagaggtgagtaaatacacgttgaataacatagctcacgttctttcttcccttcagtgtttgctgtgtaggctttccttgccatgtgacccttgtattcagagctgtctcctaacccgggctgatgaccgcattttttaagagataagagatgaaaggattttgctaggacagcccagtgttgtattttaaacaagtctgcctcacaagtgtgagggccacaacaatacactgactcttattacagggctgggtaggatttgtagcaagctgcctaggcagtacatttgggtctagcaaataagtttgtactcactactccacagacaggcccaaagagcctgcctgtttcttctccctccgttggaacagaacaagggattataccctataagggggccatcccagccttccatcccaggcctctgtgttaacttttctttgtcctttttggaacactgggtttaattagttttagtgttgttttattttgatggtttttcaaaagtgaaaatagttcaggtagattcaagcgtcaatacaaatagcctcaaattccaatattggaggtttccttcactgaatttgcatcatgcaattgccaactccacaagaatcaataatccatattttattatataataaaggctgcctgtaagtgaattggctcattcattccatctgattagctcgattgtattcatggagagaaaaaagaatacaaacttaccttcaccaaaatattgcattatttggatataaaaagcttccagcactataaaacaattgcatagggataagagataattcatttcaatatttgtttaccctaagaagaatatgactcctatcatcctgcaatttttggtgacaactttaagtttcacatccattgcgtggaactggtctccggtcagcctggtctgagcaccctgtaacaggtctttcttccaaccaacagcaagaatcccactccagaattctgaaaaacaactgggataaacagtctttttcttttataacccttggagagattcaccttttacttaccctaaggccatttcctcttattcatccacggattaccattttcgaggtttttgaacgctcactgtgttctctgaagcaaaatcttagcacagatttgtgcccactaaggtgatgagaaacactgagcaggaaaggagtggttcattactgggatctctcaagatcatgatgcttagtttaacttgtgggtgacacatactttctcagaggcttggaggttttatacaggcttccagatttgtcgtttcattgcattccaaaaaaaaatgattttgagaaatatgctgacagttcagcatgaaatgatgtgtgttctgacacacactgcattgcagcttaggaatctagcctgaagtaatttttctgtagcgtttctaggactctgattcaggggagaaaaagaagttccctttaaagcatatgttttaggatgtgacaataacttttctcctgcgccgtgcgtggattcagtagactgtttccacttaacccttattattgttttctttcttgagtgccagggttaaggagaagaaattttttcttccattagtttttcaacaacttaggtgagtctgaaatatatacccaagtaaatgggaactgtaatagtggtgtgttcagaatcaatctcctctgcaggccaggcaaggaacattgaatagcgttcatttatgtactgccagatgtatttctgcatgtgactgggctcgccaaaccgctttgaatgattttcagtgttattaagcaaactcacaggagcaacaggacttgtgacagaagtaaagagcccggtggcaggagtcattggtgaaggaaagttgcacggaaagagaagcaccacaatgcagactctattttaatatctgagctaacaactctctgggaatatttctcttcctcttgtccagctccttctgtgttgtggctggtttgcatttgtgtttgaaatgccaggcggtttaatgaagttattcttttataaattttgcaacactgaagcaagcatgagggctttaaattagaataagtgccacttctgtatggcaggttcctttgaggactgattagaatgaggcctcccgttgcctggccctttatgcatggcagtgttgctgtgtgttcttgtttacggctcacctttgaatttgcatgagtttgcaccatgcctgccgcctggccctctgttagtcaggactgtctttctttcaggatcatgttaaatacttcactttaaagagatttttttaattatattgctttattgtaatgaattaaaattaacttggagtagcaaattatttaaggatgtgagggttatagattactctcaccatagctacagcacatctctgcgtggaggaattaaagggttctctttccagtagctctgtgcaccataaggggtgaggaaactgtcccacagagacctagaagtaaagccagaaaaggtgcccaggaagtgagaggagaatgggaacttcacgtgtgggtttctgaagcaaatagaagctcttcttggcagggtagagagtgggggcagctctgccattttaagaccttaaagagtataagacaatgggaaatcgtggacaagaaagaataaaaatatatcttaagaacaggtttaatagagaataggaaatgcacccaaccattcctgacttctttgtgcctgtatgaacttgctaataaaccgggatgattttagggggtggggagggatcgttaaagaaagagacctgaaattttcaacaatacacaataacatacagggaaaagagaaagaaaagcaagcacacaggcaaaaagaaaaaagcaccaaacttgagtgtgaaatgttttctcttctccaaacttgggttttttatttaaagtaggggataaccaaacagaattgggcctgtgaaatacttgcatttttaaagggcttgcttagatcttaaaacaagaattacttggggctccttctaattgcattctccatgcaggaataagtccccagagagacagaaagatcaaaggcaaacaccaggaattttacctgtagaagcaatgcatgtatgtaactctttttttttgccctgcgcaacagtcgcttaggcgtggaaatggacatgcgcacaggcgtattcccgtgcgcgtgcacacacgcacgcacacacgcgtgtgcacacgcacgcacacacatgtgcacagacacacacatgcacgcacacacacctctcaggaggtggctcatacttaacacagtttatctaaattaatacattgtcctttcacagttttatttttatatatctttaccaaagcatatgccatagtagacaagctttttttttttttggcttacggtggggaaagatgtttttctgttattcttaatgatttataacatgtttgacttactcttaatgtgagtttacctcctagggagtgtggcagtgtttttaataaaagaaataatacactacaaggaagtggcatttcttttgctttttgcccaagttcaataaactatttttcataattattggaatttggttgaagggaatccgtgtccctatcaagtggaaaagcagaaagagtcttggctccctccttcttcctacaaaggttaccctttgaatataaattacaacgccctgtgcttctctcattctaatcagatgaccttttgaatctggtggaccagagtttaaatcctaagcctgccagtcagtttttaaatcaatgccctgctccaccatctttcagtgtgtaactaaatttcaatggatttcaaacacggaagtgaagtaaatgatgccagtggaatcttgcagctgactgcaaaacagccaaacttaactctgagatcttgaccaagtgatatgattatagttaattttgctgactaaattctcttcaaaaaccttccgggattcaaaatctaagagaaaagggaggagttggaattttgtaatgtttgtaagaggacatttctgagcaattatcaatttaagcttccattatttgctgctaattggtacacaaggctgttaaatatttagcagaagtttgtttaattgcgtttgactgggaaggggatgcttgaatatagcttcagcagcaagagttggttgtgtgcaccgagagctggcggagaggaaatttgtattcgcccaagatgaacacattacaatgtcagacaagccttcttttttcttccttccaaagatttatttatctttaaggtatctaaaattagagcacgaagaaggggcactgttcatggatgtaaaattggaaggaggtcattcttaaccttgtttacagatgttctagtttagaaagcgccagtgtgataaattaaacattacaggggaaaaaattaaagcttagcaacaactggcacatggacacatctgtctgtgaagcactgacttaatccctgaatatcttattagacagtattgcctatcaaagccttctgtcccacagtacgctggaatcctgcaattccagaatcttgagtgaaatctttacactctccctctcactggtgctggctttatatagtttgatttaaattttctgctggcttcttgcatggaaacagacagctcaattcattgttttcttttaaaaataaacatcgtactctttactatatttcccagtggccattttgctctttttcgcctgttcttccctttcggcacctttttcccccactctcaaggtagtacatagtgcacgctattgtcagttgcaaagagggaaattttcaagcttgtcaggtatgcacaacagataggggtcagcttgcaactacaattttactactgtttttaagttcttaatggaaaatgggattgtcacgatgttaacatttcccacgtatgacgtcacagcagaatttgtcctttggaagctggtggactaaagggcttgttttatatctccaaaatgtttaattgtcaaaatactaggaattgttctatgttagcaactaggacttagcattatttaaataattagtctttgcttagtcttctgaagactcacattagactaaggtcaaactgggtattcttggtacatggtaaccgccatgggcttttccagctcgtttgatattgcagaaaatagcaaaatgtggtgaaaataggccgtttttgaactgactccctacctcccggcacagccggacatatctgcagctccaccagatgcctcagctcctacacagttcctgccctctgccctctgccccctgccttctgccctctggttctcagctttgctgctgctcttccctctacttcgggggccattctctccctttttacctctgcctcctcatctctcccgcaccaggcatgtgtgactcctccaagaacaaagcctctgacataaggtgaagggcccttcctctgtgtcctagagcaccctgtctctccagatagaaggtctgggctatggcaatgagtgtcctttatctgtacagctggcccagccgtgggactaactctaagaccttgagtgttggcttcaaccctctgggacttaattttctcatctataaaataagatactggaccagatgctgctatgtaccacccccaacccccagctctgaaaccaattttttctttctctgcagtattacttacaggtgtagttgattcacctgccattgagtctagaccaacaaattgaggatgatggctctgtagttctttcaaagtagatagttttttccattccccaaatactgatttccagagtttaatatttgggtacctttaaacattattagattgcaaatatccctaaagcagcataggttgattgccactaaaacgtaccatctttgttcatcaatggtatatggatggtcttgataagtcactaaaagaatgaacacttctggaaatacttggttctttacataaacaatgccattatatatctcagaagaattctttctacagtttctgtatacttgcccacgttcacccattgactacgttttactgcagtacggtatatatttactgcagtacagtctcatgtggtatatgtgtccctttgcagttctctttttaaaatggggaaaataccatcttataatgaagacaaagtagcatactcaagcatggtatagcaagctcaatgtgttttcaatacaaagtaaattcaaaacaattatataccttccttatgaccacctgttcctgtgtctgacctctaatttaaacctgtcaataacaagacaggtcattaacaagacctcctcattacagctatttaacacacctcatagaccaccatttcttcttcccctttagatcagttcctccctgcaaattcttcaaaacccttaaattcagaaccctccttatttcccagctttcatttattcatgcacaagtgtttttcaaacagtataaggcagtgttcctcaatatctcccctggtgggagagatgcttcccaccaagagatatgtggcagtgtcaggggacatttctgcttgtcacaactgggaagatgccactagcatgttggcagtagtggctgaggatgctgctaaacatcctacaatacccaggacaaccccctgcaacaaagaattgtccagcgccaaatgtcagtagtgctgaggttgggaaaccctgcttgtgtaaggcaagccccactggccttctaaaatctattttcaggctcctctctggaaccaagcaagtgaatgggatgtgttttatgtaatgactgagaaatggtgtactggatggtcttctaggttgctttggatgagatggatgaacttttatactataggtacatggtctagtgtttggaacataaactcatcaacatgccagtgtcctcatccttcaggattatctcagatcaccctttttctggacgtagttagcacaaatgtccagagaacaacaacaaaaatgtccttcagtgaggtttattagaatgcgaaattgtttcctatgggaggtatgatagcaacttcattgccagaatcattcaaaactggcctaagtgtgtaaactttatcaaacaattatgttcctacaaggggacaaaccaaatgtcctaatagtccttttccttctttaatatcttgtattcttctgatcgcttctgatgatgccatttcaccttttgctttaatatagcttagtgtcatccagaaaatgctttgagatgtcagaccaagcccatgtgaactgttaaatgtcaaaagaaaatgcatcagtgtttctgtaagttcatggtgatgacattaccatatgaaaaaataaaaagggaaattctgtcagtgcaaacatgatcataaatgcaacattcatggcattaaagagaggggcaaaagcatacatgacaatttggaaatgccattgctgtgtcataataaaagagtagaacttcattctagcagattctacaaatgtaaagattatgagtcaacttccctggctatgaaaaaaatccactatgcatatgtcttttcgattctcatagcacttagggaaaatactgtatatttgtcctttaaaaaatatgcattgaactatagcatagctcacaaaaatgcaatatccacagatatggtcctgatgtttacctggtaaggtccataaaaacacaattaccccagatttcctcagccaggaattatatagttgtgggcagtagaaactttggggtgggcaaagtagggtacttgagggtgattttggtcttcagtgtaatttttagaaaattcctaatggtactcccagagccgtagcaatttacttttaatcagttgaaaattatgagtacttttgtaattgtgtggactttgaaaatgttaatttattaacattcacatcctgttaaccttattaagatgcttaaaggtcaccctttgccattgtgactattttttctcttaacgttcaggggaaataacccaggatcctgtcatcattagctgtatacacttttaaaactattttactagcataagaagttgggaatgaaaaggagagaggatggaaatgtaaaaatcttgattagaaagtataatttaatagaacatgtattgaaccaaatatattgattaatgtagaagatatagtacttatattgattcgaaccagagatttagtactaaaagctctaagccaaaaagctgttgcagattgctacaaaagtcagtttaatgctgtccttgagaatgccttcacaaagaaattcttctaatgtttgaggactaggtagaatgcggtatatgtcagtctgatcccggagggttttattttgtactctaatagctgttaggagcctacattatatccaaggagtaattttccttaggggtgcccagctcgctttgtgtcaatattctagcattttaagtcacgtacagtatatgcttctgggaacggggaaggagccagccagactcataatggtctgcattcattaataaaggcagaagcttctgtccctccattgcccactacagggatgcctctttggccttcagggacccgtacagacacatttaaagaaagctttattttgagtgggcaggagatgaaatgtaggacttgcaggcatttcctaagtcagctatatgcccgagcacaggggtgaccttaatgggtcaaagaagaatgcaggtcaaaagacttattatccagcctgttggaaaccaattgcttttgtttaaaaaaaaaaattaaaaatgaaaaaaagcaatagtgcttaaaggtggacggtaatgtagaattctgtttgcagcctgtaactgcacgactgtatgtgaactagaatatacttccagaaaaataagagcataccgattatcctcagtgtttatggataaaggtccaacccaagtgataaaaggaagggtaatataattagttaatcagtgatgattgattacggatgtttgtgttcttcaactaaagaaaaaacaacatgctgccatggtgctgtcaccatctgttgaaagaaacagccacatttaatctttatatttctttatttcttcccaccttgcattgtttctgagccacaattgcctactatttcatctagttagaaaacatctcatttaaattaaatacaactgcagtttaaattcgggtttctaatggcatagtgaattagtggtggaaagcttgttattttttttcattcctttttaaaatagcgtgctggctcttttacttagttttaaaagcttgtcagaatttgtttgaaacaaaaggctataaataaacaagtcatggtaaaaatgattaacatctttgaatcaacagatttcacaaaaacttccattcaaatgccatttttgtttttatgaccactgatacgtaacattttgccgatgccaacagagtgttacaaagcacagacgagacacggtctctgccaaagaattagaaaagtgaaggcaatctctgggcataagttttggggttgggaatttaatttttcaactctaggaagataggttccccctggctttcctccaaagctgaatttcatcattgatgtaggtgcaaaaattcaaatttacatcaagattgcaggaaaatggaatgtctttagccaaggtgaacagtttcaaaggatcatggatttttatttttacttaaaaatatttttcttggattgcattttaaataggattaaactgtttgaccagcaaatgtggtcagctctcagaaaaaaaggaggctgaattaatcatttgttagagtgccaagcccaaaatgagaattccagtcttgtaaaatgaaaggcatctcatatttaaaaagaaatacatagtgctagaagggaatttttaaggccctcgtctgttttttagctttctaagtttaatttcacatttatagagaaaaaaaatacatacagcacactccttccaaatggggccctttacagtaaagaaagtgtttttgaaacctcgctattaaggtatcatacctagatggatcttcttttcagctttaaggtatgttgtggatttgatttttttttaacacaaacccccctcgtgtaaaacaactgttcataactgggattaatggtttgcaattttcagttacttagacatggggtctccaggagatggctttttgcagagtagaatatggctctctgtgggattacagaagttttcttctcttcctacttccttttctgtcttcaccccccaccttcaccaatgttgcactgatgttcttctcaattatgtaaaacactttcccttcattggaacagatattttttctcataacctgtcattgcattaaagtacttaagggactgtgaattgctgtgtaaaattggtgagattacccactgctttgttctagtgtagtggtttcctctggacctaaagagctgaaaactcttgcacagagagaaggctgcttgtggatggcctggcagcatttttctgctttctgctcatatgcatttgtgtccttgctgtctcaggactggttctgtggtgtggcaagtagccagggggagagcagactgggcctcagagcctaccctctctttgcttggcgcttctgctgtctacttttttatccttcccacttgcctcttgtctccctttctaaagaaataatgtctatgagcatcagaaaacacaaaaaacactgagtgctcccatgaagctctattcagagaatctttagtcgagaccagagactaggacttcgcatctgttctcaccaacacctaaaagccaatcgaataaaccatggctcagatattccattccttcccccagagaatgaaatgaggccatttgtatttccagtggacttgaaatactgcgtgggggaggagaacagacacatcccccggatcctcaaaggtggcaaaggcaagcccttgaggatggagcagaatcccatggcggggttgtttccaacacaagtatatccattgcccaagaagctctaggaacgtgctgccttccaccatgagcatcactgccaatggtggacagccaggcctggggacaccctgccatagcactctgttgggctggagcaaaaaagggaaaccaaacaaaatgagaataagagacctccgtggtctgcaggcatctccacaccaagaggacttcctgcccttacatttctcatgccagatttcttaggttgatattacttacattgggttgctttatttttgaatttcacaagccatacccttgcccttctcacaagtgatttatattcctctctcttatatgcaaaacataactcctttatgaaacaacttcagtctgttgtagtaagtgatgtatgtgtatttgttcatgtccttgcacctctgaagagacttgtatggctttgattgaggatgaaagcatacaacacacaaccattgccaactgttatgggcagtttgttttgggttcttgtagcatcttgatatgagcacatataaaaacaccaggaaaattgcactgtgtactcttttactaacccctagaatccaatcacatgtggagtgtccatcataagcacttaaacatttgaaaataatgtaattaaactgttttttttttttatttggtaagaagaaaaaaacacccatctttctgtcagagtcctatcatttaggtaaatacaggttgagtattccttttttaaaatgcttgggaccagaagtgtcttcgatttcagagtttggcatatttgcatatacataatgagatgtcttggggatgcaacccaagtctaaacacaaaattcatttatatttcttatataccttatacacatagcccaaaggtcattttacacaatattttcaataattttgtgcatgaaacaaagtttcagtacattgaatcagcagaaagcaaaggtgtcactagcttagtcacctatattccatcatgtcagtgctcaaaaatttcagattttggagtatttggattttggattttcccatttggaggtgctcgatctgtattatcgtatcttcttgtacttatttggtcattgtttttggactttttaaaaataaaaaacctttctataaacttgactctgagatagcaaaaggtataagaaggcttagatgtggtgtattttgagtaatcaaacttttattgtttataacctttccgaacagaatcatgttgatttttcagaaaatagcaaagtttttcggtctcattagtacttttattaccctttctgtctacatatcggtgacaagtacttttcagaagtattaaaaatcaatatacagataaaagagctggcataaaaacaatttgctatttcctgtattcactctgaggctgggactattaagatatgttttaaataagggagagtgaaatactggtctgcatcatgatttgtcatccatctttttcaaaaatgagctaaatttgaaatggaacaaggaagacctaagtcctcttcacaaggctcccagccccccgccaacttctgcacgcagccccaattggttctcagctgaacctctggtcattcagcctgtattcagggagcaggcagtttgctagttgctgtaaaggatgaagagataacaaacatctctaagatgaatccctctgcttaaaatactccaatggctcccttaacctacaagacagtctcagctctttagcaaggtagataagacagctcatattcttgccccaaaccagctccatcttcatgtctcgtgagtactgttgattcagaacactccagaagaattcatccaatctaaacaagttgcaggtctgcaaacgtaccttgcatattcctgtttcattgccctgacccatgtgggtcccttggcctagagtgccctccctgtactctctgctcatgtctccggctgtcagtgtgctggatccacttggaaccatccccaatggctaggcaggtttaggtgtatccgtgacatttctgtgttcttttctaatagactgcttgccatcttgctttacttttatgtacccacatgaccttctttagactgtgagcactttgaaggcatgaaggcaaggaccatgcccttcctctccagtagcccttgccttgccagccagtcactgagatagccaaaccctctttcctgagcactgcagcgctctggcatgtgccaggtgctgatgtgcgttttcaatagatgcttgtagatgaatgaataaatgaatgaacatcggaattattggcatgagtgagagccaggcctacaaataatcatgagacaagacctaagatgcatcctatgtaagcagtataaagtgcagcaggaaatcagagaagggagagatcagtgttagatggggtgaggatggaagtggtgatattttgagctgggccccaaggttgtaatacaaagggattggggtcaggggatacaagtgagtagtgagagaacatggctccaggaaagcacagaggaggagagtggagatcaggccatctccaggcttatgctccaggcaaatatcctgcagatctgtgaccatcatccaggcctggttcctggcgaaccaggttatctcttcatcctttacagcaactagcaaactgcctgctccctgaatacaggctgaatgaccagaggttcagctcaactttcccacccggcgtccaccctcagggcctggctggtggtcctgagttgcccagcaatcccagttaccctctcacaatttggaaagagagtgttcactcagaaaggggacatgctagcatagatgagcagggaccaccaatatacagcacaggctgtgtcagctgagaaagagcatccggggacaaggggagacctggcgggctactgtaatctgcccctgagccacggtatgaccacagcccaaagcccaccctcaggaggggggctgctcccactgtccatcatcagccagctaactcttgcatttcatacccatattcaggggcagatagagcccctgttgtcaagatgttacagtctcagagggattggaacagaggcatatgtaaccaatggaaatcacgcacagatccataaaactgttaaaacagtgctacctgctccttgaacactgggtcgtatcttaataagaagagatgatggatggcgggagggtattatagaaaggcatggcagaggtggagaaaaggcaaggtgccagccagccatctcacattaaggaggcttctgccctggcctctccttccaggccctcatgggtgacagcaggttcagaagatctctgggtctgtttccccctggggaagaaacattagattttttttaacattagagggcacccatgagcactattcatcagagggcagaaacttcattgttctgttcaagtcattatgaattaattacatgtatatatgcttggtctgatgaaaatgaaatcactgaagtttgttttccctctcttctctttttttttttttttttttttttttttttgttatttacagaatcatacaatgacccaacacagcagttagtgcaagtacagtctctcaaggagaattgattttgtggcacaaaaagggaacatgttttactctttgcacgaaactttcattgttaatgtatattattcagaaacattgtattgtaccataaaacttgtattatcaaactgttggatgttcatgtgtttgaacttttgcgcaccggatagaccccttgtatataaagtgttgcacatgtattatgtcgtctgatactaaaatggtcttataaagacaagtggacttgggccctattcaggcaagattaaaaaaaaaaaaagactatgaccaaaatggcttaagataaagtatttttaaggaagaaagattaaaaacaactgttatacatgagactatggttggacttccttttctttacacttaagcctagaatttctctttaggtatatcagcgcttaaatccaagactattttttattgctgaagattcttgcaaaccatgaagagatgttctcacagaacagaaccccacagctggataaggcccgtatatatatatttgtaagccttgcaatgtgacaggtagcatcactatatatgcaatagttgttatgtagactgtcaaagaatttttttttccctggatacatttgaagctttgagtgttcaaggttttccttaatgatttcacgcagccaaattcttgaatcagttgaactaacctgtatgttactgttattaatgtttactctgcagtctgaacctggagattactggaattgttttccaagaggaaataaattcagtttaccattaggtatgagtgtatttgtgtgttttctttctctagttactacaccattaaaaaaaatctaattgcctgcacccttggatatgaaatctgctcttgagcatatcacaggcattacctcaatcatatttaaccttttcacactgggccaaatgcatctggaaggatattcatcactcttcatagggaaggaatcagacacagtatccttctactctgttacatactaacaggtcacattgtacttgaggattctgacatcacagatggatgtgatggctgttttctgcataatttgcagcccaattcatgtcatgctgtgcaaatctgaactcaaagtagatggctgcaatttgagaggcagtttggcttatgtgtacttaagaagcagcattgttcattcagaagacaaagcacagagcaaggagtcagatggttgttagttgtagttctggcactgcctcccgatgggagttcctttacctcccagccttggttcctccagcccgggaaggtaacagaacctggtcatcagccttcacccaggcatggggcatctctggaaggttgcctccactacagcctgccatccaacggtcaataagtaagagctctaatttcagagcttctttttgttttttgaaagaagaaaagaattgctatgtgtaacgtgaaccctgatattcacgtttagtcaaaattggtaagtaaagacctggtattcatgggcaaccttcatgcaaactatgctgaaaatatttaagccactgtgagtcttttgacctcttctaagctctgagatctttgaaccttaaacaaacaagaatcctcacagcacttttttggtggggaactaaaagcagggaccagttgcctttgttgtgaccacgtgtcaccaggagaaccattgatgaaaccaagattaccagcaccacagttaatccccatcccatggctctcgagccttaacctgttccaggatcacctagagagcttggtacatcctggggtgctgggcccaactcccagagctgctgattcagtcggcctggggtggggctcaaaactgcctaaggagttcccaggtgatgctggtattgctggtatggggaccacacgttgagaaccactaccctaccatgtttccaaattagttgaatacattaaacataagcaatcaagtggagtggtggcaaattaccctattatgttagcaatataaaaacagtttggtcaaattttaagatcattcagaaacaagtattttatagtgattaaagtatgtgtgctcaccagaatgttgtgtgtgtgtgtgtgcgtgtgtgcagatggttcccaacttacaatggttcagcttacagttttgttttggtttttttttttttttttgagatggagtctcgcattgtcacccaggttggagtgcagtggcacgatctcagctcactgcaaccaccgcctcccggcttcaagcgattctcctgcctcagcctcccaagtagctgggattacaggcgcccaccatgcccagctaattttttgtatttttagtagagacggggtttcactatgttggcgaagctggtttcaaactcgtgaccacgtgatccacccgcctcagcctcccaaagtgctgggattacaggcgtgagccactgcgcctggcccagcttactttatcacggtgcaaaagtaatacacattcagtagctcctcaagttacaatggggttacatccggctaaatccatcgtaagttggcaaacatctgtattcagcttcataatgctaggaaaacctgcatctatacatttcacaatggattgccagcacgctatttaattaaaaagctttttcaccagctacataaataatgaagtatgctgagaatatgcaagtacatctataattaaaatactcagctatattttttaaaaattaagatctctggtccattcaggattttgcatttagaatgaaatagtcatgcttagtaatgatttttttaaaagctttaaaatgtctgattattaatgagtgagttatattttactaaaggtaagctgctctgtatttacagaaagcaggtaatgtgtcaacccagggatgtatcccaagatgcctttaacaacattgcctctcagagacttcccagactctagtataaacaccaggagttggaattcttaggacgcatcagaggctgtgttcgccattctccctagaagcctccacacgactgggcatcgggctccttcagcacagacacagttcagcctctttccatacaaagccaagaggctgcaggagttgaccattatttgctccataaaactggttgatcctccagtaattaggaggtagttcctacttagcaggtacttcctccttaaaaccaaccgttctttgggtcataaatgctgaacagtgcttggagcagtcattcccctcattggcttgttaccttgttgatatttacatcctaactccttccctaaggatataaaaaagcaacttaaagatgaacaaaacattaataggaaaatcagcatcatgtgaagtcagaggggagaaaatacactacagtagttgccttgttttatgcttcagtttcgattttgagtgcgttttagcattgacttggagcttcctggtagtaaaggggggaaaacatccagaaaggaaggaatatatcagttcctcgagagagaaaatgcttccctagcacttaatcccaaaagaaatttctccaaggccttctagatgggtaggggaccaatataatagccactattcctgaccataattttattacttaatacagtgttttcttatctggagaaatgctactgcatctatgggtacaaccaaatatgctgccaaactcagtacacaggacaggtccgcacaacaatgaattatctggcccgaaatgtcaatagtacagaggttgagaaattgctgtaatgcaaagttgtacatgatttgcaatggcccaaacttctttacattggaacgacctggggaactttaaaaacatccattgcctgagtcccaccccagagatcctgacttaattggtcccaagcaggggtcgccaatcccaggaccacagaccattatgggtctgtgtggcctgttaggaaccaggctacacagcaggaagtgagtggcaggcaagggagcagagccaagcttcatctgtatttacagccactccccgtcactcacatgaccgcctgagctctgcctcctgtcagatcagtggcagccttagattctcataggagcacaaaccctatactgtgcatgcaagggatctaggttgagagctccttataagaatcaaatgcctgatgatttgccattgtctcccatcacccccagatgggaccatctagtttcaggaaaacaagctcaggcctcctactgatttttttattatggtgagttgtataattatttcattatatattacaatgtaataataataaagtacacaataaatgtaaagcacttgaatcatcccaaaaccatccaccggtgaccctggtccatggaaaaattgtcttccacgaaaccagtccctggtgccaaaaagttgaagaccactggtctagagcacaacttcgacatcagaaactcctcagctgattctaagggggccaagtttgagaaccactgggtcctgtagctgacattctcaggtgagtgtacctgactcaagactagaaattagacaagaacgttcaaggagtagagaagtggtgtgggccttagtctcttccctcaacattgatttttgcaacggggcatttcatgattattttaaccctgaagtaacataataaccaatagcaagtctgtgaagagggagaaaggaagaaatgacccagaatcccatcacccttacacctggtccagggattatagactcagcaagtgagaaaactggcgcaggggcctctagcaaactggagagcaaatgccccctcctctgccccactgttgcctgcagggaaacagactcccagtgccagattgccccgtgccttccgaggagccagcaatccgggtggctacatgctatgttccaatttccaaatgttggcaacctattccatttttttttaattcgaactctgctggcccccactgtgtcggccatatgagacacactttcaggccaggcttgaatcttggattgccagttttgacctctggcatcaactgttttgttttgttttgttttgtttttctgattctcattccagcccattttaaatgtttgttttgaaagcacgatatgacttttgtatataaaagttcaaatcatgctttgttttcaattagcattatgtgcagttttgaagctgctctgtgaccttcatattcacattgcttaatgctgaactgagtaatccagtgaatggatgtgttctatatgaggctgcccctatttctggatctttagatttcagacagattttggggagtgataaaggataataaatgatagaaagttaatattctctgatgcaagtcagataatgctaaattctgtgttgtgaatgggggccagattaatacgatttagaaatcatgtaaatgggtgacaaggttgacattctacttggaaaactgacaagcataaccagtgttccagccacaatggaaggtcacagcgccagagaccctctagggacccccacaggctgggctaggcttcccagagcagctctgggtcagttccagaacatggacaaggactccagtgaaccctcaagttctgctctatagagcatggcagcctgactttgtgtctgtttgtgcctgttggggtgcaacactgcagaactcttgagaaaggaagcctggaaatccagatcccattatagagcacctgcaaatgcttctccatttaacttcagcaggccagagacacctaccatctcccttgtgtggaggaagcgcctaccaaagacactgaaaactggagttcaagaaagagggatgatttaggctaaaataggccagcatgggttcctggcagagtcccaaagctcaggtctggttggcactgcattcctgggtgagtgccccctgagactgcggagtagcctcaaccatctctgccagattcctctgtaatgaagtcagctgtcaactccttggggggaaaagcacagagcccctttatttccaagcaggtgttgcagcatattaaaggttgaattccatcttgtgctcacatcctgaatgagccagtttgcaggcaagctcagttctttctgcaaagagggaaacttggcaatggtggaggctgagtacttaaatggcaatcaacttctggctcatatcaattaattccttcatggacttctgcctaagtatagcatcttgaattcccagctgcggcggctatgaaaaacagcccaaacaacacacgccaccatctcagggagggcgcaccggcggaacgatgggtgatgctatctcagggcaaccgcggatgttgatttcgggctctctctttgtgtacctgcagaatacggagaagaacatacactcatttctcagtgtgggaaattcttcaagaaaacgtcaactaagtctaagaaaaatccctctgaggggaatcacctctttttggctttaaaatgcctagatccaaagtaacggtgagatgtgggagcagaatgcaggatagaaaatcagaggatggctttattgtgagcaatatcttctcagaaactggaaagccccattccaaaatgaccttcatcccaaggaacctaccagagtcctgtccatctctgttccatgaacaaggggctcttgctcaagggctgcagacagactgagggtgatgcgctgtgacatgtgagacttggccattcttcaactcatatggttggttcagacagtacgattcagaccacaacgtccacatggggatgtgaattttcaaagatctctcctcatctaatgatctaataatgtggctatcaccaaggtataaccaaaaagtcaaggtcacctgggaggggcaaacacatttttcctctcccgagtatgaacagcactggcttctctccttctctgctttctttttctgagtcagtggaagagtctagtcccaaagcctttggttccctgaggctcttacatcatccagtatggtagccactggctatttaaaaatgtggctatttaaattaatttaaattaagcaaaataaaaaatcgagttcctcagtctcactaggaacatttcatgtctttggttgccacatgaggtttatggcttccatatggaatggcacagatacagaacattctcctcatcgtgcagagttctgttggcagtcctaccattctaacctgtcccctccctgctgctttcaccccctcaatgtacagaggtccctctttctctagttccttcaatatattccttccctctgcatactttccttctgtcttcaaatgcgcacaggtttcttcacttctttaaaaaaaaaatatttttgcttaaccgtgaagcgtctttacaggactgttttatttatttccttcattttcttccaaatttctcaaatttgtggtcttccccacatcctccatttcctgaccactgactcgcttctgactcacctgcaggctggcttccatcaatcagcaatatcctcttcctgaaaatgaattggccaaggtcaccagtagccacccagtctttgtttttttttgttttgttttgtttggttttgtttttttcctttcccagttcttcttctcctttttcaatcatttagtccatcagacaccaactcccatgttcttattcggcaatatttctatgtttattctttcctttccatttccagtgataggaccttaggggcacccttatcatttacctgcttctggtctttctccccttatcccccttgtgtatggccaccatgtatctttataaaacacttatttcacatcatttactcatttaataaatacctatgactcccagagtaatgtagtgaaaaaggatgcagtttaaatgaagtttggatcttttcctgccacttactaactatgtagcctagaccaacttactttgctttttctaaggccccttttcccttctttaatttaaggataagtatacttataaattatggtaggattttgctgatattatcatcagtggctagaaataccggaaacatattagatgacctatatagaaaagtttttaactattattgtctttatttaatccaagctctttttctgtccattttagaatcactgccttttctctgttgtaacctcttacccctctgattcctctgtaccactcccttgtaatctttctaaaaactacactttttatcatgtctcctacctatgagagcctggaataatggtcttcatcttccaccaaaagttgaatattcctttgactttccagagtgtcttaactttgtccaactctgtacaccattcttataccttatcctgcttcagcctatttaagccaatcaagccccatcatcatgctccatcatcctcccttgcacatctaattcattcctttttttattgttcacttctatcaattcccactctgtgcaaaacgtttccttcctcctctccagttacccagtcctgctcagtcttctggtcccacaaaaagcccctcttccttcataaaatctgatttgccacattatctcctttctctgaatgcctgttgcacttacaacctagcttaacaattcacgatttccttcaaaactagtttgtcttcaatgaaacaaaactaatttatcctcaaactggattacaactttttcaaggatgaggaatctgctatttggttttattttttaaactatccttggtgatttcacctaatagaagttcaataaagcacacattgttcaactactagcttaaatatggtcctcagtttatcttagttcaacacacatgggttatttgcctaccctgagccaggtacaaaggataaagaggtatgacaagatccctgctcttcagaaattcgcaattacaattatccagagactcagtcttttctccttgttcaacagttgccaccatcctcataaaccagataaggaagagcatgtgggagccgagtcagcttggacttgatttgtagccataagatgttgaaattggaagtcataatgccttcctctttggcctcttcattgatggtgatttcagttgatgtatttagcaccaggctgctcctgaacagtcagcagcatgctgcaaggcagaaaatcaactagatgtggtccacacccaactgactaaaagtatttctctaccacgaacgaagttttgcactagaaacagatcacgctacacatattcaaaatgcaggttaaaacagcgtgcaaaactgcatctggaaaggtaccagatctatatgtaaattcaagctgtagcccattctttccttaaagcaacaaagatgttgactgtgattacagataataagagctttccttctgatgaaatgagcatatactgaaccaaacatacgatatattcccatgacaaatatatttacactcaacacagaacacggagagaaaagaaaatgtcaatagttgacagcttcttggcctatggggtgtaatccaggagcataataaactcatttaagcttggtgttgaataaatgcatgttaggcctgtgcatttttggggggctttcccccaacacattgttttaatacaatgtcacatttctccgtgttgcacagtccttctgctgctgtcagcagagacagggaccaagctaatctttgggccaaaccagaggtaatttgccctaatgagtaaagataggaacaaaaaaaggacatcatggaggaaaatgcctgattgtcaaatgttggcagataaccatttcacactggaaaatacatctcaagaatgttggctgctgggagattaaaagtctaaaagaagatgtatttccatggaagatcttaatcatgctgataaaaggataagcatagtcaagaggatataaaccacatcaaaggccacctctgtttagaagctggagactgctcccttccccttattaatgtatttctcatcccagccaaattggatgtgaagatatgttccttattcctggcagatcttgcaagatatcaaacatttcagactttgcgtgtgaaagcaggacatattggttaagactggaaatagcatgtttctggtagagttcaagtctataagaaatactacaccctactgttttcgtaaatgccagagttccattgaatcgagacagatggtagcaggcaaagacgcaatcttataatcaaaagctaaaatatgtcaaaaatatgttagcaagcaaaatatagcagattactaacttctcatgtcatgacagcttgcaaaacatgttaggatgttgaatttctacttatgtaaataaaggagcagtaaacagaggagcagcatggcatgagaactcacgtgttgactgtcccttcactgcagtttggggaacagaacgagccacgtggccccaaggagacccagatggatattaaaatgtctccagaacaaagcgtggggatccattttcctttcatgagcaacgaatttctctgtgatacctagaagctgtttagctaaattacaggagacattcgaacttcccagagagaattgtgagggttctgttgagaatcatcatgccatttagctcaaggaaacaagagggtgagtacccaagtacccaaaatgtacccaaggctttctgtatatgtcaatcgcagcccaaggaagtttctttgatcacagtcctggtttcttagtgtcttggctaattttggtcagggttgtggggagcaaaggcaatgttaatcatggttggggcaggtggaagaggaggtgtttttcttttttttttttttttttttttttgagacagagtctcgctct

SEQ ID NO: 3280 - DNA, 4690 bp, Homo sapiens
ttttcagaccccaactgtaaacttgaagacaagactgaagatggagaggcactagattgtaagaagaggccggaagacggggaggagttggaagacgaagctgtgcacagctgtgacagctgcctccaggtgtttgaatcgctgagcgatatcacagaacacaagattaatcaatgtcaactgacagatggagtggatgttgaagatgatccgacttgctcttggccagcttcctcaccttctagcaaggatcagacttcccctagccatggagaaggttgcgattttggagaggaagaaggtggccctgggcttccatacccgtgtcaattctgtgacaagtcgtttagccgcctcagctacctaaagcaccatgagcagagtcacagtgacaaactgcctttcaaatgcacctactgcagtaggctgttcaaacacaagcgcagccgagatcgccacataaaactccacaccggggacaagaagtaccactgcagtgaatgtgatgctgcgttttccagaagtgatcacttgaagatccacttaaagactcacacgtccaacaagccatataaatgtgccatttgtcgccgtgggtttctgtcctctagttccttacacggacacatgcaggttcatgagaggaacaaggacggctctcagtccggttccaggatggaggactggaagatgaaggacactcagaagtgcagtcagtgtgaggaaggctttgacttcccggaagacctccaaaaacacattgcagagtgccaccccgaatgctccccaaatgaggaccgagcggccctccagtgtgtctactgccacgagctcttcgtagaggagacctccctcatgaaccacatggagcaggtgcatagcggggagaagaagaactcatgcagcatttgttctgagagtttccacacagttgaggaactgtacagccacatggacagtcaccagcaaccggagtcatgcaatcacagcaacagcccttccctggtcacggtgggctatacctccgtgtccagtacgactccagattccaacctctcagtggacagctcaaccatggtggaagctgccccgccaatcccaaagagtcgagggaggaagagggccgctcaacaaacccctgacatgactggtccctcgagtaaacaagcaaaagttacctacagctgtatttactgcaacaaacaattattttcaagtcttgcagttctgcagattcacctgaaaactatgcacttagataagccagaacaggcccatatttgtcagtattgcttggaggtcctgccctcactctataacctaaatgaacatcttaagcaagtgcatgaagctcaggacccaggtctgattgtttctgccatgcctgccattgtctaccagtgtaacttctgttccgaagttgtcaacgacctcaacactcttcaggaacacatccgatgttctcatggatttgcaaaccctgcagctaaagatagtaatgcattcttttgtccccattgctatatggggtttctcactgactcttccctggaagagcatattagacaggttcattgtgacctcagtggctcccgatttgggtctccagtgcttgggactcccaaagaaccagtagtagaagtctattcttgttcctattgtacaaattcgccaatattcaacagcgttcttaaactgaacaagcatatcaaagagaatcataaaaacattcccttggccctgaattatatccacaatgggaagaaatccagggccttaagccccctatctcctgtggccatagagcagacatctcttaagatgatgcaggcagtaggaggtgcacctgcacgtcccactggagaatatatctgtaatcaatgtggtgctaagtacacatccctagacagctttcagactcacctaaaaactcatctcgacactgtgcttccaaaattgacctgtcctcagtgcaacaaggaattccccaaccaagaatccttgctgaagcatgttaccattcactttatgatcacttcaacgtattacatctgtgagagttgtgacaagcaattcacatcagtggatgaccttcagaaacacctgctggacatgcacacctttgtcttctttcgctgcaccctctgccaggaagtttttgactcaaaagtctccattcagctccacttggctgtgaagcacagtaacgaaaagaaagtctataggtgcacatcttgcaactgggacttccgcaacgaaactgacttgcagctccatgtgaaacacaaccacctggaaaaccaagggaaagtgcataagtgcattttctgcggtgagtcctttggcaccgaggtggagctgcaatgccacatcaccactcacagtaagaagtacaactgcaagttctgtagcaaagccttccatgcgatcattttgttagaaaaacacttgcgagaaaaacactgtgtattcgaaaccaagacacccaactgtggaacaaatggagcttccgagcaagtgcagaaagaggaagtggagctgcagactttgctgaccaacagccaggagtcccacaacagtcacgatgggagcgaagaagacgttgacacctctgagcctatgtacggctgcgacatttgtggggcagcctacactatggaaactttgctgcagaatcaccagctccgagaccacaacatcagacctggagaaagtgccatcgtgaaaaagaaagctgagctcattaaagggaattacaagtgcaacgtgtgctctcgaaccttcttctccgaaaatggcctccgggaacatatgcagacccacctaggccctgtcaaacactacatgtgccctatttgcggagagcggtttccctcccttttaactcttactgaacacaaagtcacgcatagtaagagtcttgatactggaaactgccggatttgcaagatgcctctccagagtgaagaggagtttttagagcattgccaaatgcaccctgacttgaggaattccctgacaggctttcgctgcgtggtgtgcatgcagacagtgacctccaccttggaactcaaaatccatgggacgttccacatgcaaaagacagggaatgggtctgcagttcagaccacagggcggggccagcacgtccaaaaactgtataagtgcgcatcttgcctcaaagaattccgttccaagcaagatctggtgaaacttgatatcaatggcctgccatatggtctgtgtgccggctgcgtgaatctcagtaagagcgccagcccaggcattaacgtccctcccggcacgaatagaccaggcttgggccagaatgagaatctgagtgccattgaggggaaaggcaaggtggggggactgaagacacgctgctctagctgcaacgttaagtttgagtctgaaagtgaactccagaaccacatccaaaccatccaccgagagctcgtgccagacagcaacagcacacagttgaaaacgccccaagtatcaccaatgcccagaatcagtccctcccagtcggatgagaagaagacctatcaatgcatcaagtgtcagatggttttctacaatgaatgggatattcaggttcatgttgcaaatcacatgattgatgaaggactgaaccatgaatgcaaactctgcagccagacctttgactctcctgccaaactccagtgccacctgatagagcacagcttcgaagggatgggaggcaccttcaagtgtccagtctgctttacagtatttgttcaagcaaacaagttgcagcagcatattttctctgcccatggacaagaagacaagatctatgactgtacacaatgtccacagaagtttttcttccaaacagagctgcagaatcatacaatgacccaacacagcagttagtgcaagtacagtctctcaaggagaattgattttgtggcacaaaaagggaacatgttttactctttgcacgaaactttcattgttaatgtatattattcagaaacattgtattgtaccataaaacttgtattatcaaactgttggatgttcatgtgtttgaacttttgcgcaccggatagaccccttgtatataaagtgttgcacatgtattatgtcgtctgatactaaaatggtcttataaagacaagtggacttgggccctattcaggcaagattaaaaaaaaaaaaagactatgaccaaaatggcttaagataaagtatttttaaggaagaaagattaaaaacaactgttatacatgagactatggttggacttccttttctttacacttaagcctagaatttctctttaggtatatcagcgcttaaatccaagactattttttattgctgaagattcttgcaaaccatgaagagatgttctcacagaacagaaccccacagctggataaggcccgtatatatatatttgtaagccttgcaatgtgacaggtagcatcactatatatgcaatagttgttatgtagactgtcaaagaatttttttttccctggatacatttgaagctttgagtgttcaaggttttccttaatgatttcacgcagccaaattcttgaatcagttgaactaacctgtatgttactgttattaatgtttactctgcagtctgaacctggagattactggaattgttttccaagaggaaataaattcagtttaccattag

SEQ ID NO: 3281 - protein, 1083 aa, Homo sapiens
MQVHERNKDGSQSGSRMEDWKMKDTQKCSQCEEGFDFPEDLQKHIAECHPECSPNEDRAALQCVYCHELFVEETSLMNHMEQVHSGEKKNSCSICSESFHTVEEKHMDSHQQPESCNHSNSPSLVTVGYTSVSSTTPDSNLSVDSSTMVEAAPPIPKSRGRKRAAQQTPDMTGPSSKQAKVTYSCIYCNKQLFSSLAVLQIHLKTMHLDKPEQAHICQYCLEVLPSLYNLNEHLKQVHEAQDPGLIVSAMPAIVYQCNFCSEVVNDLNTLQEHIRCSHGFANPAAKDSNAFFCPHCYMGFLTDSSLEEHIRQVHCDLSGSRFGSPVLGTPKEPVVEVYSCSYCTNSPIFNSVLKLNKHIKENHKNIPLALNYIHNGKKSRALSPLSPVAIEQTSLKMMQAVGGAPARPTGEYICNQCGAKYTSLDSFQTHLKTHLDTVLPKLTCPQCNKEFPNQESLLKHVTIHFMITSTYYICESCDKQFTSVDDLQKHLLDMHTFVFFRCTLCQEVFDSKVSIQLHLAVKHSNEKKVYRCTSCNWDFRNETDLQLHVKHNHLENQGKVHKCIFCGESFGTEVELQCHITTHSKKYNCKFCSKAFHAIILLEKHLREKHCVFETKTPNCGTNGASEQVQKEEVELQTLLTNSQESHNSHDGSEEDVDTSEPMYGCDICGAAYTMLLQNHQLRDHNIRPGESAIVKKKAELIKGNYKCNVCSRTFFSENGLREHMQTHLGPVKHYMCPICGERFPSLLTLTEHKVTHSKSLDTGNCRICKMPLQSEEEFLEHCQMHPDLRNSLTGFRCVVCMQTVTSTLELKIHGTFHMQKTGNGSAVQTTGRGQHVQKLYKCASCLKEFRSKQDLVKLDINGLPYGLCAGCVNLSKSDGINVPPGTNRPGLGQNENLSAIEGKGKVGGLKTRCSSCNVKFESESELQNHIQTIHRELVPDSNSTQLKTPQVSPMPRISPSQSDEKKTYQCIKCQMVFYNEWDIQVHVANHMIDEQHECKLCSQTFDSPAKLQCHLIEHSFEGMGGTFKCPVCFTVFVQANKLQQHIFSAHGQEDKIYDCTQCPQKFFFQTELQNHTMTQHSS

SEQ ID NO: 3282 - DNA, 87963 bp, Mus musculus
  misc_feature (1)...(87963): n = A, C, G, or T/U
cttctttggaaacgcagtcacaaacacaatcaaagcccgctcttaccagtagtcttccagatgattctaatctagtcaagctgtcagtgaaggttcaccgtcccaagcggctaacagggaagtgttgatccccttccgttggcttcctgggatgaacaagttgagtctagggataggtatatatctatatctgattcatctatagtctcagattctcagaaggctgaggcaggaagactgttggaacttagaaattcaagagcagggctggtgagatggctcagtgggtaagagcacccgactgctcttctgaaggtccgaagttcaaatcccagcaaccacatggtggctcacaaccacccgtaatgagatctgatgctctcttctggtgcgtctgaagacagctacagtgtacttacatataataaataaataaataaatctaaaaaaaaaaaaaaagaaattcaagagcaggctgggcagcataaataagacaatgtctcactaaaataataaaataaaattgaatctgcacattctcctcagcttggacacttcagattacagctatgtgctgtcttaaacaccacaaaaaatccttctcctctcctcagcctttcaggtcctatctcaagtgagcaaagattcaatataatctaagtttcaaggttgcttccatgaattttagaccatcaagaagctaaggatcagtatctacttttaaaaagttctgatagctcatctgatgacttcctagtctgcaactctatgctctggtgagtgggggcggtccatggccttccacccctaacggaggagctattgagagtggtggctgctaggagaggggaagtctgtcttcttgagggatgtgatcgctggcagctgggctatgcttaggtggatgtccccaggcccatgtgtgtatgggcaacactgattgcacactaacatacttgaaaaagaatgagagcacatgaagttgggagaagaacatggggtaggatctagaaggagttagagaagagtgggatatcatgaaaattattacttacatgtattgtattctcaataaataaaaaatactagtgaaaaagtcatgacgtgggggaggggcatgagggtagaggaaatctagaaggagttagggtaggggaaggaatgaatatgatcaaattatatgtatataatatacataattatatattatacacaattatatatattatatatatatatgtatgtatgaagttctcaaagaatacattttttttaaaatttaagatagtgtcgcactacatacctctggctagcctaggactcactatctagaccaggctagccttaaattcaatgagctccaccagccgctgactcctgagtgctggttttaaaagcacatgtcaccatacctagccataaaaaatactatttaagaagaaattagaggctagtgagatggctccacagttaagaatttggactgttctttcagcacctgcttcagggggttcacaatgcctctggctgcctcatttacccactgcacatagatatacataactaaaaataatattttttaaaagaaactattttggggaagggaacctctagatttacctctttcatgatatctctgatcagccctattttaatttcattgttagatatgtgccagtatggtagaaagaactagaactgacttgagcccacacactgggcctgactggggtcaagctgtggagatagagggtctgttgatagaggaatattggggtaagcaaggtactcagtgggatggggagacaaagtgagggtcatcctagcctgtgggggtcacagagagccttgggtgagagctacagggcaaacccaccaaagaggaagaagcagatgttaatgtcatcaccagtgagcacgaagtcatggctgctgctttcctgctcagccttttgctgccaagacttttagtttggtcaggactgtggacacgtgagaactgtgtttgctgaggttgggcctggatgtcagctggggaaaaaaaaaatcaaataagtcaggaactctctggctggggatgtggctcagctggcagagtgcttgcctaccatgcaggaagcattgcttgcctaccatgcaggaagctgtgggttctttctgcagcacagcataaactggatgctgtggatgttgcttattatcccagaatttaggaggcacaagcaggaggagcaagagttcaaggtcgtctttgactgcataaggaattttaaggtggcccaggctttatgatacaatataatataattaatataatgtaatacaataagatacaataaaagaataaaacccagaagcttccttggcgtggctcccacttagccaaagtgctcagttaacctaccccttgtaccctctccaaagctcttaccatgcccaaagcacctaggacacttcagcctatgtcctctgcagctctgatgctccgaagcacaccagccaacatctgctcccagcagatgagcacacacttgccaggagaccctgaacctgtcccttctggttagactagttctataattaaggtcttctaccgaacacccgacacacaccccagccccgggtctttttgcagataaacatttcaagccaacagccttcctttcattctctacagctaattttttaaaaaccttaaatgtagttgtgcctctcggctacaaagataagtatgtttttatttggagccctggataccagattgtaaatccaatgccgtgtgccggaacatgtctcctggtgggtggctttgctgggagctgagctgaagtgtggatttgaacattttctgttgcttcccttatgcactcatatgtagatagcgtgttgcctggcatactctacatccccagtgaatgatggtttccatgaaccaattaatagatttttccccccatcctgaattttgatgctacaatattgggccaagcatcctcagatacttgtgaccaaaggtctgtggttgtagcattgctgatggtaagggggaggggctggaagcctctgttctaattcataacagtatcagtcaaatatagcctttgaccgtgttgaccaaaagtacaaatttctgggcccctctgccaaaaatcccagttcactgaacccaaaaatggggcccagggcatgagattagtaagcttcttatttaattctacttcaagcaacgtaagaaaacattttccggactgctcagatgtcaaatgtccaatgcaggcccaatgagagtacttttatgtatcattattcacatataatgcttcactttcttttcatgtgtatgtctgtctggtgtgtgtgtcctcatgtgtagccacatacatgtgcatggagaggccagaggtgggtgtcagctgtctaacctcgatcattcttcactttatttcccgaagcaggttctctcattggaaccaagagtttgcttgccagcttgtcctgggattccttgcctgtgcctaagcactgggattacagatggctgccatgctcactcaggcttttatgtggatgctaaggatccagtcctcatgcttgtatggcaggcactttaactactcagccacctccccagccccagtcccagccccagccccagccctggccctagccccgaccctggccccagccctcacaattctctggaaccgcagtgtgtcttacaagggatcacattgtgtacttctataagatatttttcttccttaagagcacataaaatagtagcagagtcatagtctgtggcatctgaagggtgatggatgtgacaggttgattattgtagtgtgtagaagaaaaatcacctccaccattgaaggctggattttaatgttttgggctctcgtttcgctctatatatggctagtgtacaagtctcacatgtgcgtatgttttacctgtaggctgaagagaagaaatcgttttggaatgaaacaagcattttgaatttttgcccccgagtatgaaatactcccaagcagatgcaaactgtttgtaagatgtaaacactcgctggtggtacatagaaaatgtgctgaggactgccttatttctttgagtaaaataaacctgttgatagccatccattcagatgggtaaagatcatcaatattaatgcaaaactatgagtgacactggcttttggtcacaccactgcagccagtagtaatccatggaactacccttgagagctttaatcaccgagcttatgtttctccctccaaccccagccgaaaacggtaacaaaagatctgggaaaggcctggatttgggaaattacatccccgcttctctgcctctgcttagttgtatgttcttgaaaccaattttcactggacttttgaaatgggtttgtatatatgaaatagtagatttttttgtagacaataactgcacaaaacagtggatttcaccatgacacctgcatacatgtatacactgtacatattcacacatttttaccaacagtctctctctttatcctcccactggtccctcttcccaaatagactctcatctactttcattccttaaaaaaaaaaaaaaaagtagatactgattctgaaacaaaacatggtgatacttgtgtacatatttgtgtgtatgtttatatgaatcattttaagaaaattatctgtctctcctttctcttgtattcccttttcttgacatttttgtgtcatatggaatctgtcatttggctatgggtcaggcatggacatcaggacaagtttgaggcgaggcagtagtctgggcttctttgtactcagctttttgtctgccctgcctaagaaactaaccagtggtcaagatcgaaaagaccctcgaggtcaagaccaacagctcctcttggctgagagccacatgtcactctgctctcttaatgcaatgcattttacaggtggctctgttggccctttggatgcatctgttctttgttgggggaggctgccacaggtactatcattactagcatcccaatccctacccactagatgccaatgaactctgacatcttgtacattttaaaatttttaaatgcatttagctgagtatagtggcacatgcttgtaattccagcactttggaggctgaggtagaaggattactgttagggattatagcctgggctctatagtgagttctaggtcagcctgggctcctgagtgagactctgtattgaaacaaaaccaaaagcatgtagacatgccaaatgtagtcaggagacatggaatcatctaactgtaaagccattcttctaataaggcagagggcaagaactgtacctgttgtggcatagcaacacaatcaaattttataggtactttaaaaattatggctctttttcattttgtcagatagctgataacctgattagtgcagtcaggtaaagggattgggtttttgtttattgctattgttgttttaaatcaattagctggtttttcagacttgttcctgaaaacaaaacattttagacaatgcaagaattaagccattcagctgtcgagtatccaaagctggatttttaccatctgtcctggagccaggaggctcatctccaggcaggaggaagtaacaacgcatgtgactttggctgcgcctgtgtgtgccatggctgttggtgtggctgtggatcgcagcactgactccccagagtttcctgctttttcctcctccttcctcccatcaaaacggaatgcaaagaaagaaggagcttgatcattaactggggccatcggccgaaggaaaggggaggggagagatgtcagaacatgtgagtgcccaacatgtgcctgcatgaccctgtctgcttagccagtagaagacatctctccaagaagccagggaagaagatacagcggttggcagggcgggaggctgagcctcagcagatcagcttctgcgatgcataactgactacagaggtttcatctgaaaggccatgtctgaaactggaccacatttagagttaatacctgcccagcgggaaagcttaagaatggggatgggactaggagagaagtgtcccagggctgtgggaatcgattgcaggtaacaccccatcaagggctgaaagtgtattttccaactgtaaatgtattttctaactgcggaagaactcagtgcgtagttgatgaatgaacgaatcactcttatcaatgagtgaacctttaaggaaaaaagcattcgaacgctgatactcagggtagtgctgataggatgggtcatggtcctgttggtggagatggtcacagccgctttagcctctgaggttttagccccagggtgagtatggtctaagtagttggtagaagggctcctagccacatctgctaggctaaaaagagctaaccaccagtagtgtgcctggctgcagagcccaacccctcagcagcacaaatgacctgcacagcacaagcgagaccacagctttgtgtttggcatggctcctggaaatgcagaacaggcttctttattccaggctccaggctcctggctcgagaggagcactgcctggttgtgaagcattttataggattataactggttgtgctgaaggagagctctgtaaggtgttttgtattgttacttttagggaagctgctattaggcagtgttgctcctaagctgtcacacacacacacacacacacacacacacacacacacacacagagtcaggggagagggcatggctgctgctctgctcagaggaattactaagctggtccaacctccctcaaaatcagacactagcctggctctgtgcttgagagccctccctctcatagggcagcctgttgctaacagtctttggttactcacactccgacttagagtcccaggcagattccccaaatcccaaatcagcaaataacaaagcagaggggagggcctgaacctggaaacaaggcagaaactgcacagggttaaaaaaaatacttttaaaaatcgttggaatatcccatagaccacatacaaaacttgtacatcctatttcaaattcctggcctagtataacacacacacaccattcatatgtatgtgtgtatctttaagaatttaaaaacaagaaccctgttttgggtggtcagacattcagtctatgagaacttgggaaaatcagacccaaggatactgaggtcattttgtggcactatttaagtagttgtgctatttgcaattctctctttctccttccctccttctctatttccccagagggacagtaaaaattttgctgcatgtatgttattcactgattctatggttcctagtattttttaagaaaggcaaaataagtcttaagagaaaatgaactatatatggtaggcttcttattaatatatgatttttgtttgctgtacagtaattaaatgtgagcttccattccccttcctcatttcacattcactgtgtgtgtgtgtgtgtgtgtgtgtgtgtgtgtgtgtgtgtgttgcccatgtgtgtgggtgtcagtggaggtcagaagaggctatgagatccttaggagctggacttataggtggcttcaagctacctgaagtgggtgctgggaattgaacttgaatcctcttaaagagaagcaagtgcttttaactggtgagccaactctgcagtcctcttttctctccatttataagagcttatttattattaccatgtgtttttgatgtgtcacactgcctggtcagtcctaagaacactaaagcaccccaataccagggctgtgggaatcgattacaggtaacaccccatcgagggctgtaagtgtattttccaactggagaacaaggcccagtgaacttcactggggatcaaggctcattcccaaatgcactgttgatgcccagggtcttgtggtggagactgtgggtgagcttggaagagcagggcagggtaaaggaagagaggctgtggaggccttggctctgggacatgtcactacctctgggcctggcttggttgggcacccttggaaatggggtttcctctgcctaacactatctttggccaagcttacaggtgtatgagcagttctcacatgccccttctcattccatgcctcttgctgcagctttcttcttgttgcatacttgggaagaaaaccgcaggcgctttctccagtctcaataggaacccactcacttcagagccctgtttacacatacactccttcttgactccagaggcagtctgtctgtctgtctgctatctagtcaggcaagataatgagtgggtttagtgccagagtgtggatttggtacctgaggtggaagatctgcaggttaagcagtttcctgccaggaaaagtaggaactgctgggtcctgacctcatctggaagcaggtctatatttcttcatcacactgcctccttcacaccccagaagcaaaaccaagactcagtacctctctgtaacaacaccctccgtatgcagacctttcacgggaggagagaaagatactatagcaaagtttaagaaatgttatttggaggaaatgataacttaaaaaaaatgaatctttttttcccagggtgatgtgaatatatttttcttttaagatgttgaaaattgttactgtaactgtaaagcctctttgtccactattactaaccttttctatcccagatgtttctcctctgccaccagggagagtgtaagcttgtctcagattcttctagacattcaatgttgttgacctccaagtatatctttatagagaatatcaaaaaaaaaaaaaaaaagaaaagaaaagaaaaaagagagaaagagagaaaaaagaaagaaagaacaaaagaaaaggacagaaaagaaaagaaaagaaagaaaaactcttttgtagctgtgttttgaacacaaactgtgtactgctttgttccgaattgttacacattggatactaggaatcgaactcacagcctcacacttgataactattctcccaaagcccggcattcccagccttttgcaattattttccaactgaggccaacataaaggaactctttcagtttcacacccatagacccttctcctctctgatctctatggggtggtgttctataattagaaaagcttacttaaatactcttactaaagactgttaccattgtttttagggttttgtttgttttgtttcgttttgttttttgtttgttgttgttgttggggttttgtgtgtgtgtgtgtgtgtgtgtgtgtgtgtttggtttttttttataggttggtctgggctgcagcaacgatcttgtaattacttcttgggcatttaaaacgtcagtgtttccccagaaaagatccccaaaagcgtggtcttcgctctaagctggaaacagactgaatcagtccagcgtgggtgtaggctgtaggtgtaggggcctgtgtggtgggggaggagaggggatggttagaggggactccgttccttccgtactgcgtggtggaaagtatttgtctctcagctttggagcttggtttcacggtgctttttgaactgcacttaaaatgggtgcattttactgtttggactgcttttacctactaaagcttatttttagtaaaatgtatccaggacagccagagatgtagagaaaccctgcacacgcaggtttcctcccctaacccctcggaaagtgagagcctggcttgggacttgccccctgctctatcagcgtttgcctagggtcctggtttccttgctacaagctatgtagcggtctggggtctggcagctccacgcaagcgtcccctgaggtccccaaagtctgcagaaccgccccagcctcaggaggcgtctgtaagttcgcacctggcgctccttggagggcggggtgggcctctctagtcccgcctacccgccctccctcagtgggcatggcttaaagcggccccgcccttcccggtggagcttaggcgtcaggtccactctgcaagaagcagctgtaggtgttcgcatcgccgtcgcctgcatcgtggagctcgggccctcttttacccgggatttttgttgtcgcctgaaattagcggtgacatctcaaagggcaggcccggcagccgccatggtggccaaggattaccccttctacctcactgtcaagagggcaaactgcagcttggaggcgcccctgggcagcggggtggccaaggacgaggtaggacgcgccctccacacacctgcacctccgggcttctctgccacctcaccctgtgtaccgctcgctttctctccgtctcccccacgtgctgcgcttctccagatcgccccttcaagtgttccctctcacgccttctctgtgggtcctctatcgctgccctgctccctgagctcgggaaccgcagatctttgatgctgcttctttccttccgagcgactggcagaccgaaccccagtctctgtctagagcctgcaaaggcacctacctacccgctgccctgttaggaaggcccgggtgtcgagagagagcctcgtaaagcaatgtctccccgtccccggccggggttaagagagctaagttcttggggaccggttcagacatttcaccagacacacttggttttgtagctgtttgagagcaagggcgggacagggcacctttacttgtcacaagtaaccaataaaggaggttgggggaagggtgtcgttcattttgggtctgagctaaatgagtaattgaggctctccttcatgactgctgaaaacgagctaaaacgttggtgaatgggaagctgacttgaaatgctagaaacagttcccattctgggaacttgggcgcggggagaggggcagtgcccttgggtaatccagggagtcctctcagtttggctttcttaggctttcctctcccacccccatgtgtcctgtctctggcaaattgctgactgcccttagaagttggttaggttcagttgggggagaagacgattctcattctttttcaaggttttagagaagacagttaattgtcttatcagactccagttttgctgtggtggagtccgtaggaccagctcatcatgtcgtctgtctgtgtgtgtgtgtgtgtgtgtgtgtgtgtgtgtgtgtgtgtgtgtgtgtgttcgttctccactttcctctgcctcactctgagagactcggggtgggcagtgacgctggaggcaggtgtgtgtcccgccttgtcacagcactgttgattccacctacacaacacatgtaggtctgcttggtgtgtgcccttgacgctctgaattctgtataggtgtgttttgggggttggtagcatcagagatccatttcctccaacaagattgcctcccttcaacaggactccaccagattctggttagatcctcctttttgtttgctgagcacaagataagcctctggcctttccgtagctagttgaatatttgtagagtttgtagtctcagcagctgtggaagtgtagtgggctctcatctgtttggtaccgtcatggagttcaggttgatagagcctagaatggatatgagttttcagtagcaatgggactggtggcttctccaactcctgggaggagataaagcatacctggtttggttaatacattaaagtgggccagagaagataagagtgaaaatcgctgggaattctgaccaggctttttttttttttttcatctttttgtcttgagttttggggtcctgtggtaaaggcttgagtgaacctgtctgcttattccttcttcccttgttagtcatagtctgtagatatatatgtgctgtagcatttcaggaacagttatgctaattttcctcactactaataggatccacaaaataaagtatatcttattttccctttgtggggatgtaattatgtaaaaacaaggatgggaggtgagtgcttttggggaatattggtatttttcagggatcaccattgagttttattaatataattgtctttaccataatcaaagtacactttacacaacttgatggctccgactttgttggtcagctataaatcacttcccaataatgaagataggctagattggaaaaagaaacttaagtgggtttcagggcaagtttcattagcacaaaaggcgactgaacagaaatatatattttctgccggtaggtgtcgccagtatttataaatgtctaacagcaacaaccaaaaaccacattccctcactgtcttaaaaaaaacaagattatataattgtttataaaatagatattaagtcctgagaacgtttctttttcaagaaacttttctttttttgtaaaaagaacgataataaaaggaaacctgtgtgtctgaaggccttcctgagatgacaggacctgttgaccttcagggcgcttgtgtcgagcacctgtgcctggcacaattgtgtgatggcagttcctcctgagcatgttcgagggaagaccgtgtgtgcagtgtggccgtggctgcagccaggttcttctagcactcagtcaccagcaacttgatgttcacttaacagaaagctcagcggggaacaggtaaccatgccatctacctgaggaaaaatgatgaatacattctcttaaaagcaaataataaaatttctcttcagggtttaattcaaatgcttctttttaaaattttattgatagtttccagtggaagcaaaaacgatacatgtttacattttttctttaaaataatccattttaaactttaaaaaaatattccgcataggttatgatagtgcatgcctgatattttgtatcaactaataaaatagtgctgcttcttctgccatttcttacatgggttggattgcaaatactgctcctaaacctggcgtttcttatgggtgtatgcgttggactgcaaatgtttaggtgtaatgcccctgactaactagccataaaattctccagctctcatcatcactgtgaactgtgaggagctttttacacagctttggattttcacagaaaattgtcacgtgatacaagcagtttattaatgtaaccttgctcagtttatctccattttcattgtcatgaaaactttgatctctgctcactccaggactgctccgagtacctgctcagttccctaagtgggaagctgagaacgctaatgaaccaggctgattatcagttcaaaatctgtttctctgtggtaaggtttactttaaatagaaggtgaggtttactttaagtagaaaattcagtagccaggcatggttaaggaagttaaggtgagggcaggcttctaagagttgtaggtcaacattatgtttactatttgtgtgtgtgtgtgtgtgtgtgtgtgtgtgtgtgtgtatgcatgcgcatgcgcgcacgcatatgtgcaaattcaagcatgtgaaggttagagaacatctacctctctctctgaaatgttgaacgatctggggattggactgaggccattaggtttgtatacctgttgctcttacctgctagtccatctccgtgacctcagtttcatttttaatggaatccagacatttttcttgtgttaggcttggcatcctggtaggcttctcactttgggcatagatgtgttccttggcatcaggcctcattggttggtggtatttctagccattgcttcatctcttggtgcttataaaaatctcagtgcataggtaataggtgtagttcatgaatagttgaatattaccctgggctcccaaaagtataggttctagtttttactcaatcagtagccttgcatagtcttatgaataatggcatacagtggatataaaattaaagcattctaccatgccaggatctcttaagactccttgtagctcatcacaaaacatatattaaatcccagctttgtgaataaggacaccaaagaaaggtgacttgcagaaaaaatacaaagaaaatccaactcgatccaagattcaataccagattttctgatggatttagcctggtgttcagtacttaaaaaaaaaaaaaaactaatggaaaaaaatgaaggtaaatgcaaaacagacatatataatgcccccaaataaatactgtcttttaaacaggtaaccttaactgagaatgtacctctgaagctttagctacaggacaagctgggccccatgttcttcggtgatttgtgcctcccccagtcaacaactgtatttgaaagttgtacccacttagaggtacactctttgggtaccagttaccgagctaagtggtcaactggttttctggacttagcttttcttggaatctacattgtatagtattgaactgtcagtctatatgggcatgcaaacagccatggcagctattacaactaaatcctaaaagttctttagatggcttagtaggcctcagatttctctgggtgaaaagctgcacagtgacccagagagaggtcaccactcactggtagttctgattcaggtcacttgttcccctggaagggtgtcttgcaggtacagttctccaagatgagcacatagtggataagatatcttagaggaagggaagttaactttatccatgaggacttttaggctgttccagggattgactctggaataaggctatctggtccccttatcttccccacaacctgatagtggagtgacttgggcaaaccattgtgctagttttcatgatcataatctaaggtaatgatagtgctgcctcctagaaatgtagtgaaggtcaaatagggaagttcatgtagttcctggcacatagaaatctcagtgagtgttatccagcctggtgtggtgactcacacctgtaatctcagctctaggaggtagggtggaagtattcatgagttcaggtcaagcatggattataaatcaaggccttgtgtcaaaaaaagagcaaggtcatgtgcatcaccctagttaatgaatacacacacacacacacacacacaaacacacgtatctcaatcatccatgcatggggggagctccatatgtatgtccttcactttgatcataatcacaatgatcatatgaagttagtgctaccctctgtctttgttagggttactattgctgtggtgaaacaccatgaccaaaagcacattgaggtgaaagggtttatttgacttctatttccacatcacagttcatcatcaaagtcagggcaggagctcagaggcaagagctgatgcagaggccatgggggatgcggcttaatggcttgcttcccgtggcttgctcagcctgctttcttatagaacccaggactaccagcgcaaggaggtagtaggctgatactactaccgcagcaggctgggtcctcccccatcaatcactgattaagaaaatgtcccacaggcctgtgtatagcccaatcttaacaaggcatttttcttcctcctctcaaagttgcctcctctcaaagtgactttaggatgtgtcaacttgacataaaactacccagcacgtcctgtgttgtaaaaagaaggaaagactctgagaacgatgtcatggctgagctatgtggtagaggccccaagactcacagcttagtctggctgtgaagtctgtactttcccaaccacatcacattgccacaaagtgactaaatcaccggtctcctcaccacacggcacccgaagggtgaacctgctgcctgccccagaaattgcctcacaatccaaggctcattttttcttcagtgagtgagagacccaacctccagacagtacttcagtagcccacttcatagagtagcaagccctgattgaggaggttttgctaatttcaactctatgtgtctcaagaccacaaaggagatctctgccaaaactctccgtgtccagcaatgtgaagctgacaccagtacttctattagtcattttgcttatctacatgagccaccagccttccacataaaccagtattgagggctcaactaccatctggtttctttttaaattgtgtcctttttttttttttaaagacatccctaattgtgcaccagtgatactgtatttataaatgatggatgaaaataaattactggtcccatcctaatcaatcttgcaagccctcagtaaatttaattgttattaatggtgcgtttgtgtatctggggcgccttcattggtgatgtatgtgatcagttgccttgtataatttgtctcgtgaagaacttgctgtgattgcatttccccttgtgttaggtcagacactgttggcagtgaaggccagaggtttctaatgctctctcctccccatccccacccccacttgcccttttttggttttggtgtaaaggagctactggcttaggattaatgtacattgagtaggagaggcttgtgaaccttcagctggctaggaagagtggtccctttaagtctaggagcacttgaacatgttcctctgagtgttgggccattgtgttcttttttcaagaaggcagccttggttattagtaaacttcaattaattggagctgaaccagaaagcttaacagtaaatccattggtctttttttttttttttcctggctcttacattgaggaggaaggagaagcaaaacaggctttgcttccagggacttaaaaaacaaatagaacctgctagggaaatgaccctaggtcaccgcatcagagtgccctggtctgctgggaacaggtgcccagctctcatctagctgctggatgcattcgatctctgtttaccacttccagggagagaaagctcccagtatgtgagaccatcttctggctttgttcagtgtgcttcatgagaagatcctctggttagagcactgcttttcagagctgttattctagtgtactttcttgtgtatcctaaatatttggaaattgatgtccctctcctaatccctcccagttcacatccttgctcacaatcaactcaggtgtgttcattctgtctccttgttttccttatttcaccaggacatcctaattgtgtccagaaatcttgaatattgattagcccagaaatactataattacactatatcatgatgttaaatcaacaggtttctttcttgatgtaatatgcttccttaggtaggagaagtagaagaatactttgaaaaatattttagaaataaaaacaacagggctaggattagtatctctgtcatataaataatctatacagatataaaatggtctactgacagataggcaaaagacaagaatacgcagctcacaatcaaagaactgagggctaagattgttttagatgttcaccttaacagaaattataattcatacccaaataatattatggctatttcatagaaatgacaaaacacagtgttgtggatattgtctaatgcaatttgtttgtgtgtgcacactgaaagacagaagacagggttttgcacttgtgatcccagcactggggaggcagaagcaggccagtccctaggatctgctggccagccagcctagtccgcttgttgagtttgaagccaatgagagaccctgtgcagatggtacctgaagaatgacacccagggttgttctcttgttttcacatgtacgggaacataagtgtatacacagagatagatgcacacatggacaaagacaaaagagatttgattcagatctttgggcctactgttcaagcttgcttgggaggaaatatatgtgcagagttgttcataatgatgcttgtggtagtgttcattctttcagtgtgtgcattttagaaatcgtagagcattcttatatcctttggctcacctgaatataattatttgtttttaaaacaagtgtacaaaagggaaggaagcttcagtggtttccccagggtcatacagatggaaatggcatagtcagaggtggaagtccatcatccttgccccaccgattctggacctatggtgagacagaacatcatggctgcaggatcatgtgacagaggctgttcacctcttggtagactggaagcagagagaaacaaagggactggggaccaagtctaaccttcaaaggcatgctcccagtgatctgattcttctacctggcctcttgcctcctaaaatctcttagtgcttctcaaaatagtgctagtggtgtcttagggttttattgctgtgaacagataccatgaccaagtcaactcttataaggacaacatttaattgggactggcttacaggttcagaggttcagtccattatcaaggtgggagcatggcagcatccaggcagaggcatgatgcaggcagagctgaaagttctacatcttcatctgaaggctgctagtggaagactaacttccaggcagctaagactagggtattaaagcccacagtgacacaccttttcaaacaaggccacacctcctaatagagccactccctggcccaagtatgtatagacaatcacaagtgactagagaacaagtcctcagtatgtgcctgttagagacattttatacacactgtagtactggataagacaaagacctttttttttttttttttttttttaaatcaaccaaggcaagaaaaatgatgctcctttttcccagtcttcaccactcggcttgccaacatggtgaccgaagcagctactcgttagtaaatggagttagctgtaagcagaactgcttggaaagtgttacaaatgaagcccattaaagttggctagaactgtgcacaaagtgacttcctgtttaggtcagtgaatgggtgacctttgccctggtctgtaattcagaatcccaaactgcaaacaaggacttactttgtcctcagtaggagatcactattagagtgaaaaacaagccacaaagaatggatgaacataaacttctgcacatgtaggtgacatgtgtcgacctgatgctttttgagttctacagatgcagtagctacagaagacacaataaagagcaaggagacgtacatttcccaagatgctctttcatagatagtattagaagctggcagtctgactgaatcaaatgaaactgagagtctaggtcaggcccttagaatatcatacactacagtgcgtaccggctgcctgatttagacatttggagtatttctgcgagaagaagccacagaaaggaaagtaaatcaaataatggaaacagctgaagctgagcctagtggccagaagggctaaggcttccgtctagtcatttctggcctgaacttgtggctggtgcaagctccctcctcaaaggtgttgcaacaatcccaggtacagctggagaagatatctcagaggtcactggaggagaggtctttctgccatgttgcagattggactcaggggccctctgtgctaatatgcacatgctctcctgctgagctgtttccctagtgaagtcttaattctagatgtcacacatcttggaaatgggggttggtagggctaccagtgtcctgtagtcctcatttgttttcacaggccttgtcttaccatcctagtgtctgcttggtgaggtgtgtgtgtgtgtatgtctgtgtgttgtgggccaaggaacttgtgaccttgccaagggacttggaaacaaacctctgtgcaaagggaagtaaactcttagaagaagataaaaaagtctgatagctaaagtgtgagccactaagatggagcgtcatctccacccccttctgcctccccaccggtttccttccatgagtctgtgcatgtttcacactgaggctctaagggcctgcaacagtgaactttgttctgacatccacagcagtaagtggaagctggcttcgtaaggctcctaaatgcaaatgtctaacttggctctgatgagagcttcccactagagaacaggacacaggtaggctcgaccactcagaacccctgagtctttgcttctggaaagggaggactggactcagtcattattttccaaaagataatgtcatgcaacttgtgacagctcaaatgatgcagaaataagagccaaagtaatttaagtcactttttctctcctgttatcttcccaagggtctgactaggtcaggtcactttgaacctagtatatctttatcatccccatcacttgctaatttccccttttaacaaagtgtaagaatcagcttcagggaagggcaaatatttaacaagagcctaggaggtaggagtgtgcatgtacattataggaaaagatctttagaagtccacttctggacacacactctgtggcctgtcttcagctcccccagtactaagggttatgggcatgtgctgccacgggcagccttttacgtggctgctgaagagcaggtcttcttacatgactttttttcatttaagggggttgatactttgtttttacaataagtttactgttatttaacaaactaacaatttatgggtacagtatgtctcaaaaaaccaaaaaaaaaaaaaaaaaaaaagatggtttctctgtgtagccctggctgtccctctgcctcccaagtgctgggattaaaggtgtgcgccacctcgcccagctttttttttttttaagatttatttattagtatatgtaagtacactgtagttgtcttcaaatgtaccagaagagggcatcagatctcattatggatggctgtgagctaccatgtggttgctgggatttgaactcaggaccttcagaagagcagtcaacactcttaaccacagagtcatctctccagctcctgagctgagttcttaatcccaactctgggctcttgtaagttgaagagaccttgggcttgacttgccctcttaagtgttgcttgactcaccatgaagtaggatttccaaaaaagaccaaaccaaacaacaacaacaataacaacaacaacaacaacaaaacgcaaaatggggaccacaggacttcagttccttagcagccacagccgcttctatttagagtgtaggtctttgagtagaagctagggtggtcagtctatgtaacgaagttactcatcccttcctaggcaataccaagttggtttcccaaatggtccaaatggaattgttgttgttgttaataccaagtggtcccaaatggttcaaatagaaattttttcttgttgttgatattatagttattgttattgttattattattactactactactattttttttaataaaagatattctaagcacactggcaagcctcacatctttctttgcaggtaggcgaaacatatctgtggtgtgattttatagttcctagcatgagttttaaacaggagatggtgtgtgagtctgagtacagatgcaccctggccattgaggcagcttcccgctggcatatgcatcatccaagactcacccagggctgaccacagacaaagggaaaccgatgagggtggatttgattgctttgagctcttcctgctgtagtctagcaggacatcttaattacaaaagggtcctttgttagaagtgtaggggaactccacagtgtagtgactccattggtaaagaattgagtaactaaaaatatgacctctagtgttctttagctgtcagtgaacaagtactgagacctgactgtgtctattgtttctccccacatttacaaagaaagaaaaaagcatgctttctgtctatttgagtgtgaccaaatcattagcaaaactaaaatactgatacttatggtcgtccgtctgtgatggggtgctcagtgaggaacttgaaagcctgtgaataccgtgtattagaaagtagtccagtgagaccactgatgctggaggttgtctagcccaggtctacccttagagggtcacgtcatgtctgctggaagcacatgggtactctggtcccagagtgacaaggctagcaaacagcaggctcagcttctcctgttttcattcctgcctcaggcttcacctctcttctgcctgtgaagttgcagttttccatccaggttccccctggattaggaaactagaagaacccaggcctttagacaggcgagtgaccttgagctctgtatttgctaggtgatcctgggcaaactctaaagccctttaagtcttctttgcttgctctgtgaaatgggacaataagtaccactgactcaaggcattgatggacagaaagcccttggatacagactggcagggtacggccctgtgtatgccttgctgttgtgccttgggaggtcagggtgggagtggcaggaaaggctttcaagtcaggtagatttgaatgtcagctctgctgattaattacttggtaaaacttggagcaagtggtttcctttccttggacacctgcttcctcttctataaaatagggtcctggcgttgctgcctggggtagacaagagagtatgtgctagagtcaggcagagaacagccttggcagcagggcccactaaggcttgcagggccagctacctaaatgctgaggtagaagggagaaggatccagtgcagaatgaatcttttctccatccacgtgtcttttactacctgcattgggggttggaggtgggagtgtcctctaccccagaaatacataccatattcagcaaaactgcctttgtttcttctagaaacttattgacacctgttgcctctgactccaaagctccatcattttgtttgacacagcaatctgtgactagtcttcctttttttttttttttttctggtttttcaagacagggtttctctgtatagccctggctgtcctggaactcactttgtagatcaggctggcctcaaactcagaaatctgcctgcctctgcctcccctgctgggattaaaggtgtgcgccaccaccgccccagctagtcttcctatttttaaatcacattagccttcagtctcctgattatcttttgtaattgaaatgagctgaactctagagctcactctctcccaggctccttgccgccttgcagataccttcttttccatattcgcacatgtatgaattctagtagaccctaaatgattcattcctttgtattaaagtctgggggctagaaagaacacacaatcatggttcaaggttgcaaatgtagagttgagaaagccagggtctgaggtgagctggaaaaatctcttgttagtgaacatttaaaaaaaaaaaaaaatcctgtcttaaaaaaaatgtgctgcaccatgagaagtggccaagcaaacagcattgtgttctgcgtgagcgtgcacacccatcctagggaatagcatttggaactatttataaacttacttgaggggtgtgggatgacagaggaccatagaaatctattgcacgtcaccaccctcacacttaactgagcagcctactctctaccttatttattcacataccattgctcattgggtggcatggtgtcaccccaacatgaaggtttaaattaatacacacacatacacacacacacacacacacacacacacacacacacaaacacatacacaaacacacacacacacacacacacaaacacaaacacatacacaaacacacacacacacacacacacacacacacacacacacacacacgtttccagttcactgatttttctcatgtcattgtttggttgttttttccacgtagaataaccagatttgggtttatcctgttctctcttgggagctgaatgttctaaaatgttctgtattccctggttggtaaagtgtggggacttgctgctgagggcacacgtgggccaggcatctgaagggataaaacgtgccactgggtacagctggcacatggcagaagcatcacacgtattttatgtttctttctggaagtcacgtccctgaaaagcttccttgctcaaaaatcattgtcaaagctaagaagtaaccagaaggcaaaggagtgtatctgctctctcctgcagcctgggtctcccgccccatgacaatgcaggttttatctagcagccaaatgtgatccctgccttatcttcagccttatcttcagccagactgcagacctgtctgtcagctcagctccgagcgagatgcatgtcatcatcccagattcagctagaacactctgtcctaccctttgggacaccaagatggagatctgcgcacgtggctctttccatctctgtacttctatttcattttctgggaagctaagataatgaatgctgaactttgggagatgacaggtagatagagaggcgacacatgtgaatccgtagtgtccttactgaagcaaaaggcaccatgtctgtgtgagaaacgttctgctttgtatatctgatggaataaatacccagcgtacctatggttgcttaatcccagacagtcctggcgcctggtaagactgcgtaccagctcctgtagagcataattcagcagagtgttagcagggcctatctcgtgcagacctcaagaccagcgtactggctcccccaaccctactctggttgatgtcttaggatttcaccactgttttttgtcctccagcgtagccttgaatcctgccaagcctctctcagttttactaaacagatgataaagccaggaatgaggaaggagaagccaggaatgaagaatgaaaacatgccagtggtcatggcagtggaaggtgaattaggaagtatcagggaatggcagcgggctggcgagcaggttggaggaggaagcaggctgccctttgcactttggaataggcaagtgctctggtctcatctgggggctcccactgaggtgggcctatgacacacacattccacagagtctcccatgctcccccacacaactctaggagggtcattgtacttcacagctagcaaaccaagccacaggaggttacattattggctcgaggttctaaaataatagtctctggctaggaagatgggcttatatttatcccagtatactttgtaaagaattgctacattctttgatcaaactaacaggaacgttgttaccttctgcagaggcttttgtgagtctgttcctaagctccccgggagcctacaaaatgtcttaaaagtagtcttgagatttgtacacgccagtttcctcaactctaaagcagggttggaaggcccaaggcttgcttttctcctacccagcccagaggggttggggtggaagccaggatatcccttccacagtgataaacaaggacagaacttagtcccacccacaagttccaagaagtcagtaggaagtagctgaggaactccaaagccacaaaggccttccttagggcccagtggccacgatcaggctattagccatctcttaggtgtcccatgggtttcatctagccggtactgtccccagctgtacctcattttccagacctggaaatgggactagcatgtggggcatattacttaacatgtaacattcctgcccaaagtgcccttcccgagattcagagcctgggggcacagtcctgccggcaggcctcctatctatcttgtcagaaggtctgactcctgaagtgacacacagctctaagattctggccctgtctgcttcagtagagtaaaaaaaggtgctgcttgaagttgggcaggcagatgtacagccaggccacagagagacctaaatgtttggcttcctctttctctgaaggtctgtagaaccgtgtctgagcatgaccaagaagagcttcaggcaatagggactggcgctgactgaaaggaacttacaggggtgtgggtgtgtgtttctccttctgcctagggttaagtaatagcaacatcctgtgtaagagaatttgaatgtggttttcagctaaactccaatattttagggctatttattagatgtgtttaatctcgggccaatttagccagtagcagactaataaaataacaaatgtgggcttgctgccaggacaaatgttgatttacccttctaatgttgactaaaatgaataactttgaaagtaattgaggagggaggccttagccagcgctccagtctgaaacagtggctctgtttcattttactggcactcctgagagattgtgtgcataacctgggctgctgcctgttccagctctctgaggggcccatattttactgagttattttccaaagttcttttctttcttttttttttttaacccctccccacctcaaacccataaacctccattcaggaaaaaaaaaaaaaaaagaacgtcttcgtggcaggcaagtaggattctttagtttttcaaaatggggcccaaacttcaaggaaatgagaaataaggcaataatttacgctggggggaggtatatgactctagtgtagtgcactagtggaaaggctggtgaaggaacgaacacccttgtttgaagccaggctatatatgtatagtgaaaccctttctcaaaaatagtaattttaataatttgttgatattctttcttcagaaacaaaagagcacaccctggacattacccccttggaatttgttatggaatgaattgtttctctagagtacaccaaggttcacccctcctcactggccccagccagggcttcttcattttgctgttgagtttaataaaattcgagagggctgcaattactttgccagcgttgtcgtaaccagtgagttcatttctgttctttctattgttttgtttttgtttgttctgttgcactgtatgggaagctgtttgggactgggactcggatgtgtctgagttcagccagctgtcttgatgtctctctgttaacccaaggctttcctaaaagcagatgcctcgcagactgatgctagctcaggaactatagctgccagtggacctttggagctctctggttcaggcaaagtgcttgatacacaaagaacaaatgtccttcctttaatcttagcaaccttgtgctgtgttttagtgccgtttttgcttgcttggttttgggtgttgaatcaggacttcacgcatgtcgaaagcgtgttctaccactgaggtctacctcaagccctgcccggtgtgtcctgtttcatggcttggagtcagcacttcagctatgacttctccgtcatctactcttgaatgttaccatgacccaaggtgggactgctcttctgcacctttgtccagctgtgtgacaggctatgtatggtgtgtgcatgagcctgagctaatgtggtgtgctccctggatggagattatgtcttctggctctccttgttctcccattaggcaaaacaaaacaaacaaaccctaggttgttttttgttctcctctgaaagaaggaaatcggggtgttttcctcctagcacctgatataaaagaaagaattgagccatttcttacatgggaaatgctccctgcatgcccaatgcaggacgtcagactcacagctagcacaaacaaacaagggcatgatcctgtgtggagatcagctactccacaactccacagcacaagtttcctggtgcccttctgaggttttgtctccaaagcccagaatccctgttgaaatcatggatcaacatctgcaaaggaaaaattaggattccgagcagagtttgaagagcgtttgctcatcttgtgggttcaaaaccagtaattctgaaacccgtgtcacttgcttaatcaatgaagccaggtttccgctggaatttgggcttcattatttgcctttcatcttctggtgacagatgacacccatctaattaactatgtgccaagagaaagagagcagggaaaagaataatagtggaaattttggaattaagagtgatcatttcattactgtccttttgtttccaacaaaagaaggtagagttggcagccagctctaagaagccatcttctcttgtcttccagcctcactcctctgttgctcaaaccattctaagaaggcctcctttttcgatctgtgtgtcctgtctaactgcctgtcaccctgccctgcatgctaaccccctcacctgcccctgctcccttccagctacagatgacactggctcttggggctccttcaggatctacctttgtgtttccctttgcagctgggagacactcctggaaaggtaacacctatgcacttcagtgaagctcactttgtacccactaggtaaacaaatactccctccaacaaaagcaccagttatgacctgtcacggagggaaacccatgggcaccttctttcctagctcctgtggcaaagacccataacctgagtgatggaagcacctgtgcactgtggctcccagtaactggtaccaaggtgtcctctgagcctgcccaggactactcccctgcctcttctgctttctattgtttgcttggaattaagaggagtcattggtgttgtctgactttgtgaatgcacaagtccagtctttacctctctgtcatcatatgtccagatctgtgtgtctctgtctaaatcttctcttcagataaggacatgtatgactggactctaactagcttgatctcatccttttgatttatttataaagatcttagttcccaataaggttacagtcacagacactgggtttagagcttacgtgtatattttcatagatagctggactgaaaacatgtctatatatatttttttttgaggggttaccatagccacatgtctaagctgacatcactagttatcagacccaacaacatcacgtcccctttgatataatgtgctttaaaaaagaaaaaagtagactccttggatgggatctcaccagaatacaaatagcaaactccctaaacctcatcagtaaggaacatcacaccagtctacactgagagacagtctgtatatgaggaccagtgttctttcaatgtatcagctagaaagctacagtatggggctggtgagatggctcagtgggtaagagcacccgactgctcttccgaaggtccagagttccaatcccagcaaccacatggtggctcacaaccatctgtaatgagatctgatgccctcttctggtgtgtctgaagatagctacagtgtactaacatgtaataaataaattaaaaaaaaattaaaaaaaaaaaagaaagctacagtattttgctgtcagattatgagagagcattgtgtgtatgtgttgcggggggtgggggattgtcactgattgggagaaccatgacagataaagcagtgaaatataatgtggcatttccaattggatcctagtgggaaacggggtaaagtcccagggactcccctaacatttaaggtcacggtgttgggccaatgctagcttctcggttttcataaacattctctggttgtgtaaggtctgcgctttagaggaagtgtggtaaaaggtataggaaacactctggactatttttaaaacttgtctgtgagtctaaaattacatcagcatcaactttttgaaaaaacaatagacatatatggagtggtaagttcaccgtctcttgaaggcaaaggtggaaagggatcataagggacatacctgtttgcaagtcctgttccagacactgtgcattgagcacttgctagtcacggagcctgtgccctgtgtgccatcattatctgtgtggtagagtggcagagcagaggtgcgttacccggtgtatggtccatatttcctctgctgtcagaggtatgcgacctcaactgggtgtctgtgatccttaggcctctgtgcactcatctgcaaggtgaggatatgatgtgagctctgttctgaagatgccatgagcatatcatgtaaagatctgaggccagtgccagccacaagattccaaggtcctaataaaagacagctggtctccccagaattcgccagagtcgttgtgaggttctttcccaattttccccttgaagaaattgtggataacatgcatagcacgacacaggaagtaggaggaccagaccaagagaaatgacagcttgatctgtaaaatgcagctccttcgcaagcactttgtccaaaaaagcattaacccaagagggaagactattagtagttcttggaaggacaagctacgcagcagattgtccctgtccgccaaggggctgtttgaattacagcttagggttttgcagggggcagaggcggtgcaagtgttggtcagggctgattgaaaacaactgatgggcaggaaaggtgttggcaacagcaggtgtggcctagaatgaaaacaactgatgggcaggaaaggtgttggcaacagcaggtgtggcctagagttcttgaagagtgagagtcttgaatgtcaactgtaaatcccagcgaacactttggggctctaagaagagggtggtagagggctattgcagagtaatggactttacattgatttgattggcagaagcactttagagtggggaactaggaggccttagcttcctccttcctagaagagtggaaatgaaaagagaagcttgagttgggagggagccatggggaaagcaaagcatgctttcaaatcaagataaatagggcagggtctgaggactcctgtccgtccaggacagtctgatcctcaaggcatcctttttctgtaagcttctatagtaaatcagttggcctccactggatcattttatgaagtttagtggttcggagcttgtgtgtgaaagcattaataaaagccgaagcaacaacaacaaaaaacaacagaagtctagtaatataaaagtgtttggggatcctggcgtctgggtgcctccccagccttgactcaatgtcatgacatggctctcccagcttccatttttccagtagtccacatcttagttgagagttctgatgctcggcggaggatctttctgccctatttcttttgttctgatgatggctgcttctggtccccctctatcacagggttctactaacaaactcagggtctcctctctctccccttctgcatctgatgatacatttttcagaatgattttctgtccattataaaaaaaatatttttaaaagataattttgctctgtgccacctgtaagattgcagccaagtctgttctttggacagttgtcgaccagtggtaccttctgttttcttcatctctcttccctctacctccttttattgtgatgtggatctcagcaattgtgtcagttaaaagggtctttattcgtacatcagaggaagctggtattagtttagatggatttatttaggaagtaaaatgtagggaaacagggatcagtcctacagaaaggaaactaactatgcctcctgctcgtcaggggaggaccctacgaccccagctccagggaggaaatgcaaccaagctcgtgtcatgccaggagcccccgggggaggtaccatgcctaagggtgccatcttaaggtttgtcacttacagaagctgagctgaggttgaggaccactgagaaccatgtgactagacagcagccagcagtcagctctggcacacttcctgtgaggctcacattaaaaagaatgtgtttttaatagttgagaaataatatttttttgacatgaaattgtatgacgtttgaatttatgtgttcatcgatgaaaggtttagtggtccatgctcacattggttaacttatgtattatttatgtctgaagatgagaggatgagtgtgttagaggctgggtgctctagagagtctaagctccttactttctgctcttttacagaaaaagttagccagccaccaggcaggacatggctcggaggtcaccctgcttcaaattatagtgccttcctccattttttttcctatccagctgaatcattttaagcaagtcaatcagttgagacctcagtttcttcatctatcagatgggcataataggggttaacttaaaaacatattgagataaataaactagtggattttatgtgttgacctctgaaataagaacctgtagccaagctggatataatggcacacatctttaatcccagtgtttgggaggcagatatagtcgggccggtctttgtgagttcaaggccaaactggtctgcattgtgagttccaggtcaccaagagctacattaataagaccctcacaaaacaagaacctgtaaccagtattaacatgttatcatttatttatgcaaatcagttaccatgagttataagttagtgtttaacaggaggatggtgaaagccactttcaagtgttagagggtggactagaggtgactgcaaaggctccccattcaaacatccaaatgtttgaaagttgttattggtttgtttgtttgtgtatgtgccctatcagctcatgggcaaaggcatcccctggcgtgcacagtttacacctctgtcttgccttgccctgcagtgatacatatggtctcagacactatgctgacggctgcattctcagccactcctgcagagtggtgggggctcagtaaaggttcaatctcaaggcagctgcagacacggtgcacactcctccttttgcacccagccccactccgtctgaaacatgaaatgcagagacaatgaagggttccctgcaggtctattttggtgaaattgatttgaagaaagaaaaaagagaaactgtgctacgttgtgttgatgtcgtaggcagctttgtacacaatacagtctgctttgctttttacctcaggggaggagtaatcaggagccaggaaagtcactgtgcctccctagaagggagatataaaaaacacgttaagaaaacctcgtgttgacttttggtatagcattggaaatgtaaatgagctaaatacctaataaaaaatggaaaaaaaaaaaaaaagaaaagaaaaccttgtgttaaaaatacaatcatgccgggcatggtggcgcacgcctttaattccagaacttgggaggcagaggcaggcggatttctgagttcaaggccaacctggtctacaaagtgagttccaggacagccagggctacacagagaaaccctgtctcgaaaaaacaaacaaacaaaatacaatcacaccgagttttttgttctgtttggtttgcagttagcttgtgagattctttaaactgttgaataaattcctttatggaaaaatatgacctctgtggccatcttcattatctttcctcccctcccctcccgtcccccttcttttacttcttttttttcccctttcctttcctctgaataggaaaaaaaaaattgtaaaagtcaaaactaattcatgatagaaatttgcatcaaatttgatataagcagaactttttctactgataaagggtgtctctttcatgctcccatcaagtacaataaatataaaatgaatctttaaaaataactacattggcggggctggcgagatggctcagtggttaagagcgccgactgctcttctgaaggtcccgagttcaaatcccagcaaccacatggtggctcacaaccatccataacgaaatctgatgccctcttctggagtgtctgaagacagctacagtgtacttacatataataaataaatctttaaaaaaaaaaaaaaaaaataactacattggcaagtaggggagttgaagaccaagctcggcgattaacagtccttgccactattgcagatacccaggtttaatcctaacatccacgctgagctcacaactgtctgtaactccagttccaagggatctgacatctggtaccttcttctggcctccaagggcaccaggcacactcacgacacacacttgtatgatgcaggcaaatatttatacacattaaaaagggtttacataaataaatatttcatatatgtgtgtgtgtatattttaaaacacacacacacatactttgggacctgagagcctggggacatagccatatcaccactgagaattaatggcaagaagatcaggtcttggagatcagcctccaccacatagttctaggcgggcctggactgtacaaatacccacaacaacagcaacagcaacaaaatcattttggagtcagcaattagactagtgtatttgtaacttgtaataaacactctacaagcagttctagctagtgtaacaaaacaataaagcctagaaaagactaaacagaactgttgtattcaaacttgctgcccctccccccactggtctagagtagtgctgtgttagactagactggctctctgcaggttaagttctctcatcttccaatgacaaacctgaaaagaccctcggtattgcatttactagttagttctcagtaatgctatttacttagaatcttagaaatattttctcggagggttgtttagacaatagtaagatacagctggagacagagtgaataaatgaaaaagaacaattaattaggccaagaattattttaaatctcttattctcacagaagccctcaaggatagctccataattcatacttcactcgtgaggtcagacataaggcttccctgcttagatcctgttctggggcttacacctgcctgcattgccagcactaaatcacagcaggatggcttctggttcattcttctttgcttagcaatgttagatcaccagagagcagcctgctgttaactcacttgggggccatgcctctgagaaggagttctaaaaaggattccatgtattagcagtgtgctgggttagtgttgcattgacgatgtatcctataactatattaggatgtagataacacacatctgagtgggccatctaaacggagcagcaaagtcagaccaaccttagaacacatgacacgcaaggactagatcctcctgaagcctgccaagtgtgcagcattgttccctgtcctgctttaaaagcaagatgccccagctgctgctcactcttcaacctccccattctgatacagctttaactgtgggaatgagactcagcctctctgggctctgaggtgcatgcaggattattgagaccaagttctttcccctgggatttttctcgtgtgctgcaatgcggtttataccaccaaaggaagcgagatcacaacatggcatttctagactaaagcagaagccatttggaggaattcaggggatacttaagaggctgtgtgtgcacacatgcgtggacgcagcatgctgaggatgcagaaacggatgatgtaaaaagggagactcttaagatcatcctctgggcacagatgctcaggagcccaggcaccgggcagggagcatcctgaaggacatcattgcctggaagcagatggcttttggacttttctcttcagcaccttatcctttgtagtggcagccttcattttaggagctttgtctgctgcattttaaaacctagccttcctagtgttcctagtgctgccttctgtctgctcagcatagctcactgagaagccagaggtccctggcttctggatccattctgtcttagaaaagcaactgactgctttgcaaaccacacagcttactctttgataccatggaactgttttgaacgtctttaagtttaatttttttttttctacttaaaatgtcagcaaagttgatagagtctcaagagagggcttctgatttctgaggctagcaagggcatcgggcgacatgaaaacttcccggctgaattccagattcatgaaggatttctccaagcatctgctgtgtttagaatggcctgcaggaaccccttgaagaatgagaaattctgagtcaaactttgaaagcaatggctgaaaaggaaagatgaaccctttggggtaggggtcgggcgagctgccttaggaaatgattgacgtctgctacaattggctgacttggcattttccatcacaatttgaggtcttcatgtgctgtccagcatctactgcaggtcagatggagcataggaaagcaagggtaactgtcctctttgtcttgtaaaatgtttgctctgtcttttccctctttcccccagcctgttttatttgtattattcttgttaacatttattggattaagaagtctccctctcccctctcagccagctccggagtaacttacagatttgcaatcgatgttttctgtggaggtgactttgaaaatgtgtggctataaatagtatagaaaccaaaaacccatgatacaaatttctccctgtacatttcctcttgccattagatattttaggaattttaatacgtgcctctctgttattataggttcaaagatgctttcttatatcctagaaatgaaacttctttaaaaatgtttggagctggtcagatgtcccagcaggcttgccaccaggactgacaacctgagtctgatccctgggacccatatggtggaaggagaggaaccaactacagaatgttgtcctctgactctctcccccctatacacacagacacataaatgctttttaaaataggtttttaaatttgatgaattaaaagcaatctttgtaactttagaaaaatgaatggataaagcatactcaaaaatggccctggcaaggtgacaggaaggattttttgaaaaaatgaaaccagaaacaacaacagacacgccagtgtctggcaaggtcactggctgggaactctctacagcaatgggaagaagggttctattagaagctttgactgaaaagctgactgattggggggtggggaagggggggtaggatccctacctttctgtcacccactgcttcagtgtgcctcctccgtcttttctctttcatggctccccagccagatcacctgtgcagatcctggggcaccgttcacggtctacagatcaccctgtcgcctgcaagtctcagagcaggatggatgtgatgttgtggcagacatctgtaagattggtcttgacactgtcctcttttttttttttttttcttttatacaggaacctagtaacaaaagggtcaaacccctttccagagtcacatcgctagcaaacctcattccacctgtgaagaccacaccattaaagcgcttcagccagaccttgcaggtaagggaacgtgggcttgggcttgggcttgcagagagccatgctgtgctcatgcacctagcatctctgtgggtctccggtggagctgaatcaccacttgctactgtagaagagtgcacaggtgaaggggaataaaaggacgagaaatgtgtgcacgccacaaccccgggtcaggcagggtcagggccacttctgatagttcatagttgtatgtctatgtcataggtcctatccgagtgtatccttactggttttgtgcagcaatttctctgaacttctgaattatcagtttgtgatatgagctggataatagtagaacctggtggtttcagccagagttagaaagctatagggttagggggaggaggaaacctgcctcctccctgcccatggctcttgaagatgctatcaacttcaagtgtttgtggggagggggaatgaaaaggatggtatttcttctatgtgaaaaccacatggaattttaacttcactgtccgtaaggcgcttggttgaaacacagccatgccagtctgattacaaaaaatgtttgttggcctcagggttagaacaaaatacccaaagtatcttggttctgtccattgaagactgccagtcgagggcaggtgacttaacatttctaagtctcgcttttattcctcagaggtaaatgtatcatagagtcaccttttgtggctcacaatgaaccacagctcctttgtagaattgtaaatatttatgagacagtaaattcacagggcctttagttattactagctatgttgtggctattgtctacagtagtaattttagttaacaagtgtgtgtggttgcttttaaactctatgatattttatttggagggaggcatgtgtatgcagtaatacttaacttaggtggaggtccaaggactacttacaaggaatcagctctctccttccaccatgcagacccagggatatctccatctctggttgtcaggcttgggggcaagtatcatttcatcagacctactctttaagttttttttttttaagatttatttatttatttatatgtaagtacatacactgtagctgtcttcagacgcactggaagagggcatcagatctcattacgggtggtttcgggtgctcttactcactgagccatctcaccagccccatcagacctactcttaatctcctcctgcagctcgccttttaaagtgaaggttgagatccattcacaaccttgaaaccaagtcataaaaatcttgttttagactgaaccccacaaaaggcatacaacgagggcctcatccccaccatagctgagtgagtcaggaatctgccgtatctcatttgtctcgaatacttgcacttagcaatgcttttatcttgaccttaaatgtttaagaaaattgtagaccaccaggcggtggtggcgtacacctttaatcccagcacttgggaggcagaggcaaggtggatttctgagttcgaggccagcctggtctacagagtaagttccaggacagccagggctacacagagaaaccctgtctcaaaaaaccaaaaataaataaataaataaataaattgtagaccagctgttgtcagtgaagatttctccttgattcttatcttctcaaaggaaaagatttagttaaacaggaagtttaagcaggagtttatgtagtaaagctaagtattcacggcagagagaggttggagaggttgagctaaagacatgcctcatgctgaccatcagagctggaggatgctatgagggtctcctggacccctttgcatccctgcttccttactgtcagagtggatgcgccacagccctgtgatgtcatccatccccactgctcaccccctttgcttccagcccctctgttacctctgctaactgttactcatgaatggtttaccacccagttagccccggatttggctctgtatgctcagtccttgggactatgggctcctggttatactttgacctcttggtaggaagaacaaaggaacaaactaagattctgtgggggggggggtgtagtcagcctgcagagctggttggtggagaaggatgtgtttgcgtactgtgtcccttgtggccagtgtctcaaccctctggacgacttcactgcaggcttttcctggaagactcattatcacctgagtcctgcacatctggtcttttgctgagttctgctttttgaaaagtctttagactgtcgactgcatttgactctttcctttctttccaggctaatgaccatggttcaagttcactgtgagctctttcttcccttgatgataggactgttctctggtggcctctctccctgttgtctcccccaggatggcccaccctgtgccagggcggtttccactcgttcactgggcactgggcttctccagcattcagggtgcttttttcagggtagagttgccttctggtagatttagggcagggctgtgctttctttgcaaaatgacagtaacaagtttgattagaatagctagccagctttcacctgcaagtgtcccctactctacagttattcttggagcgctgggtccctttacttactaacaatgccttgcctggcttgtagacctttgaatttgtatttctgagaacactgtgttctccccaggaacctaccttgattgcatacctttaccacttttctttagatttcccaggccatctttattctgttttctggttcctagggcacaggaaacactgcagaaaacagatgattgtcttagaaatttgcattgacctagagaactggggggagagaaatgagttaaggcatgtctgaaaatttagcagactgagaccaagcgaagatgagagtcagacccaagggagaacccgccatgtggaaattgccttctaaagcttcaaagatatctttcttttgcgatataaattttctactgaacttttgtgactgtcatgataaattgttaaccctaggctgtgtgtatgagacagaaatagaaaagttattcataatgcttctacacaaagacacagagaacttgagcaatgtgttattatttgaagggatgagattagtgcatagaaatacatctctgagctcagatctgtacacagcatgctcaggtaagatctgtgagagtggtgaacgccatcctgcacctggctgtctccccgtagtccaccttgagacatgcaatataagcctctcggccgttgtttaacaaactacctttctgcttcttgcctcccgaccccattgctttccctaccaactagaaagggaaaagaaacggggaacatgaagggaggtgccagcttccaaggctgccccggaaccagtttcataagccttcaaggttcctttaggtctccatgccatttctattgatggagaagcaagacaaggggctactgctaagggcccaaccctcctggtcctcagcacctactcaccctatatacctgtgtgtgtaatttctcttctatttcaaaaatcatttgagcatgaggcaagttggcttatttgtttgccttctatttctttatttcacttttatttttataataataaagattaaacgtagggtcttgcgtatacaaggcaagtgctttttgctttggttttaataaatttttattacgtttttattagtgcgtgggggtacccctgccattgtgtgcttgtagaggtcagaggagagcttatgcaggtcatttcaccatgtaggtcctgatgactgaactcagattatcaagcttggtgggtgacaagtgcctttagccactgagccatcttttctgtgtgtgtgtgtccctctctattgttagtgagacagggcctcactgtgtagctcttgttatcctaagactgtctatgtatcgaggtcatcttcctgcccctgcttccaaaggacagggatgaaaggcatgtgccaccatacctgacccctttttatattttttaaatttgggaacaggatctttactaagttgcctaggtgggccttgaactctctctgcaacccaggcagtcttaagtttttgattcccttgtctcagcctcctgagtaactggggtaccaaagctgtgccaccagacccagcaggcatcttggttttctggtatactactcttatttcattggctcctgcactttagagacatatgtatcctttggatatccagtttcgtctctaggttgtgttcctttaatgacaggccaggcagtgacttagacccaaacacaaggcttccatcaatacttagtggttccccctctggcttcctgtgagaccatagttagcggaggaggacacaggggcactctgggctggcagcctcttgcagaaagattaaaaagccatttacaaatgtgagtggtctttgaggcaacacactggcgggtttgttttctcttgcctcccagcacccatatgggctggaaagttgggtctcagcacaaaggcagcatttacggtgtcgactgcatgatactctgtcagttccttaccagaacggtttagcacagggctgctggtaaactaaagcacagatgtctggatcccccaaggcccataaattccctcttcagggcgcctgagagggaaacctggcccagctctgaaaggggccggagtgtgcacctctcatgtggaacagggaataccagctcccttgggccagctacatgctgagctctgcctctccgtgcacagctgcacaggactcctggacacatttgtgccaagtccagcgaggacagagttcgttgccttgtgatgtccttcattggctttggagaggaacatctttctttctgtttcaaaagtgtgtgtttttgtgggaaagtacagaaaaagtgaaaggaaaaactgaatgtgttaggcttccactccaaaacaacccttttaacattgtaacctttctcctcagaatgactttggatattagtgtatactttatataccctgagcctaacgtaaggtaacaatctgtctagtcacacttgtgacaattgggggtgcaagtgagtgttcaatgtctcttggcctcacttgggggcgatcacactttcattaaagtcaagatctctgtttatttccatcaatagttttagtttaggtccccatccccaccccctgtttttaggttgttttgaatcaaggtctcctgtagcccaggctggccttgaacttgctatgtagctgaggagaaccttgatctttctgcctcttcttcctcagtgccaagatttctgtcacgtaccattatccctagttaatagggattgagaatcagatctgaggccccatgcatactaggcaagtgttctaaccccaggcttgagaaggaacgagaagtccagcaccatctatctacacctgagacataagtaggaagttcccatgggtatatggacttaagggaccatgtctgacaactatggtttcttttcataaatttgctgtgaatggcaaaagttttgggtccctggttactttgcatatatgcaggtgagcgtccggcacacgatgggacagctgagaagttcccagtgcctcctgtcaagagggactcctcatcctagcttgtccttttttgtagagttataagtggcctttataaatgatcaacttgtaattgtctgcagtgttgcagcccctattccaagtgcctgacttccatggcctccagtcacctcccccagaactctacagggtgattcagggtcatctatagagcaaagaaccccaagctttaaacctgggcccagggtcacacagtcagcaagtgctgcaaggagacctgctggccgtgctgagtaccacttctgtggttaggtttctaaaaaaaaaaggcaaaacactggtcataataccgccagtggtttgccaggagctaaaaatagccaccagactttggatctgaagcatcctgcattcagctggcccttattttgttcaccgcagtgggaagaggcattatttccagctggtggaatactttgtcatgggcattatcgtttaagagccattcatggagctggattaagatggtgggtggctgccccaagccactgttttagtttgggttttttatgactagtgctgaacacattggtaatggtttttccacacctgtatcaaatactgtcttcagcttttcattcattccactaaggatttctttgagctccaggagggtattcccttgtttggggtcttaggtgtttggcacttattgattctaaagtgtttggacacccttccaccgtgttttcaatggccattcattcatgaaccgtgcgtgtcaagatgtgttggtgcagtttctcttaaagtcggtgtccatggccatggctacttgtcaaccaatttggttttcttagttatctctttgttatatgaagtctgcaagataaatgtagagaattatgaagttgaagataaaaccccaccatccaagggtagacccctgttaccgttttgtgtattttaaatggagatctctctactctttacttggctctgtgtgtaattttctacttacccttaagcttttcaaaaaacaaaaaacctgttattttatttttttaagaaaagactgtcttttaagccatatgctgtttttgttttgtgataagactttactccctgttgctgagcaccctttggccatatccaggtttgtttgttctggagccgaggctaccaaatgtaaagtctgatgcgtgcaaggcaagctctgtaccaccagctccacgcccagctgcttatttccagatactgggcttttataaatagcagcgccatgctgatggatttctctctcctgctggttattttagtgaagttcttccaagaagctacttggtcttaagtcactctgagatgttactgctgttgtctgtggatgaaagcatccaagtatttcccccttgtttgtgacttcacttgccccacttaaggctacccatgatcaactatgatttaaaaaaaaaaaacaacaaaaaaaaaactgtaaatgaaaactgctaagaatgaacaacttatatattaacaataattttgttgtatggattagctgtgtgtacctgtgaccaggcgtctgacaaacacaagggaggaatgatgtgttctggatcgaggtttctacagttgcttggccccatgaatttgagcagagtgtcatggcggcaagagcacatgacggaggatgggtgtctgcatcctcatggaccacgagacaaaaggagaaatgcctgtgtcctgttggtcctctcctttctctcttccattctggggttgcaggaagcccaagggatggcacatgctccccaccttcatgtctggtctttctttctcatttaatctctgccggaaacacacccagaattgtgtctcaatctgctaggtattaaggtaataaagaaaatcagtcttcatagttataatgtattgctataactattcttttattaattattgttaatcttttaatgtgcctgatgtatgaagtaaactttatcataggtatgtatgtatagacaaagcagagtttatattaggatctataatactgtggattcacacatgcaccagaggctcttgggacatactatcaatcattgccggtcccatggataggaggggactgatgggtataacaagtgttattggtagtattaatggtcttgcaatagtagataggtttcaactgctgtgataaagcaccatgaccaaagcaacatggggaggagaagaaagggtcttacaggctacaatgcatcatcaggggacgcaaacacagggagttaaggcggtgacttagtcagggttttactgctgtgaacagaccaagaccaaggcaactcttataaggacaacatttaattagggctggcttacggattcagaggttcagtccattatcatcaaggcaagaacatggcaacatccaggcaggcatgggacaggaagagctgagagttttctgcatctttatctgaaggctgttagcaggatactggcttccaggcagctaggactagggtattaaagcccactcccacagtgacacacctgctccaacaaggccacacctccaaatagtgccaccccctgggccaagcaacgttccaaccatcccaagcagaaacctggcagcaagaactgaagcagagaccacggagacctgctcagcatactttctttcataattcacgaccacttgtccatgggtgtcactgcccacagtaccacccctactatcaatcattaaacaagaaaaggacccccacagacttgtgggcccacaggccactgtaatgggcacattttctcaatcaaacttcccctttctcggaggactctaatttacatcaagttaacataaaaattagcccaggtaccagccatctcctgccactgtgtattaagcatctggctaagctgttgccctacctccaaccctcacttcagctttgggaggttctaagtattgtcaaaatatgagtctactgaaagccagagacatgagttttcctagccacatggattgactcagagccacatcagctctgggagtaaagcctttgtttccaactcaagtctgtgttttggagatgaaccactgtgcacacagtccctagtcctatccctggccttaccgtgtgccagtcacttagtcctctggtccctgactttctcctgacccgttccttgtagaagactagcacgaaggtccgatgtgatagagccactctgtgggacgaaagtgctgctcctcggtttcagcagactgaatggagcctttgggaaacttcttcgggatactatccaggagtctttagcaactacggtctggaactttttgctttaacccaccgctgcagccacagtggatcacatttctttttccggttccatcctagcttccaaactgtttactgttgaaccatctgctcccagatagctctgtagtcaggatcgtggagagactgtgcctggccctagctctgtattggaacatgttatctttggctatggagaccttctgttttttacgaaaggacagagcaagcacccccactgacagacagctttaacaaatcaactctgccccacagtgtctacctgctgagcctacatttcctctgacatatgtaaatggacctgtttcctacccaacagacaatctgctttccacctgcaacatctttcctatattccagcttgggtataaacatgagtagccattttcaaaatctgcgtttgtctgtctcccacatggctattgttattttagctgccaacagttaacaagctttgggtttctacttattttcagggctcactttcctcatggaaactctggcttattctgggacagttttcattgctatcctcaaatcctcccaccccagcaggtctatgtacttgtttctgtggttatgtggtctcatccaaggttgagcctgtcactttgaaatggaccagtgtttctcacctaaggggacataggtagtgtctcaagatgttttgagcacagatgggttgaggatgctacttgtatgttgcagttagaaaccaatacaaaccaatgatgttgctaagtgttcaacaatgcacaggacagctctccataataaaagaacttgtctacttcagaactgagtggccacaagagtgagaaactgttacaaactaagaagtagcatgaaactttggctcacacacgccttacatgagagcagaccaggattgtcatttcgaatgccacaccccctggtttaaatgaactatttattcacttcatggctttcatcaaatttcaccttctgtgagcctcaagtgtcctatctgtaaaatgggtgcaagactcctacttctcaggttttgaagaattctaaagattgtctctcagtgcgggcatagaacaactctctcctttccctgacattcacttttttacagtgcccaagttgttgtgccctcacaggtgtgaaatgctgagaaatctaccagtgagtgaagcagaccttgtagatatttatcattgcggtttccatatgaagtatctatagaacctttgggaggtggcacttgctggagatagtggagcaggtcttgagggttttgtggttcgtcccagcttcttgtctctatgttctgcttggtgactgtggactcattgtgagccagcaactgccctcatgttctggcagccacacctgttctgtcgtggatagattataaattctaaaactgtaaataaaaataaatccatgagccgggcgtggtggcacacgcctttaatcccagcactcgggaaacagaggcaggcggatttctgtgttcgaggccagcctggtctacagagtgagttccaggacagccaggactatacagagaaaccctgtctcggaaaaaaaaaaaaaaaaatccaaaataaagcccttcctcctgtaagtttcttcttgtcaggtttttggccccagaaatgagaagaataaatggatttgtcttctgttatgaagaaacagggaatcagaaagaagacagcaagatcatgaagggcaacaaggttgtgaggcaaccatccaagtacagaaaaataaagggtgtggtggcagggacctcggaagccttgtggcatttgtcctttgggattcttgtagcaggagtcacttcttcccccaactcagtcctcctgggtataactgccatttatgtcgctaaccaggccaggtgtcattcctggtttgtggctggcaccaggatgaacacctgccggtgtctgaagttcagggactagcagcggccactccttcctagggtcagacagctgtggaccacacacctgactcagttccattacagacagacccaggctctaaatctggagtttggttggccaccaatcaatcattattcctaaaactgagcccggtgcattttctttccttaagccagggtctttcctaggaggcaggacataggtctgctctctcactgaaaccttgggacaacctgtgagctcctgggactaatgtgtattttggatcctgtctgggcaagtgtcttagcacctccccatccaaccccagtctcagtaaatgaaagcagaccctcattctatgggggtgctgtgcaaatggaagattacatccaaagggctgaggatcagtgcgtgaagggcccttaagataattcccgtgacaccctgaggttggcagtcactaagaaagcccacacgaggagtcctgtgagggagctcctgtagggtaggtattcacctcttattttccccaagtagcaatgacagaaatctccaatggactgagcaggtcttgataaatgcatagaaatatgttcattatttcttatatccacaacacgatactagaatgcatgttgtgcactgatttttgtctgtgagatgacaatgaaatcccatctacccgaatgagagtgaaggcatgagctactctgtttctatctgggagaggtacccgccggcagaatagcctgtttcaaggacaatttggggctggtgagatggctccgtggataagagcactgactgctcttccagaggtcctgagttcaaatcccagtaactacatggtggctcacaaccatccttcatgagatctgataccctcttctggtgtgtctgaagacagctacagtgtacttatttataatagcaaatacatctttaggccggagcgagcagaggtcctgagttcaattcctagcaaccacatgatggctcacaaccatctgtacagctaaagtgtactcatatacattaaataaataaaatctttttttttaaagaaggacaatttagtaactcattttagcattgagtattaatgtgcttatttgagcaaagatgagatcctggaacccccagcaattcaaataagatgcaataaaaataaataaggtttgatggtctttcgactaagggaatccgccttcataaatatcagcccaggcacacaaagggcgttccctcaggtacttcttgtaactgtgagctgtcagaaatgatcctgctgttcatcaggagggcaatgagtaaggatgggccccacctagacatcagggtcccacatagcctctgctaaggagtaaccttggaggtgaagaaaatgtttgggactaggaaattgtttttggataccactaatttgttcactacaaagttggctaaattttatgttaccagaatttgctctcaatgtttttacttgaaagaaattttctctcttttcaattaactttttatgttagcaaacaaaacgagtttcatagtagcgtttccccttatattctttcctacattacacacaattccacacaattgtgttttgttttgttttgttattcactgaggtaggttttgctctacaactcatgttagttttaattgtgtacatggttggagggggtacatgcatgtgagcgccaaagccagtggagcccagaaaaggaagctgggttctctggagctggagttacaggtggttgtgagctgtgcagtacggatgttaggaatcaagatcaggtcctctgaagtgaagagctgcaggtggtgttagccactggacccctggctaacccctcagttacgctttgaaggatgagttttatatactactacgaaaaaggtatagttgcctgaaaagagaaaagcttgggttttgttttgttttgttttgtttgttttgagacagggtttctctgtttagccctggctgtcctggaactcactttgtagaccaggctgtcctcgaactcagaaatccacctgcctctgcctcacaaatgctgggattaaagacatgtactaccactgcctggcagaaaacattgtttttagaaaaaaaacaaaaacaaaaacttaggggaaaaaaaaaacttggaaagatgttaaatatgacaatgattgatgccaagaagtgcattttgggaaaaagtatttgtatctttaaaaattacattagctgggcgtggtggcactcaggcggatttctgagttagaggccagcctggtctacaaagtgagttnnnnnnnnnnnnnnnnnnnnnnnnnnnnnnnnnnnnnnnnnnnnnnnnnnnnnnnnnnnnnnnnnnnnnnnnnnnnnnnnnnnnnnnnnnnnnnnnnnnnnnnnnnnnnnnnnnnnnnnnnnnnnnnnnnnnnnnnnnnnnnnnnnnnnnnnnnnnnnnnnnnnnnnnnnnnnnnnnnnctcttgggggaagtccagtgttgctcagattgaagtgtgacgagaatggtgactgatcccaccaagtgaaagtggaaactgttgctgtgacttgtgccttctttgtgtgccttttcttctctctgttctaggattcccatctgcccatcagaaccacagagagagtgggccagtgactcactgccctctgcagacctttcagtctgtggttaattgattctgagggcaggcaagctacgtccacttggtctctttgctgtttattagggcgtgtttcagagagcctaagacttgtgcaacaccattagtaacccgggcaagccctttcttgttgtcctgcctgaagcaggttcagattcgtaagctcacctgaagctcctgctagccctggcacttgcaagactacaaaaaattgcttccacaaagccctggaaacaccccaaagccccttggaaacttcctgtaacattttccatttcctcaggggggaaaaaaatcaaaaagtaagccagaagtcagccatagcatgcatgtgagagaaaaaagagaaaccaacagcattttaaaatgtcggcttgcatgtggcttgcataattatgaagtgatcatacacagattttaatgctggtgaattttgcatgaaagagatttttagaagctaaaccatctcacagttttcttaaaggttagacagttctatcaacaggtaattctaatttatttaacggtgattttaacagtggagtcgtctcttcagtcccacccccaactctaatttttaaataaattaaaaacttccctgggggggatatgggggactttgggggaagcatttgaaatgtaaattaagaaaatacctaataaaataaatgtttaaaaaaaaaaacaacttccctaatgagttgtaagtactgaatttcatcgttggagctcaaataactgaggtctaccctatataaccttagtgatacaagctcacatgtcacattcaaaatcatttaaaatcaagttaaataaatagagaaagatgtagccactgtcctgtcagaggtttgttccaatggcaaaataggagagaggacggacattggtgaggcctttctaaaaaagagctaagcccggcagtggtggtgcacgcctttaatcccagcacttgagaggcagagaaaggtggatttctgagttcgaggccagcctggtctacagagtgatccaggacagccaaggctatataaaaaaaccctgtctcgaaaaacaaaaatcaatcaaacaaacaaacaaacaaacaaacaaacaaaaagaactagcactgggttgtattctgaagacaggtgaggagttggttgggaaatgggagagacacctgtgagaaagagacttgcttagagaagcactgagggttagcaacaagaacaaaaattaattaattagttaattaattagtaagaaaccactctagagagaggcatggtgatgggggagtggcagaagctacttctaaatatgtcactgtggtcagatcctttgccaagctgagtggagggtcacatgaagggcccagggacagtgccacaggaacatttgtttggggaggggtggatattactagttttttagctagataagttagcacacacctggcagcatcataagaacatttattaaagtgtatgtgtgtgtgtagggcccgggggtacagggatgttactggtttttagctggatatagtagtacacacctataattcagttctttggaggctggggtaggagggtgctgagattgagaccagcctgggctacacagtgagttccaggtcatcttatgttctgtaaccaaagaacctgtcttcttaaaaagatttattttaatattttaaagtatgtatgtgtgtgtgtgtatgtatgtattgtgtatgcattcatgtatatgtatgtgcagataccataagaggtcagaaaccagagacatcagacctccctggagatggaattatagttgtgaatgctggaatccaaactttggtcctctgaaaggcatcttttttttgttgttgttttttgttgtttttttttgtttgtttgtttgtttttcaagacagggtttctctgtatagccttggctgtcctggaactcactctgtagaccaggttggcctcgaactcagaaatctgcctgcctctgcctcccgagtgctgggattaaaggcgtgcaccaccacgcccggcacctgaaaggcatcttaacagctcggctatctctccattcccatgagaacttatctttttagaaaagaaaaaaaaaaggtatctttatgtatgtagtaatactctttgctttgtccgtctctagggaacatgttgaaatcttgcagggtaaagactaaagatgacacattaccttcctttggatgctttgtggttgtcatgagaaagccccatggtagtatatttcactcacaaggctggactttgggcaatcagatctctgttgtttttttttttgtttgtttgtttgtttgtttttttttttttgttttttcgagacggttactctgtgtggccctggttgtcctggaactcactctgtagaccaggctggcctcgaactcagaaatccgcctgcctctgcctaccaagtgctgggattaaaggcgtgcgctaccacgccaggctgcaatcagatctctgaacacagttggggcctctgcaaaagaacaaaacatgtcgggggtgggcaccatctggtctcagtatgcattttggtgccacattttgagttgatagaactctaactactggagacagaagattgtattagcccatggcttcaggcatggtgagatccaggatggtttggtttggttaagtttcctccctcactcagtaattctctccagcctttatcttgtgtgcccctttcttctcacctgtggtaaatagatttgttctgtgtgatcagggagaatggccacaagaaacttctgtgtgtgtcatctctgaactcacaggaccagaggaatactcctgctctttctcatccctgaatggggatcgtggcactctccatttgattggacctggagaagccaacgcagactatacaaggggcacccgggatagtggggtcctgttgtaggagatagtgggtttttgtgtatggttatccaccactgttttccgttgtgcttttgaagaataaacatcaaagggtgtgtgttggagagctgccttttgtgtgagcctggcctgccatggttctttagttcactcagtgtccaggtcacacagagagatatgtgaaaaggtgcatgggcggcagagggttcccactccttaaaagctttggccatgcccttcctttcttacagatgatttgtgtctgtcagcaacaggaagttgctcaaaacagatccacccagtcctgctgctgaccctatggtggtttctttttgtcgttgtgtagcggtccatcagcttccgcagcgagagccgccccgacatccttgccccccgagcttggtccagaaatgccacctcctcaagcacaaagcggagagacagcaaactgtggagtgagaccttcgatgtgtgtgtcaatcaggtgctcacggccaaggagatcaagagacaggaggtaagctcgggacccctggagctgcctgtgtgtctgtccatcagaaggttccctgcagacaagaatcagtttatcagcgctcagagccaggtctcgtggggagggataatgttgtaaaaaaagcaagcgatgttgcaatattgaagctaagtgtccggttaggattcatccactcacaaagacaatcatcttcattttatttatatctcttaccttttattgttattatttttgtttgtttggtttggtttttgctgttgttgttttgtttttgttggtttttgtttgtttttgagacaaactctctctttagttctggctgtctggaaactcactatataagccaggttggcatcaaacccagagatctgcctgcctgcctctgcctctcaagagtggggattaaaggcatggactaccgtgcatggctacagtcatttatatttttagtaacttttaggaagttttaaaaaatatttggcttttagaactttggtacacctttataaaggaaaacttctttcttgtggaggacagttaatttgcccataagttttctataaccccatctctaagtggctgtgatggcacccccttctctagagggtttgtcagtacagctttgctcgcttcttcatacatggtgctgcaaaacttgcagagaaccctttgcttttcctcctgtgtgctaggattattggtattcactagtatactggttctctctctgtctctgtctgtctatctgtctgtctgtctgtctgtctgtctctctctctctctctctctctctctctctaaaactacctgaggaccctggcaaaaggggtactaggagctattgaaatactcaaagtactatatggctgtagagattgagatggtgtgtttgtgtgtgtatgtacgtgcgtgcgtgcttgggtaacttagtagatgaagcaaggcacaaaacagtgctaccacatatctaaaatgattgtgtgtatnnnnnnnnnnnnnnnnnnnngaaatattttcacgcatgcacacacacatacatattatatatatatgaatgaatttgtgtgcatgcatgaaaatatttctggaaggatgcctaaaatattggcaacagtgtttcttcctgaagttcctggaagaagggcctgagagtgcaggttctttccagggtgtccattctgtgcggtctgtgttgggtaccatataaatgtattgcctatcaaacagtgactacagcctttaaagtaatgcaggcaccctccaaagtcccatgtggaaacatgacaacatcttatgtgatattaggactgtgggtttgatcttcacctgtggggcatgcagagtctcatatcctcaagcagaagggactacgctgcatgatgactgtcagtgatggaagcttcaggctgggtgggtagcctctagtaaaacccaggggggataacagcagtcagacttccgcactgtcctagttttttgtttgttttttgtcaacttggcacagttagcttatctgggaaatggaaacttgattgaaaaaaaaaatgcctccatcggattagcaacaggcaagtctgtggggtgttgtcttgatgaatgattggtctgggagggcccagcccaccatgagcagtaccagccttgcacaggtggtcctttatagtagtagaaaacaggttgacaggccagtaagtagcattttcctatgacagtggttcttaaccttcctaacgctgcgaccctttaacccagttcctcatgttgtggtaaccctcaaccataacttgttttcattgttacgtcataactgtaattttgctaatgttatgaatcctaatgttgatatctgacatgtgatcgaaaaggggttgcggcccacaggttgagaactgctgctctatgacctctcttctagttcctgcctctgggtttctgccttgaattgagccctgagttctctccgtggtggactatgatccgagagttggaagaggaaatcaaccctttcctccccaggctgcctttgtttatcccagcaacagaaaccaaactaagatatggctctccctgctaacccctggggaaggagagaggctgatggttactggtgataagcaaggaccagtgatttcatctatcatgctgtctgggtctccatagaaacccaaaaggccaaagttttcagagctgaataactaagcatatgatgttctgggtgcagtaggtctagtgagggtgtggaatgtgtaagttgcacccataacttcccctgtcctaacttacctgatgcttttatcctttatgatatcctataaaccagtgaatgtaaatgttgccttgggttctgtgagcagttgtgacaaataagcctgagggagggatcatgggaactcttgacttcccaactgttgatgagagtcatgggtcaaactatttgaagtcttgactagcttagggtgaggagtcttggcacagagccctcatgtagggaacaagatgctgtttccaggtaggtagcattagaattgatggccaggcagcggtggtggtggtggtggtggtggtggtggtggtggtggtggtggtggtggtgtgcctgttatcccagcactggggaggcagaggcaggtagatctctgagttcgaggccagccaggtccacagagtgagttcaagacagccagggctacccagagaaaccttatctcaaaaaataaaaccaaaaacaattgagttagaagatacttacttagtgcctgctgcagaattcattgtttgcagtgcagaggaaagtactcatggcgggtggtagaagtgacctgtgttgtgaaaatggaggaggaaaaacagaattagggggtggagagaggagagtgagatgaagaaggtaaagaagacaaggaagagaaggaaggagaaattgagtttgtagtttctatattctcagagtaaacaagatgctattgtgggtgatttaaaattcccttatgtttttctgtattttttaaaatgttgttgataacacatatataacacatacagtctgacagtgtagaaaaagaaaagacagatgagaaaacattaagtcagggtgaacaatggtaagccacagccaggatttgaacctggctcttctcttacctcaaagccaaagttcttttcactgtggaatcccatggctctcctcccttggtggagaggccagtggtcagtatagttgatgagcaaacggctaaggaaaccagaggcaaatccatataagatgccagtgttggagacagccagctgatgggtacacgggacgtctgtgcagcttctcatgtgatagtgattatttcagtaagccatgacatgaggctttgctgggccttggggaaggttgtccctgcagcccagtatcttgccccacctgctctgttccatttcgtggccctctggtccctaagcctcaggatggcaggcatgcctgaaagctgttgactcctcctctccagctggaaacagtacagttgctcctggatcatcatcagagacttgtagtcctttaataccataatgtttgcccagtgtttagattcccagatgagagagggtgttctgcacatcatagctctttaaattatggtggcctaatggagccacattagaactggtccatttacacactcacaaagagccagcccctctaatcttattgggacttgagagtggattgaccccaccagattctatttacagtaataaactgttgcattcctcctataaccccagtcttaactagatgataggaatatagctttctgctgagacttgccttctttgggtaaaagagaacagcgtgtgatggtctggttaataacactgccaggtccatttgacacagttccttgtgttggatttcatcagagttctgaaacatcgcgggtgactgtgtaggttagaaatacacgattctctcacaggcaaggctctgccttgaagcttttagctacaagaacattgcttcaggctaatttacctatgactactactgctgctacttctactgcgttaccactacaacactactactaaactactctttccttcctttcttcctttcttcttctcttcctccccatccttctcaccctccttcttcctccttcagatcctcaccaccaacaaataagtcccccccaagcccctaactccatttccatatgaaagaggagaatcttaatctgcagggtattaaacccaggtgtttgcacacactcaacatatacttccctgagtattacccccaggctcatctaacttaagggtatttggagctttgagtgttggtactttttgaatttggtctcatagatgaaagaactaagccagtctattttttccctgcaggcgatctttgaactttctcaaggtgaagaagacttgatagaggacttgaaattagcaaaaaaggtaagctaagacaccatagctgtttgagtcgctccgtgtttatctctgccctgtgagtcatctcagagtcctgagatgatgcttttgagtagcctctttatgactaactcaagtcaccaaaaaatgaaaagaccacaaacccagcagcaaaggaaatggctcaaagcaagaaggcaagtagctctctacactgggcacctgccggatgcctctgcatgtcttaaatctgaaagtgctcatggaggcctgattttgtgtgcatttcattgtcctagaagtctctcttgagcttctcaggaggctgaggaggagggcctagagtatgagaccagcctgggcaacacgtcaagtgcctgtctttcaaaacatgtcaaacaaggagtgtcacgtagagtctctttgttcaccatcacttagagaaatgggtctctaaatcaggataaagacatttgagtcgtggaaatggggaaagccaagggtttgtattgtataagttagggtctttcatatggaaatggagttaggggcttgggggggttatttattgagtagtgaggatcacatttagatgaaaatatgttaatcagcagctatgggaggagggtagaaacccttgccttctgtcatgtacattcttgacaacaaatctctccattctagtgaccttcctattttaaaagctcaattcaggctgctccggcttttttgttatgtttttgagggaatcatgacattggaagaatgcttcttaccttagggtcctccgttcatcattttgctagtaggaagctcttcctcctatactcaattagctttatacaattccctgaaggaaagagtcgacatccctgtcttatttggtatatgtctatgtgtagtctacatgtatgtatgtgtatgtgtgtgtgtgttcatgtgtatatggtcacatctatgcttgtgggtgccagaggctaacgtcatgagtcttcaccatatttactgagattggttctcttgactaaacccaaagctcatcaatatggctactagtctggttggctagcctgtgctacaactctcttacctgttcaccttccaagtgctgggattgtagaagggccaccatagccacccatctttgatgtgcattctagagacctgaaccaaccaggattggcaaacagttttctgtctgcttaacaccaatagtgaaggatctaaccacttttcttttctttgaaaaatgtacatatttgaaaaggcctgctgttagctaattttaaataaaatggggggggtgctaaagtgtgcaatcatgtttactttcggaactttaaatcaaaactgctctccaagcaggatttttgcttcttcctagatgtaggatatactaaagtgtagaaggggggtgggggtgggggtggggcgggcaacaagactaccttggcttatcagtagtcacaaaaggctgacggcagaactcaattctctatttttccaaccacacctgtctgctgtttgcatggcattgtgggagaacttataggaagccagtttttttatttttattttttttatacatttgcacagcaactgggctcctctgcatttcaatatttctgtccttctcttgcccgtctttcgcaggcctaccacgaccccatgctgaaactctccataatgacggaacaggaactgaatcagatttttgggaccctggactctctaattcctctccatgaaggtagggttttggtccccgatgagtcatggcttgtcgttttctgatagcaaatctgtgactatataatcatgggaggagcccagcaccttctgccacctctgctcatctttgagtgcctaacaaaataagcgtttcatttatttcttgccagagctcctcagtcagcttcgagatgttcggaaacccgatggctcgactgagcacgttggtcccatcctcgtgggctgggtaagagatgttctttggtcttgtttgaagatagatttcactttaccttgaatttttctttgttggcaaagacttgattggttattatagcagataaaaagttaaactcttaacatattgagggtttatgtcttcaaagcatggaaacaagtttttcctgttacaggtttatttcattgaaagacaacatggcctttttccaacaaaacaaaggaaaagaacacacaaaactgttcttagtttcacataaaataaaatgacactggattatattggatctaggccaattaaagtattaccatttctactctaagtttaaaatcaacattttaattttttttaagtgcatgctatataagaacctaatcactgagctatatctccatatccccttgttttgaggcaagttcttattaaatcgcccacactatccctgaactcactttgtagtccagtcaggccttgaatttgggatgcctctgcctcatccttccaagtagctgggatttataggcctatgacaccaggcctggcttggcattcttattcatcgataaaagtagcttttcaaccgatttaagaaatcttgactgtggtataatttatgatggtatagcttttgcttcgaaggtgcaaggccttgggtttgatccccagtactaagagtggggatgggatgggatccatggtttaaatgtagttttacacgcatgccaatgagtgcatgttgcttgtagttaggacatacattcctggtcctaagtgactgctggttatacatctggcataaccaatccctttcttaaggaactaagatgtgaccttaggttagggctcataagataacattcaggctctttctgaatctgtgttcagttgagcgtgtaatggtgttcctttgtgtcttttgcttagacgaagcatatgctattttgtcaccatcccaaccactcctattgtatcccgtcttttcccttccatgagtaagggatgctccatcccaattgtgtagggttagtggtgtcctgcatctgttctgccacagggctaggctgctcagggaggcaggaaatgggagtttgaccgtgcttaccccacactgttgttgggtgggtgtttcactcctgggcttggggaatgcagtctgaggctcaggacagccagagctggcccaggggtcccgggcctgcaagtcggcccgaggccttctggttctcaggctctcagacacccagacacctctgggagccttggaagagcagagaaaagaatggtgacccgcaggcagaatctagcctggggccgagcttgggcttgacttggttgtggccatgcctgggagtgcagagtcacctcttcaggagattagatggcagctgctctgtaggcaaaggcctccagggttccccatggcagatcccaatgaaaagaggcagtccatggctttaaggcatttattgtcatggcagaaagtggatgagtaaaactgtaccctacttctcagggcaggcctgaggctaaataccttttgcagggagaagtgtctaggaaggagagtttattggctaagcctctaagtacctcattaaaatggagatctgtcttgaggctatgtgacctgtagaggggtttggggctttgcccttatgtgactgatggtcacaaatctgtggaggcctgccgccttgtgccaggagcctgattctctgggaacagggaaatatctaccacccctttagggttaccagtgtttctagccttagtcaaccaggaatcaggctgcctttcacagccctacacaattctagatatttttatttgttatgaagcaggtaatgaaagcagacaactttaatgacttcttctaggcagaattaggtctctccatccctctgatggggctagtattccaggacaatgggcagggagtgtactgatagagaggggttttaggtattattaatatactggtattctctttccaggtaaacttgttcctcaccttcctaaaaccttctggttctcactgacattacatgaatgtgcccaaaattcttaacattggtgtctgacctgatgcctctcagttactgccaagatctggaaccttcgaagggttctatgacttggctttagttcagaagtcaattttagtaccaaggcggaaatatctcaagaatatctgcgggacaagtaatgttctcagctgaataatttagatgaaacacgctttaatatttcaggagagatcattcatcacgaacttttgactttgcgttctaagtcatggtattgctctaaacttcttcaacccacaaagaccttcctctaaagagagtgggtcaactggagtcagaagtggttcaatgtgtttttaaacttcctcagactgtggacttccttcagagttagcagggctcctgctctgttttttatgacacagtaatgtagaatggtggtgcctctttaagcaatgtgtgcagattgtgacagtgtttcagcctcaagcttgaagatttagcctcactttttttcctgaaatatacttttgtctctagtgttatggggttagtttggtctgggaaaggctttagcagttgtgtcctgtacatatccagaggaagtgtgaccatgccagtcagttgctgtctggaccctccaggcctaaaatggggactggaagcttgaagagcatcctgaaaggaaacaagtggcccattgttaacagatctcatgagaaatggcccttacttatgaccaaagtgcagctaagtgcttttcctctttaatctgtttgagttctaccctttttaacagaacaaaatgaacatcttactggacactgaatgagaaaagtcagagtccattcaatccatgggaaattgagttattttcctgcaaaggaaaaaaaaaaaaaaacttttgaatgagtgaactgccccctaggacagtatcagcctttgcctgagaccataactagttagaatccataacttgtgctttgaagactttaaatggaaggcttggttttcttgggggagctgccctggttacagatgccaggagttcccttcaagcaggtcagcctatttgagcaagcatcccatgtcgcaaagaaacaatgtcccaagtgactggcctcaggaataaaataatttataagctctccaaggcagaaagtgggtgctcctgccaatttaggttctggttcctttttaattctgacgagagagagacagggtacatgaaagtaaaaatccagattcattcatgattttttttatgatagactttctaaaaaaaataagaaaaacagaaaaaaagtgttatccatatatacatatacatgtatacatatatatgtatatacacacacatacatattccatatatttaccatatatatatgtgtgtgtgtgtgtgtgtgtacacatatgggtcttttacattttttattctttgacagtttcatacttacactgaattttagtggttttgccttctgctcctcaccttgacccacccccctctcccattgacacctttccacttcccagcaagtcctttcctcctcttcttttcttatttaattatagttgaatttaattatagttgtttgcacaagagtgagtgagcaagtcaccagtggcttctaccactgaagaaagtgacatccctcccccagcaactactaactgcccaaagggcctcagggaggagtggagcctcgtggccccacccccatccaccaggaaatgttgatgggcacagtcttgtgcagatcttgtacagatggccaactctgcagtggccaacttgttcaactgtaacccgaaacctgttctggttagctcctccccttaaaggctagatgacttaacatctctttaaacagatgatcaagaacttattgggggagccttggcctcatgggcaccagcactcatgtgaacttagcccccctccccccatatgcataattaagataataaatctttttttttttttttaaagaatgtatatgggagagcttaggaggggggatcaagcattcagggtcatctgcctttatactaagctcaagatcaggaaggggtaccttgtttccagagattccagtctatttcacctactcgacggtcagtgaacatcatataaggaaaagaaaggatcgaagagtcagatgatgggttaaccggcagcaaaatgatatcttctgaccatggcacatctgtttgctttaattccagattagacgctccagagtgagaccttatcttaaataataacaatgtaacaacaaaacaaacaagaaaaccatagattgtaataatagctagtacttaatgcttcttacccagagggtaaactgtgggctgtgtattttatacactttatcccattaatggggaaaggcttttattatggcatcttttaagtggagaaagaaactgtggtacagaattgtcacccacaaacacctaaggttttttttttaacctgatgctagattcccagagtctgttttgttttgtttttgcttttttaaactgctgagcttttacctgctttttaaagagcttgcatacatatttgggcatctgtctacatcctgagtcatgcccaggaaatgagcaccctttcaggtgtgaacaaaggagcggagcttaacttggctcccatggtagctagcagcaagatcagagaaagtaatggtccattggacggggcagccagagttcctcggtagttcataaacacgggtcatttccaggcctttaaagaggcgaggaagtggaaatgaaattaagagggcctgaggtggttttgaactgattctgaagatctaaattgtaagcatcacgaggtgggaggcggagacagggtaccaattatcattacttcaaaatataagcttgaagagaggattttctgcagctgttttaacacaaaccgaaaggttgttttgtgtgtgtgtttgttcgatcaagtggaaggaaggaagacacttccaagaagccaagtcagtaatgactcttttaaatactgcttctctggagacgttttctaccctgtgataaggaaataatttcaataagaagcataaaaacagtggcagaatatttcaaaccttcaaatgctgccgccacttgtatgtctgttgactttgttcctttgcggttttgttgttgtttttatatgcgtttgtgttgtgtgtgttgtgtggttgtgcatgcatgtgggtattcaagaggacaccttggaggagctgctctcttgcatgtggaactcagcttagctcatgagagtttgtttcttctcactgtctaggtccaggggatcaaacctgggcttggcagtaagtgcctattttatgccccctttcttgtttgtcttttgagacaggatcagattgtgtagcccaggctggtcttgaactctcgtcagttcctgcctcagcttcctgggtgctaagattatatgttcgaggcaccgtgctcagcattttgtttgctttgtgtgtttatttatttatctaatcaacttatttattcttatgtggttttgattctgatattctctttgggagagcattgatcccacacagctaaccattttctgctcctatcatccatgaacctatatttgttcatccagaatacagattgtattgtttaatggtacaatgtaaaatcctgaggatgaaaaaacaaaagagacctttgtcactgtctcccattgaatgctacaaagagagtgttgtggtgagcgcggggtcttcattggcttccactggctgcacgttactgctgtgggtgtgcagccaggccacgggctgcacgttactgccatgggcagctttgcaccagcatgtcaggggaaggagctgttaagagggaggagtagagggggatgagaagttctttgcctgagtctctgatgtggtatttacacaatgtgactgatgggcatgttggggaaattatcgttttactggaatgaaggcagtgcagttagagcgttccagtctttaaactgaaactattcttgcatgctgggcgtggtggcactcaccctttaatcccagcactcaggaagcagaggcaggcggatttctgagtttggggccagcctggtctacaaagtgagttccaggacagccagggctatacagagaaaccctgtctcaaaaaaacaaacaagcaaacaaaccaaaagaaactattcttgcgtgattgtgtgatgtgatccagaaggcagggccaaaaacctttcccggcctgtcagagctcccttagaagatttttaataaacaattcctacaactattttctttaaatcatactattgcttgaacttcttgaggcccctgatggttgggccacctggaatcattggctcttaagtgtggaaaagcctgcactgagccacataaggcctaggctgtgagtttgacccttgctttctgtgtatgccaccgagtcttatagataagtctctttaagagactcttcaaatgaatcttgctttacaagataaaaggtggtgggctggggaagtggctcagccattaagagtacttgttactcttccagagggccacagttgagtctccagaagccccataggatggcacacaagcgcatggaactatcctgttctgggggttctgacaccctcttctggcatccatgggtacctgcacacacatgatccacagagagacaagcaaagccatgcacatacatacacaaaaacaaacaaaaagaattaaaattaaatcaaaatttaaaaatgaaaagggatctgaggagacgggttagtaggcagagtgcttgtgtgtcagtatgaggatatgggcttgaattcccagaatctgtgtaaagccaggcacagtctcaggtgtccataatcccagtgcttccacagtgagaggagggacagaggttaggatcccagaagcttgcagagcagtgagcctggagtattcagatcagcagcaatcaacaaagagaccctgtctaagatgagagctaatacctagggctgccctctggtttccacatgagttctgtacatatccctcccccatcatcgtctcattgtcgtcatcatcatcatcatcatcatcatcatcatcatcatcatcatcatcatctatacatggaggcacatagagctcacacaaaatttaagaacaaggtgcatggcacccaaggaatgacagccaaagttgtctcttgttctccaaacccacatgaacaccaaaaagtacacataacatgaagtaaatggctagcttctccgccttactgaggacctggaaagggttaggaaaattcagagactggcatggagctcagaggtagaatatcaaacatgcatgaggtcttgggttcaatacccaacactaatgtgagcatgtgtgcaggcacacgcgtgccacacacgtacacatacacatacacacacacacacacacacacacacacacacacacacacacacacacacacactggtctgtatgcatctgcagtactgattcttttgtttctagtttaaattgccagaaaaagctagcaagttctgatagggatctctaaaaagtgaatgcacaactaataagaggacctttttgtgtcttgcctgtcatgttgaagcgcctactagttattttcttccacctttacagataaaaggacagtggctgggtctggagaccagtttgatgtctattcatgcctgagtgatgccgacttggcccttaaagcaatgacattgacaccctgccttctctttatgtttccttcccagctgccctgtctcagctcctacgacagctactgcagcaatcaagtcgccgccaaagccctgctggaccacaaaaagcaggaccacagagtgcaggacttcctccagcgctgtttagaatcacccttcagtcgcaaactcgatctctggaatttccttgatattccccggagccggctagtgaagtatcctctgctccttcgagaaatcctgaggcatacaccaaatgataacccagaccagcagcacctggaagaagctgtgagtctgcctgtctttctgtctgtttctttccttcttcctgtgtcaatctccggaacactagggtcgggtcagtaggttccttgtacttggggcccagcagtcttgggtttcagacctgctatgtcacagattcctaacctataaaacaagtgtttatataaagtagcttaaggtccatttggttgtgtgtttgtgtgcctatttgtttgtttgcctatttgtttttgtttgtatatctaacacaggctcgggctagtataaaactatcgatttaggctggctttaaactcacggccatgcacaacccctcagccccaacctcccaaatgctaggattatgggtatgtgccaccacacccagctcaggtttgacgtttttcttgacaattttcgtgccattctatcctggtatcagcattgttaactgtgagaactaagatctttgtggagattttatatggaaaaaattgtctttggtaagaaaatgggaattggcttctagttagctggaagctcatcgtgaagggacatctgtttaagatgtagctcccatccttacccaaatgcagtagagtatgcgatcaaacttcctgtgtgcaactgcaccctcacccagcaaatgttgcctgagtatgggctttgcgagggccagtaacctcagcacttgagaggcagggaatcccaagtttgaggacattctgggctccacgaaagttaaaaaccagcttttcatgggactacaggatcaatatacaaggcttaccacccatcccatctgccttgacctggtttttacaacttcacacctagatatccttccactggcttccttttcccttagtctcatgaccagtggttctcaaccttcctaatgctatgactcttgaatacagttcctcatgctggggtgacacacacccccaaccataaaatcatttttgttgctacttcatgactttggtactgttatgaattgtaatataaatatctgatattcaggatatatgatatgtgacccctgtgaaaggatcgtttgactctcagaggggtcaagaccaccagttgagaaccactgctctagacaatcttggtcctctattcagcagagagtaacatgtctcagattgtaacgtgccacatcttgtaagtgatagggatttaaaccctgaatctaactatttagaaaactctaattacattacatggaaaacttctggagttgacttcaacccaggcctgaagaagattagaatcctgtctcaaagacagaacaaaaccaaaaaaacccaacaacagaaagaaggctagtaagatgaccacattagcctaatgacctaaattcaattctcagaacatagctttggaagaagagattcaactcctgaaagttggcctccacttgggtaccatggcatgagtgtgtgtgtgcgcgcacatgaannnnnnnnnnnnnnnnnnnnnnnnnnnnnnnnnnnnnnnnnnnnnnnnnncacacacacacacacacacacacacacattttaaaagaaaagatagaaggtggttgaaggatgatgagggctgtaagagaccacctcaaaggctcatttctgatctggcataatgataggagcatttatgttggtgatttggggatcagaagtctgaagctgctggataatcaattgcctgtcatctcacagagaagagcttatttcttattgatagtaataataaaaatagcgatcaatgatacttaccaagtactcagtaaattgactttctataattgccttccgggttattgtatctcgatttgcactgattacagcctgtgagattgctcctgtagctgatgcttaacagtccggttcggtgaagtggaaagctagccctgtctctgcacccctcttactgtggaattgcagagagctgtcctgttatgaatgagctttgtggctaggccttgaggttacaaggctggttcaggtgcctccatgtagggaaggaaaagaatgagcacagattccctcctgattcacgaagcatgcagtgcctgccaggtctgtcatgcaggaccagggccccgttcccaacacacagagggatcacaggcaccagggatgaggcctgtcttacttcttcatgtctgtttttattactgggaagagtgtgatctggttgcctcctctcttcatcccatctctgtgagtgtgtagtctgcagggagccctggccacgctaaataatgacttgtgtgggtcccgtgagcctatgctcagatttactgtaaagatttctcctttctcaatgcataccgtttaaagcacactgtcccctttttcatgtgagctggtttgaattttacaaaccaaacagataagaatgattgtttgcaacgggaggggctgtgccagatacccatgtccctgtgcttatagccttcgaaggtttgcgcctgcgcctcagtatcagggcaggtctgggcatgaagcatgggaaactttcatttgcaaacgtctacagagcaagtctcctgtgtgtccatttacacagctgagtgtgtgttttcctctctcctttccacaacccgtggagcatgtgaactgtccatagccctgtattgttgggcatgttttgggtatgtttggtaaacacaaaatctacagtaccagtgtggcttggccacacattcctggataaattctgcatctatgcaaagtgggggaaaagactattgaataaggctcttctataccaagggagttagttccattcactctgtgactagatctaaagatagggcttgcttttaatcaaagtatcagctacatcctcattcctccattttcttaatggtgtttttgaagaggtagtgggacttgcccccaagaagaactttcttcttcttttttattttttattgatttgttgagacagggtctcatgtggcagaatctagctgtttgttctgaccctcctgcctttgcctcccaagtactaggattagagaaatacactaccaaagggaatttcttaaagtagaatgttgactatccacttatttaatgatttcaaaaatctaaggattgtctcagccagagaaggctcctgcccaccattgcccctgcatgaaacagccttgcttttaatgctgctgcagtgagcaatgctatgcttggttcatgtcaggagctggtgagtggatggcattgtcccacaagggattaaacaaacagggtggattccagggtgtgctggctccttactgatgcatttttcatttttgcagtagccacatagatctcagctcttggccttagatatggtagtgtctggatagcctcaaggctggctccaagtctctggttgtaggtggttggcttacttcccccatttttactattcttatttgtttccatagataaacatcatccagggaattgtggcagaaatcaacaccaagactggggaatcggaatgccgctattacaaagagcggctcctttacctggaagaaggccagaaagattctctgattgacagctcaagggtcctgtgttgtcatggagagctgaaaaataaccggggtgtggtaagtagttactctcctgggggccttgccctggtacttccctatttctatcctcagcctgcctgcctgccttcctgcctttcttcctttttacttttatttttatttttttatgtttttgtggtactaggaatttagcctagttactcctacgaggcaagcgctcaccactgaatacatttctagccttctctttttgaattttgagacagtctcaattaaattgcctcaactagcttcaaactaggatgagtcgcgccatactcctgcctcagcctccccagcagctgggattatgggtaataaccactcactgtactcagctctgtgtcccacttggacttcagaaaatagtgagccagacgtgctggcacagattcataatcccaagtacttgggaggctgaagcaggaaaaatttaagttcaatgcctgtcagggctacagagagaggatgagaccggatggatctgtataacagatttcagttcagccagagctacatagtgaaaacctgcctccaaaaaaacaaaaaaggatttaatttaaaagagattgattaaatttaataatttaagagacaccttttcaacttatgtgagcaggtctgggaacatcccttgttgttagagagtatcgtgaatagcttgttatcagccataccatttgtaatggggccaactgaaaattgctaaagttattgtatgtggacctgtatctgtgccatagatgattcctgactgccggaaggttgttttctgcttcttattgatttccagaaagcaataggggatttacatgatgtggcactgggttccttgaaagttccttctaggaagtcctgagactcaggaagaagccttgctccgcagaggtggcctggtcccttctcatacaccagctaaggctggaggcctctccggttagacgtacctacggcagaaggatgaactcctcaggcagcagagtttggagcatgaagacggcagatggggtggggcaagagtgttgggtttggtgcttgccagaggtgtgaccgttattaggaacaaaatcttggttcaggaaaaatagtgtagaagtgacagcaagaggaaactgagagcagccagagatttcagtgaagacttagaaatgaagggcatttgtaagacatggcccagacaatcccagctcaactgcctgcctcagctaaaagatggagtggtgtggaaacaaaagaccctggctgttttaagtttcgaacacaatggcccaaccctctccctctccacccctaaaggaatatttttaatatgtttctaccaccaccatgccccagcgaggaaaccctagcgagttttccctaggctaaactcaaactcactgtttatatagcccgggctagccttgaatctgcactatcttacctctgcttctgactggtaggaagatgaaccttctcacctcccaatgacttgtagaattgttggtgtctgcggtatgtggaatgtgtatggtaggagacctatagatttctgttccctcaaatagcaaaccgtggataacgcagagcatgcttcctctgctccaacccagcttctcatcttgacttgttactcctccccgttagtggcctcttttgagagtcctgggttgacattcccacacggtttttctaccagaaagtcagagcccagcatcagagctacagtcattccatcttaactcccgaccattcccacggatctgatgcttggagttgaacaccagagatgcgccccagccccacataggcagcttgctctcactgtgtgctctgaggcatgcctttgctttctgagattttttttttctgtcccagctccatactggcaacttgtttgtatgatgtgtccatcttttagggttttcttttagcctataacgcatgtcagcagtacagcctggaacacactctccagagagcccaggtgctgctgagctcactgagaagactgtgaggggcatcttcctcgggctccagcagtgtgctccgggtcctctcgggcaagcagggtcccagtcggagttgctggctaaagttgatgatcagcccagtggttgaagaaacacacgttttcatgggtttgggaagccagagttgttattaggctttgatatacactctcagccttgtagactatcattaacttgatttcttagaattgtattgatgccaagaaagtaataattcctttccccatcctgttctttcttttggtcgagctggagactgtgtgtgcatgaataggttgtgaactgtaatctaaatagggttctggctacagttaagtgtagaaaggctttctccagcaggctcctaaggaggaacctaaattaaggcagtagacaggtgtttctgaaaacacttcaaatctgcccaacttctgagcttgcactcataattcattatgaacctagctagttcctagagacctcttgccgcagagacccacaaactcaccacttagatggttgctcaggacaatcctgtgggctcttttcttctagaaactccatgttttcctgttccaagaagtgctggtgatcacccgagctgtcactcacaacgagcagctctgctatcagttgtaccgacagcccatccctgtgaaggacctcacgctggaagacctgcaggatggagaagtgcggctgggtggctccctgcgcggggccttcagcaacaacgagagaggtatgtgtgggtagcagactcggtgacacactgaaccgtttgatcgtagaaatatggaaggagtggctggctggagaaaagtgaatagcaaactgtcccagtgttaacacttcacctactgatggatggacagtcaagttggacctctgagccgtcagctttccacttatctgcttttctcttgagactgctttgggcgttaagcagcagaccatagtacatgagcccagtcctacgcagctgcatgcagctggtgcaccgtttgctctctggctctgtcccctactgctacatcaaagtatgcttaataccatacagtctctgtgtgggcactggttgcacagtgcaaggttttgtagttgttctgatgtagctgaagagagttaagaacccctctcatgtctcttcctccgggccctcccatatctctcttccctcagtccctcccttgtctcttccgtccaacccctcccatgtttcttcttcctaacccctcccatgtctcttcccttcagccccttccatgtctgttccaagggcttctaacatacaggcagctgttgtcaatcccttgagctaagagcaatctgagctaagagaaagcacaaggagctgaaggggtctgcaaccctataggtggaacaaccatatgaactgaccagtaccccagagctcgtgtctctagctgcatatgtagcagaagatggtctacttggccatcattgggaagagaggccccttggtattgcaaactttatatgccccagtacaagggaatgccagggccaagaagcgggagtgggtgggtaggggagcagggtgggaggagggtatagggaactttcgggatagcattttaaatgtatataaagaaaatatctaataattaactaattaattaattaatatttattaattaatgtgagaaggcaaagaccagtttaaaaaaaagtaagaaaaagaaaaaaaaaaaaaagaaaatctgagctagacctgtgtcactccagtcaaataagtgtggcaccagggtagaaccaactgagtcctgcatcagttagagacattctgtaatcagtgtctgggatacgcccattacattagggccactctgtgtgatattgttagccttgacaaatacctacccattgactctctcttcatgtgttcttcatttctagttaaaaacttcttcagagtcagtttcaaaaatggatcccaaagtcagacccactcactacaagccaacgacaccttcaacaaacagcagtggctcaactgtatccgtcaggcaaaagaaactgttctgtctgctgccggccaggctggcttgcttgactctgagggactggtccagggtcccggcactgagaacagggagccacagggagaaacaaaacttgagcagatggaccaatcggacagcgagtcggactgcagtatggacaccagtgaggtcagccttgagtgtgagcggatggaacagacagacgcttcctgtgcaaacagcaggcccgaggagagtgtctgacagaagactgtgaccctgctagcagcaggctgtttcttacctgtacagtgtttgcattccacacgtgaactgtttggagaggcactttgtaatactcctgtgcctgtgttggcctagttccctctgttccttgtccctagtactgtaactgccgctcagtctgtgtcagctcacagcagtccttaccctgttgctgtatctcacaagcatctggatgagtggggaggaactgaccgtgttactttaacttgtcctactttcaaaacagaaagggtctctaaactactgctctgcatggactgggttgacaaagccttcgtcccatgcttctctatttctcatgttcctctagctctgacctagtagctgtagtcctggcattgagagagttttgcagagaacggagatggcattggaagagaaggcagaaagtctaattaattaacccttagcgtgagctcaggttctgtgttattcaaccagaaaacatgaaaacatccctgagggtttctgaggtttaattttgcaaaggaggaagccttgttttgaagcctgtggtttcatccagtgcaagttgaatgtaacaatctatgaagacctgaaacagaagtggctttagagagggccaagacaaaagcagttgccagacaggcctggtggcacaggcctacaaacctggcacttgggagcagaggcaggaagatgtggagttcaagaacagccttggctacataccaagttctagttcaaactgagttccacagtataaacaaaacagagctaaaagcacctgccagctctgactattcagctgaagtgggggacagctgtgggaagtgtttgtcatcgccagtggcttgccattagaaaagccatttctagcctacgacaacagagattgccaggggcccgagaagatctgccaaggttataggaccccatcaaccttatgtttcatccacctcggccactcctcttttctagtggaagactgtgactgcacctgggactctgtttacaaacaagagagaaggacttgggggtgagaagcgggtcactgtcactgaagcctcctgtgcaaaccacggaaactgaagttactccgggcggtctcaggatttcctgctctgctttcaggctctggttcttgagctacagtcagactggtggttaattcctcttgaggccagtttcattagctctcattatctaggatcagctagccaaactggaaagttctttgttccagccttgatttacagagcaaggatgggttcaaacaaacaaacaaacaaacaaacaacacacaccatgaggaaaataaaatgttcacaaactaaacagcttcttgcaagtgtaaatacttaggggatttgtacaaaattatacccacaccagcactagtagtaatgattctaaattattgccaaaaaagttttttgttgttgttaatttctgcatcaagtttacagaaaaggaagcagcaaaatacaaagttgtccctttactgtacacatgggtcatgtgcattcaaagaagctgtgtgacaagagcaaccaatagaaaaacaggtatatgacatggttatttttcaagacatattatgatcagttctaccctgtaaagcatatttctgtatttatagattttaacagtggtgaatttttttctattacaagtttatttaaaaccattttgtttcccaagttgctgaataaacaaacctgctccaggcagacacagtggaaagctgagacaggacactggatgatggagaaagcttcaactgttctctgtagagccgctggccacggtggccagtgagtcaaggtctgtcagcctgtgggaagagagtggacggatgttttggtgaaatgaatacttttgtataatggccttaaacttttctggaagcatttcaaataaattgcattaaaaacaccttttcctcctgtgtacagtgtgtgctcagccatcatcaagtctcaggttgtcctctggaaaggcaagagtttctttctgaaattttacatgtggtttccaaatactacttgcggaaataaatagtgcgactgatggagcaaagctgttacagaacatacatttctgttttctcaagcattctgctctgatttcttttaccatgtatacttagtgtacaccatttattcacttgtgtgtacttagtgtatgtgtgtgtgaggcatgcacgtaagtacacaggtactgccacacttgagtggaggtctgaagacaacctgagtatttagttctctcctttcactgtatgagttttgaggacggaactcaggtcatccggcttggcattagcagcaagcacctctccccattttagccatcttgccacccctcgccccttcactcacctttatctatgccctatacaaagcttagtcagagctgtgacagaaaagaagcattgcatctcactgcggacacaagtgactgacggtgaacttgaagctaacaggggtagtggtgcacacctgtaactccagcccttaagacgcagagacaggaggatctcctgaagttcaaggtcagcttactctgtatagcaagttccaggccagctgggactgcatagtgtgatcatatcttgaaacaacaaggaaaaggaagggcgaagggaagtttcatttttaagttacgctggaattttagtctgcttgttcactgaaatggttttatttctctgacagagtagggctcttgttttgtctatagaaagacgggacaggttaaagatcttagcaagcatttccaacagcatgttagtccggtaaggttaatgacgagttttgtctttatgtgtctgccatatcctttaacacactgtccactcctagatttggcacagcgttcacataaatggtaagtccagttttgtttttctcaagggaaaaaatatcaagttttctgtctgcaatcccagcaccgtagaggttgaagcaagagaattgttttaatttgatggctagcctgggctagatagtaccaggtcagtcagctacatagttaaatatcacacacacacacaaaatgaaaaagaaaggaaggaaggagccgggcgtggtgacgcacgcttttaatcccagcactcgggaggcagaggcaggtggatttctgagttcgaggccagcctggtctacagatcgagttccaggacagccagggctacacagagaaaccctgtctcgaaaaacaaacaaaaaaagaaaaaaagaaagaaggaaggaagggagtgaggaaggggaggaaggaagaaaggaagggagaaagtgaaagaaaaagaaaacccgtctgctttgttctctggtctccctttgcccatgcttcagagacattttggacagtctccacattttgtttctagagtggcattggcttgttgactctaggcgctgtatctttgctagaaggttagttgttggtgctgacattttgagagttagtacaagtggcggcaggctacatgggcttcagtctgctctgaggctgttatagtacatgcaactagatgtaatccttgtagtcaagacacaatgaaaacagccggggctggcaatcttgtgcagaattagagtgtggtttcagtttctggcttgtggtcactgccactgactgctttagtttccattgccagaagtctccagctgctaagaatgcaaacttcgtggttgttacaggatgctacagcccatctcggtgagcagcctgttcaactttatgttctctatgcacccatttttttttttttttttacttccccaaatctagagcaccacctggttctagagaatggacatgcagaattggaagacagttccccaaacccagagctgtctatagggatcttaacgtcatcaggatcagaagccccacatgagcaaggccaccttgagaagaggtcactacccctcaagtctgtgtaggcagacagttttaacaatgtcactgctccttacatcacaccttttttcttcaggaatgttggtggttctcccagtcagcaacaggcctacctagacagagcggtttatcaaggggtagcctagtttcctttgttgctgtgataaataccatgaccgaaagcaacttggagaggaaagggtttatttctacttacagtttcaggttacagtcccatcaaggaaagtcaaggcaggaactgaaacaaaccatggaagaatgatctttactggtccactcactgatttatgctcagccagctttttctttttctttttaatgtatctccctgccaaagggaatggtgccacccatagtgggcttgggtctccctgccccccactaattatcagtgaacacaatttaccataaacatggccacaggtcaatctgatcaaagctgttcttcaattaaggttcccttttcccatgtgattctacattgtaaagttgttgcatgagaccctgtcataacatacatacatggtggggggaatatttgagatacagaatgtgatggggaaggggacccaaaagggtaacagtatgaatatgaccaaagtacattatattcatgtatgaatacaagggagcagggaagatattccattggtaaagtacctgtcttgcaagcatggagacttaatgtgatcctcagaatacactacacttgcaaggtgacatggcatgatcttgtagttccagactgggaagatggaggagatagggggatccttggagcccacctaattggttaatcagagactgtgtcagggaaggtggagagtgtgcccggggatgacacccagggttgttctctggcctccacttgcacacacacacacacacacacacacacgtatacacatacacctgtatttgaagaaatgtcacaatgagggacagggagagttggctcggtcttaaagggcttgccgtacaagcatcaggacttgagttcagatccgcagcatccatggaaaatcctagcactcgggaggtgagcatgtgagagcatgtgtctgtacctcagcacctggggagggggtttgcaaatgagcggaccccaagggctcacttgccagccagtctagccgacatgtggaagtttagaccaaatgagaggtcctgctttgaaagttcaggtggcgaacagcagaggaaggcagccaacctgatgtcaccctctggacttctcatgggccagcacattggcatacacacaaaattcttgccacagaggaacccattgcttagtacatgctaaaagaaaaagcaaaggtgaacccttgggcgggagcctctttagttttgatatatgtgtacatacttttaggagccttctcaataaagagaatcaggaattttgttgttgttgttgttgttcatcgggttgcgctagggagtgtgtgtgtgtgtgtgtgtgtgtgtatttcctttggagaaagggtctcactgtgttttccacactcatctcgaacttgctgtagagaatagactgatcttgagcttggagcaactctcctggctctgactacattacagcactatagtgagcagcacacctagccttcatatatgcacttttaaattgggtttttctgcatgtattaacactgggatcaaacagtaggtgagtactcacatcactgagctacatcctcaacttctatttttattttatttatttatttatttatttatttatttatttattttggtttttcaagacaggatttctctgtatagtcctggctgtcctggaactcactctgtagaccaggctggccttgaactcagaaacccgcttatctctgcctcccaagtgctgggattaaaggcgtgcgccaccatgttgggttcaaagtatgaatggcttcaaaacaattctgagatatttgtttgcttcctgtcgttgtggatgagcagttttttaaggtaaaagaaaatctttcaaaaacagaagcaaaataccttctggaccagataaagctaaggaagtcaccatccagagacctctagggtaagaaacctggtagaggggctggagagatggctcagtgcttaagagcatgaactgctcttccaaaggtcctgagttcgaatcccagcaaccacatgatagttcacaacaatctgtaatgggatctgatacccttttctggtgtgtctgaagacagctacagtgtactcatatacataaaattaattctttttttttaaaaaaaacctggatctgagaattctgggagactaaaaagtatctacttgtgtgaggtttgcattgttatgacaaaatgccagagaggaacaatttaagaagaaatttgactcatggctttcagtcttggtcatttacccccattctttggtacctgagacaagcttggcaggccatcacagtgcaagtaaacaggaaagtggcgctgcacatcttgtggcagccagaaaagggagacaggaagaaccaaggaacacaatacagccttcaaaggcggccactcccagtgacctgctggtgtccccaggccctgacagcagatagatagactccacatctgtagagactgaatttgtgatataggtgccaaagggaagacttcggaggaagacaagtaagagggtatgaaactgccattactctgtgactaacttacctaaaaggttcagaatctaagccaggggtagtagcagaagcctgggatcatgaaacacttgggaggtgaaagtaggagaactgtgagttcaaggccaacctgaactatatttcaagtaccaggtaagcgaaggctacatagacctgcctcgagaggttggcgaggtagctcagcggaaaagagcattagctgctctttcgaggacccagactctattccagcgcccacatggtagctaatgaacgtctagagctccaggtcgaggggatcagattctcctttctggccttgtccaggcacacacctggtatgtagacatatgcagtaaaacatctatatgcagattttttttttttttaatttttaaagaaaaggaacctgtctcaagaaaaacaaagcattcatcaccggagagagcaagctaagagcacttgctgagtttgctgtgcgatcatgaggagtcaggttcagagccagtgccacataataagtcaggagcttataactccagctcacaacaatccggtatccccttatggcctctgtgcactcataggagcacgcacctgcacatatccacacagacacatgcatacacatattttcttttcaaattctgaatcttatgaacccattcatgagattagacccttgcctcatcgaacgtcccaaaacctcatctctgaacagtactgcactgtaaactaaatcttttacctgagagctcatgaaagatgtgcaagatccaagcataccagcacagtgtggagagacaacctggagatgtccctcatagactcagaagaacagtgaccagagcactgatgtcaagacgcacgcacggaactctgaagaccatctatctatccaagacaatgaggaagagctcatggttttgggaatcatgtctgtcctcacaaaccaacctaggaaaataccatagtcctagagatcactgtgaattattcagaagnnnnnnnnnnnnnnnnnnnnctgtgaattattcagaagactctggcttcaggagtagagaaataattagccttaaacactatgatactgctggacaggtcttaaagaccaaaaagactttaactgtttccaagttactgcaccccaaaggaaggcctaggaatataaaaatacaaaagtacccagcatctctcattaaagtccacaatgttgatgattcaacgattccaaggcacagacagaaaaaaaaaatacaaagacaaactcactggcagataagggcattaaacctgcggttgccggtggactggcaagaaagcagctgataagaagcacttgcagcaccagccctgtggcctgagccagaacctgtgatggaaagacaaagccaacccccatacctcatgcccacagtaaatacaaacaaacaaacaacaaaactcaaaaaaaaccaaaggactagctattccacatttttaatattgaaacataatatcaaaaagatttcacgaggcagtagttgcacacgcctttaatcccagcactaaggaggcagaggcaggtggatttctaaaattggaagccagcctggtctacagagtgagttccagaatagccaggcctacacagaggaaccctgtctcaaagagaagaggagggaaggagaggaagggagagagaaagagagatttctacaaatgaaaactaccatgaatgaggtagaaagtgcagtatatgggttaagaggagacaagatgttgcagaagaaaatgttagtagaaaaggcaacaaaatatccaaatacagaagaccccggtttttgtttgtttgtttttttgttttttttttttaatgatttatttatttattatatgtaaagtacactgtagctgtcttcagacgcaccagaagagggcatcggatctcattacgggtggttgtgagccaccatgtggttgctgggatttgaacttcagtccttcggaagagcagtcaggtgctcttacccactgagccatctcaccagccctgtttgttttttaatgaaaagagctggggcaactttaagcaccctagtttacatgtagaaagaatctctaatgaaataaggagggcataaaaatagaaaagaaaaaagtgaaataatgaataactccaattcgaaacttgaaattctaaaccacagatccaaagcagctcagtaaactacatgtacagaaacatataaaaaatgcatcaaagtagccgggtgtggtggcgcacgcctttaatcccagcacttgggaggcagaggcaggcggatttctgagttcgaggccagcctggtctacagtgtgagttccaggacagccagggctacacagaaaaaccctgtcttaaaaaaccaaaaaaaaaaaaaaaaagcatcaaagtgggctagagagatccgcaagcaattaaaagcactggacacttgtggaagaccagggctgggttccataacccacatggcagctcaaaaccatccattactccagctccaggggatctgatgcccctttctgaccttggcaggcaccaggcatgcatgtggtgcacatatagacaaaccacacacgtaatacaaatataaaaaataaaaaatggacaagttatctgtacagatacttaaccaaagaagatacacgcctggcagataagcaatgaaaagatgttcacctatcctaaacctaaaaccaaaagacccagccacagctcacaagcataggaaaagatgctcagtgtcacagactccttgtgtaatgcaaattaagccatcatactactatcccttaggatggctggtgtttaaacacatgcacacgcacgcacacctcgtggtgggggagaacaacgagttagtgttacacaggctatagagaaattgtaaagtctgtgggttgttactagcaacgtaaaatgatatggtcagggtgagaatatacagaagttgtctgcattcttgcacagctgtggggactcacctgactgggtggcaagagaatgaagacaaaacacacatacagcagcgaagctgtcatcaggttgactgtgtcctctgctggtaaaactgcaccccggaagcccggtgcacctattatatacagttgaacagcggggaagtggcgttatcacacacaaatgaacaaggaagcagggtttatagatacagccaaacaagaagagagctagctcatctcaaggagcagtcggtccctgtcagggagcagtctttatctgtaaatatgtggggtgaaagctatgatgaacattttctgcacacactaccaacatccacatgtggtccaacgcaaagcttctgcaccccctctgagcacccccacccccagtgaaggctttgccatttttccatggtctgaggttagagttcttgacatgatgtaaccataccaacagcacaccttcacccaggacttcacaaaccctcaggcctttctgtgttccaccacagaagtttctcaaacaaattagacatagaaccaccatagggcccaccaagattacctctgagtatgcaaccaaaagaatcgaaagcaagattttaaaaagatattttgcacattcatgttcactgtagcacagaacccaagtatctaccagtgagagaatgggaccaacaaagtgttactgttgggggaaatggagaagagggcaaataggatctgggtttctttatgttaattatcacagcttcctgactacaactctcaataaaagtttctgttataacatgccctagggctttgtgggggatgtcggatccaggggagttttgctcatgttatgctgaggactctcctccgacatcaagtgaagtacaggttctcctggatgtctagtcagtatttggtttgttgcacactatagtcgttaaatatttagttttaaattaaaacaacacttacagaacctacacatgattaaaggaactcatattaagggagtacccaagagcttcggagaaagatgcagaatcatgtaaccataactataaagatattgaaccctctcactatccctaaagtgatcactatctcctctgctcttcccagtgtccccacctaccctttcactcctgctgactcctgacacaaagttagagtttaatgtaattgaaataacgcagtaaatgcctggcttctctcccttctcagatttttagtgtttttggaagttgtcacatagatcagcgccacatctgtcttactgatgagtggcagtcatctgtctgcctgcgttatatgtttgctcactcatttcctgttgggtggttgacaagtaaagctgaaataacattcataagcaagtatcgttgtaggcctgtattttcacttcccttgagaaaacaaggaggatgctcatggtggattataccgcaccaaggatgtgtctggcaagacgcgtctctgaactgtttaccacgtggctataccattttacatttccaacagtaaatcaagttgtccctatcttggcctttttccccctcttcctattctgataggcatgtaatcacatctcataggatgtgtgcgtttccctgatgggtaatgatgctgggaatggcctcacatattttttgcccattatacttacttttgtgaagtgttcaaatacttacctatctttgtagtgttgtccccaatcagttttttttttaacagtaaaaagggggttgtggatatagcacatagtagagtccatgtgcacagaccttaggttcaacccccagtcccacaaacaacagcaagaatccttgggtcagtgagttggctcagtgggtaaagatgcttgctggcaagcccaacaacctgagtttgaaccctggaacccacatagtggaaagaaagaacccacttctgcaagttgtcctctgaatgccatatatattgcccatacaatacacacttatgtacccacacacatacacacttatgtacccacacacatacacacttatgtacccacacacatacacacttatgtacccacacacatacacactcataagttttagaagaatcctttagaccttaaatcatgactctttgtaaatttatacttcataaaaaacaggaaatacttgtaactgaactgtacccatcttgctattgttccaggttccatccaagaactgcacccaactcagagttctgggaaaaattctgctatgactaagtgatacttaataccaaaattgctataataaaaaattacacacatatacatacatgtatgtatacatacatttatccacatgattcttctgaa

SEQ ID NO: 3283 - DNA, 3629 bp, Mus musculus
agctgtaggtgttcgcatcgccgtcgcctgcatcgtggagctcgggccctcttttacccgggatttttgttgtcgcctgaaattagcggtgacatctcaaagggcaggcccggcagccgccatggtggccaaggattaccccttctacctcactgtcaagagggcaaactgcagcttggaggcgcccctgggcagcggggtggccaaggacgaggaacctagtaacaaaagggtcaaacccctttccagagtcacatcgctagcaaacctcattccacctgtgaagaccacaccattaaagcgcttcagccagaccttgcagcggtccatcagcttccgcagcgagagccgccccgacatccttgccccccgagcttggtccagaaatgccacctcctcaagcacaaagcggagagacagcaaactgtggagtgagaccttcgatgtgtgtgtcaatcaggtgctcacggccaaggagatcaagagacaggaggcgatctttgaactttctcaaggtgaagaagacttgatagaggacttgaaattagcaaaaaaggcctaccacgaccccatgctgaaactctccataatgacggaacaggaactgaatcagatttttgggaccctggactctctaattcctctccatgaagagctcctcagtcagcttcgagatgttcggaaacccgatggctcgactgagcacgttggtcccatcctcgtgggctggctgccctgtctcagctcctacgacagctactgcagcaatcaagtcgccgccaaagccctgctggaccacaaaaagcaggaccacagagtgcaggacttcctccagcgctgtttagaatcacccttcagtcgcaaactcgatctctggaatttccttgatattccccggagccggctagtgaagtatcctctgctccttcgagaaatcctgaggcatacaccaaatgataacccagaccagcagcacctggaagaagctataaacatcatccagggaattgtggcagaaatcaacaccaagactggggaatcggaatgccgctattacaaagagcggctcctttacctggaagaaggccagaaagattctctgattgacagctcaagggtcctgtgttgtcatggagagctgaaaaataaccggggtgtgaaactccatgttttcctgttccaagaagtgctggtgatcacccgagctgtcactcacaacgagcagctctgctatcagttgtaccgacagcccatccctgtgaaggacctcacgctggaagacctgcaggatggagaagtgcggctgggtggctccctgcgcggggccttcagcaacaacgagagagttaaaaacttcttcagagtcagtttcaaaaatggatcccaaagtcagacccactcactacaagccaacgacaccttcaacaaacagcagtggctcaactgtatccgtcaggcaaaagaaactgttctgtctgctgccggccaggctggcttgcttgactctgagggactggtccagggtcccggcactgagaacagggagccacagggagaaacaaaacttgagcagatggaccaatcggacagcgagtcggactgcagtatggacaccagtgaggtcagccttgagtgtgagcggatggaacagacagacgcttcctgtgcaaacagcaggcccgaggagagtgtctgacagaagactgtgaccctgctagcagcaggctgtttcttacctgtacagtgtttgcattccacacgtgaactgtttggagaggcactttgtaatactcctgtgcctgtgttggcctagttccctctgttccttgtccctagtactgtaactgccgctcagtctgtgtcagctcacagcagtccttaccctgttgctgtatctcacaagcatctggatgagtggggaggaactgaccgtgttactttaacttgtcctactttcaaaacagaaagggtctctaaactactgctctgcatggactgggttgacaaagccttcgtcccatgcttctctatttctcatgttcctctagctctgacctagtagctgtagtcctggcattgagagagttttgcagagaacggagatggcattggaagagaaggcagaaagtctaattaattaacccttagcgtgagctcaggttctgtgttattcaaccagaaaacatgaaaacatccctgagggtttctgaggtttaattttgcaaaggaggaagccttgttttgaagcctgtggtttcatccagtgcaagttgaatgtaacaatctatgaagacctgaaacagaagtggctttagagagggccaagacaaaagcagttgccagacaggcctggtggcacaggcctacaaacctggcacttgggagcagaggcaggaagatgtggagttcaagaacagccttggctacataccaagttctagttcaaactgagttccacagtataaacaaaacagagctaaaagcacctgccagctctgactattcagctgaagtgggggacagctgtgggaagtgtttgtcatcgccagtggcttgccattagaaaagccatttctagcctacgacaacagagattgccaggggcccgagaagatctgccaaggttataggaccccatcaaccttatgtttcatccacctcggccactcctcttttctagtggaagactgtgactgcacctgggactctgtttacaaacaagagagaaggacttgggggtgagaagcgggtcactgtcactgaagcctcctgtgcaaaccacggaaactgaagttactccgggcggtctcaggatttcctgctctgctttcaggctctggttcttgagctacagtcagactggtggttaattcctcttgaggccagtttcattagctctcattatctaggatcagctagccaaactggaaagttctttgttccagccttgatttacagagcaaggatgggttcaaacaaacaaacaaacaaacaaacaacacacaccatgaggaaaataaaatgttcacaaactaaacagcttcttgcaagtgtaaatacttaggggatttgtacaaaattatacccacaccagcactagtagtaatgattctaaattattgccaaaaaagttttttgttgttgttaatttctgcatcaagtttacagaaaaggaagcagcaaaatacaaagttgtccctttactgtacacatgggtcatgtgcattcaaagaagctgtgtgacaagagcaaccaatagaaaaacaggtatatgacatggttatttttcaagacatattatgatcagttctaccctgtaaagcatatttctgtatttatagattttaacagtggtgaatttttttctattacaagtttatttaaaaccattttgtttcccaagttgctgaataaacaaacctgctccaggcagacacagtggaaagctgagacaggacactggatgatggagaaagcttcaactgttctctgtagagccgctggccacggtggccagtgagtcaaggtctgtcagcctgtgggaagagagtggacggatgttttggtgaaatgaatacttttgtataatggccttaaacttttctggaagcatttcaaataaattgcat

SEQ ID NO: 3284 - protein, 564 aa, Mus musculus
AVGVRIAVACIVELGPSFTRDFCCRLKLAVTSQRAGPAAAMVAKDYPFYLTVKRANCSLEAPLGSGVAKDEEPSNKRVKPLSRVTSLANLIPPVKTTPLKRFSQTLQRSISFRSESRPDILAPRAWSRNATSSSTKRRDSKLWSETFDVCVNQVLTAKEIKRQEAIFELSQGEEDLIEDLKLAKKAYHDPMLKLSIMTEQELNQIFGTLDSLIPLHEELLSQLRDVRKPDGSTEHVGPILVGWLPCLSSYDSYCSNQVAAKALLDHKKQDHRVQDFLQRCLESPFSRKLDLWNFLDIPRSRLVKYPLLLREILRHTPNDNPDQQHLEEAINIIQGIVAEINTKTGESECRYYKERLLYLEEGQKDSLIDSSRVLCCHGELKNNRGVKLHVFLFQEVLVITRAVTHNEQLCYQLYRQPIPVKDLTLEDLQDGEVRLGGSLRGAFSNNERVKNFFRVSFKNGSQSQTHSLQANDTFNKQQWLNCIRQAKETVLSAAGQAGLLDSEGLVQGPGTENREPQGETKLEQMDQSDSESDCSMDTSEVSLECERMEQTDASCANSRPEESV

SEQ ID NO: 3285 - DNA, 269838 bp, Homo sapiens
  misc_feature (1)...(269838): n = A, C, G, or T/U
agagacaaagagggggagccctgaagtcagagctctgctctccctgtggccggcacatgattatgccccagattcctcatctgcaagatggtgatgttaacagaatctgtccagaaagtatggactataatgaggcgttggcaacccagagttacttgtttgtttgttttctgagtcagggtctcactccatcacccaggctggagtgtagtgggacgatcacagctcactgcagctttgacctcttgggctcaaaggatcctcccatcttagccttcctagtagctgggactacaggcatgcatcaccatgcccagctaattttttcaatttttgtagagatggggttttgccatcttacccaggcaggtctcgaactcctggccgcatgtgatcctcccatcatggcctcccaaggtgttgggattacaggcatgagccatcacacccggcctccaaagtgttttaaacatcacttcacccgcagtaaggattcaattccatggaccatcattactattaagattatgaccatcactccagacctatttttatttttatcttttttttttcaaaattcgcatgcgtttatcctcttttctgcccccacttctttcctacctactgtctcctccccagtgactacccccactactaccctgaaactgccttcgaggtgaccagccatctggagagccaaagctgttggggggttttgtgcagtcttcatcatggactcccctttcacagcattgggtcctggctccgcctcctcctggaacactcgatttgctggcttccccccaaccccttactcccaactgcaccgtccccagggctgttgcttccggcctcttctatcactgcaggtccttgcctttggtcaccccagccatgccaggacattggctttgacctcagctgcaaatcccagttccccactgttgccaaacctttctgtctacagctcccaggggccccagactttgtatgtgttaaactcagatttctggaggctggtgagggatgagctgccttcagtctcagagactagaggcagagattagggacaacaggcctttttaagcaactgagaattcagtctgagggcactgggaagcctttgcaggtggaggcaggataaaccccaaatctgtccacccctaaagaccctgcacttcctgattttttgttgggctctttaggttgctggtagtttgtgggtgtgtggtttcttttacatttaatttccccctgctggtgattcatgcatccctcctagactccagagccccaaatacaatgttaataagttgcatctggcagagtgcagcgtgctggggtgtttgtgactgcactatattgatgtttggtaagtttctgaggcctggctctttgagagtctttgaacagggccttctctgggagcccagcagcagcagcctgttgtagagggacctccctgagtgtccctggtgaccttccagccaggcggcatcacattgccccttgctgctaattccccttgcccacccccagccccacctgtgggtatgttgtccatttacatcctcatttgttagagtctgtgccttcctctcacctgcttgttcattctggccagggcccagtgcccaggaggcatggtgaatgtgcatgaggggatcgagggggcgaggccgcaggctgctctcagctatgctgttcccagggacccgtgcactgctgcccctctcagaacctcagtttccctatctgtctttacaaaatagctggccctgagccctgctgcccacctgtctgtggaatacatgtggagaacagccaaggtggcagagccccagttcaggggtggaggcggcgaatgaatatgtcacattgtcgccctgtagcgagtgcaatgctattttggctgccccagtgccaggacagtctgagcagcagtgatttttaaagagaatgtgtattccaatttaaaatcctgtgttttaaaggctgggcgcggtggctcacgcctgcaatcccagcactttgggaggccgaggcgggcagatcgcctgaggccaggagttcaagaccagcctggccaacatggtgaaaccctctctctgctaaaaatacaaaaattagctggtcatggtggcgggcacctatagtcccagctacttgggaggctgaagcaggagaatcacttgaacccaagaggcagaggttgcagtgagctaggattgcaccattgcattccccgcctgggcgacagagtgagactctgtctcaaaaaaatcaaatcatgtgtttgtgttagaagatgtccttgtgtttctttgcttttcttcagaagcattcataggccaggggtgaaaaaactaccatcttttactccagaagaaatatgacttcccataatactttggatttccagtatctggaagggtaactgatgttgcttttgctgatagcaggtagcaaaggtattggtcattacggggccaccaaggatcctggaaggatccttttctactgtccaaggccgggctcccctcccctgttttcttttcctcccctctctagtccactctaagagccaaactaatccaaatatttttctttcctctgtaggcccttggtgtttcataatctagaaaactctagggagtaatgttcacttgatgtagtttcatgttggcagttaaaaatgaactttataaaacagacttgtagtccatttgggaaatgcacaaagtgattttttaaaaagttatgccacgatcaatattatagtgttttccttatctttttttttaaacctgtgagtttatttatgtaactttatattctagtttttcgtccagtattttaatataatcattgcctcatgacaagggcaaatcagacatcacagtttgcggggcttgtccacctccctccctgccttgtaacatactcgcccacccacctacccatcatgtgcttgtccacttaccaaccatccatccatcatggattgaggggctcttctctgaggaacagggctgggttctaagaaacaattatcaatgcgacaggcagggtccctgcccttggggagttactgctatatagtggaaccagtgtgtaagtaaacacaggggaaaatggcagattgtgggggtctctgggtggtgggcagggggctgcagcccacggtgtggttttgacttccatgcatggatggcagctcagtggtggtgtaagctcttgtggctgctgtgtgtctgtgaggctatccacaatgggaggctggatttaaacactagatctggaatttccctacaaaaaggtgcccccatgagtgctcaggactgtggggtccttctatgtggggtgaactgagggactgactgtacagtgtggcagggtcaattattgagctgggatagccagtcttttttttttttttttttctcgagacggagtctcgctctgtcactaggctggagtgcggtggcacaatctcagctcactgcaacctccgcccccaaggttcaagcaattctcctgcctcagccttccgagtagctgggactacaggcgtgcaccaccacgcctggctaaattttgtatttttagtagagacagggtttcaccatattggccaggatggcctcgatctcctgacctcatgatccgcccgcctctggctcccaaagtgctggcattacaggcgtcagccactgcttccggctgatagtcagttttaaaaggagacatgaacctgacccagcatgctgaccctgcagaagggggctgtgttgtaaatgcattgttctctggtgttagaaattgcatagttatttgtagcatcacaggtactattggaggcgaggggattttttagagggatttcttagaaagctttatgtctgcagcagagtctgaaaggatatacaccaggccagggatcaccaactctgagtgtgacagagaccaggcaggaccttacatgagtggccagggaagggcaggggtcacagtggggagggatggagaccccaagagcccatggtccatctgaagggggcagctaccactcaaccctagcagaccatggtcacttgtggaaataggggcccttagtgatgagattttttaaaatattgaactgaagctagagactgtacctgatttctaaatgaaatctagatttttaaatgttggatgctacctcaaaaataaatacatatatacatacatacaccctaggggtcatataaaatataccagcagtcttcccatttctgacttgtacctcaaatttaacttagaagttaaattattattttttttattgcttacttgtttacattttaattttgtttgtttgcctttgtaatgagcatatgatatttatttgtaagcaggaaagaagaaggaagacatctttataacccaaagggctccctaccctttaatttttgttgatggtccctgggcaggtgggtgacggtcaggttgcctggactgcggggctggctgctggagtgtttgctcggtgggaagaggacccatatccagaaagaggaggaaggacagccaggggttctgcaggccaggtcccagggctgctgaccaaggcagcagacaggtggggacctgggagcacactaggcactcactcattccatcatccatttcctcattcattcattcattcaccggatgtatactgggtacttatggttcagagacctgatctgggccttagggttatagcagcgaacaaagtagacaacaatctccacccttatgggattcaagaaacagtaagtaagacatagggtaggtctgatggtgctaaacaccattgaaaacaggcaagaggggtggataggaaggctggagagggccacagtttccaacaggatggtctgagagagtcccactgagaagagccctgaaggaggggtttcgctccattacacatgaattaagtgcttactgtgtgctaggcactctggatggtcccctgggaacattcccattttgatgctttctttaatgaacttttgcaaagaaacaaagcatagttcttttggttgcatgtgacagaaatagaatgtacgcttgcttactttttttttttttttaaagagagctcactttttatcactggcaagtctagtgataggctaccttcaggcatagctcgatccaggtggttaatctgtgtcattaggagccttctctctcttggtctcttgctctgctttccccaggttagcttctttctcaggtaagctttctgcacaagatgccctgcacagctccaagtttgcatctcatcagctcagtgcctgtcccagaaggactgtatatctgttctttaatgccagccaaagtcttggggccactcccactgaacaggccaggttacatgcccatctctggagcctggggttggcccttcctgaatcacagtgtcccaaaggggagagggcatcccccaacagaaaatctgggtgctgttagcagaagaatggggactaaatgctgggcagtgaggaacagcagatgtccactctgacaacacttggattaaggaagcaggaagggctgaaaaaacagcctgaaaacagggagaccttcaagggtcccagcctgtgaccaacagaccatgtgagcttggccaggtcttagtgctccagtccctaaatgagggtggtcagctggttctctgaggatccttccagcttgtgatctgtttgagttttagatacattatctgaaaacagatatgactgaattaaattaccaggtttgaaataatacagggttatggatcctgggtagaagtttttttttgttttgtttttattcaacaactagctctgttggtgaattgctgaggaagccgtgaaggacatgagacccacctctgctcaagctatgctgctccttgctggtggcacctacctacacctctgcctttatagtgtgcagcaaagctttgccaacttttcagtctggtaatggaaagtgagcttcactgtcatggatgtcatgctttaaaggctagaatgatgcattaagaaagatttaccctggcctcatcttccagtgcaaacttatgagtaggccatagttgaaacatgactaccaacagctgtagggaaaaccagctgtgtggacatcggcatgtgtttccaagacaccaagcagatatctcagtccagaattttgttttaatggttatatcttatcttgacagacacataccaatgtatttccccaggaagatggggagggaagacagggattgctccttggcgactctgctgatgtgactttctgttagtcagacgtctgcaggggccagcatttgtgttgaatggtggaaggcttgggagtgagtcatctcaaagccagaaaaccatgcatcaccctctccaggaagtactggcagtcatacaattgcacaagtaggcagccacaggccatgtggatattgaggtgggtagtgcagtcaggcaagagcctcggaggccgatgaacttgacttgaagcctggtagcattgctgcttcttggctgtgtgacccaagtcaagttacttgagctctctgcacctgagtttcccatctgtaaatctgaacgataatggcacccactcgtaggagaacatacttcaggttcttgtcagccagaataatgactactgttggtagtggtgccattcctaatgggctaataggagacagagtggcataatattcatagcagctaacatgcactttacatattaggaccattgtactcattatgggtactgttcttagctcttctaagagctaaggtagataacgtgattattcccactaacctacgtaggtactatatatggtcccgacccacaatgagtcgccttacagtttttagcctttctgatggtgtgagagtgacacgtatccaggagaaactgtactttgagtccccatacagccattcttctttttttcactttcagtacagttttcagtaaattacatgaaatattcaccactgtattacaaaacaggctttgcgttaaataattttgcccagttgtaggctaatgtgagtgttctgggcatgtttaagtgggctaggctttaaaagcatgcattaaggtgccaaatccagataattctatattttcacaatgtggcataagcaagtcttcttgctactgccttacttattggatttgtagggtaagctgagctgtgatgtttggtaggttaagggtattaagtgcattttcgacttaccattgtaagttgaggtgcgcgtgagttatcatcatcattctcaattcacaaatgaggaatctgaggcacaaagagttaggtaacctgcctggagtcacagggcaagtgagtggtcgatgtgtgatcagaacccacgcagctggttccagagcccttgcttctaaccaccaccgtcagtagtctcactgcagaaataagagctgcacaggatgcttcctataggtcaggaaatgttctaagcaccttctaaggattgagtcctttaactctcataacaaccaaacccttgtaagttggtacaattattctccccattttctagatgaggaaactgagtcacccacaaagggctaagaaaaggaattcacatcctcgttggctggctgatttaagacagggaagctgacctctctgagccccagcgttgccatgggctgagaggcgatctaggataagcaccacgtgcagtcgtgatgtggaccagaccttctttggagggggcctactttattcctagtgagggccttgctcacggaccccagctttattcctgggcctgtgccttgtctctggctgcctgtggcagctggacagggctgagagcccttgggaaggtgtggcatcttgggggaagaggattttgaagagatgcctctgcccctggcttgggcctcctgtggcagcaggaacgagcttggccctaccacggatgcaatggcaaataacactgtgaacctgtcccaaccactgcagggcaaacagttgaatatatctgggtctcagtttactcagttgcaaaatgggatgagtgtggaatgaaagcatgcaattaaaggtgccaaatccagataattccatattttcacaatgtggaataagtaagtctttttgctgctaccttattggatatgtagaaattttcaaggagctttctttcttttagaggtaaggtctcactgtgttgcccaggctggagtacaatggtgcaaccatagttcactgcagcctgggctctgggctcaagccatcctcccacctcagtcttccaagtagttgggactacaggtgcatgccactatggccggctaatttttttattttttgtagaggtgagggctcactttcttgtccagtctggtcttgaactcctggccagaggtgatcctccagccttagtctaccaaagtgctgggattataggtgtgagccactgtacccagcctcaaggggctttcttaataactggttcctattgttggctgtgtgagctctgtctagcttctccctctctggcaatgttaggagctgtacccttattgctaggcccatgtttgtggttattttgtccaattaattatcgttaggatgaacttttgggtcattttaatgctcttggaaaatgatgtcaaattaccctgtggaaatttcacgtcaatatatacatttatagttgtgaagcacagtgcctgttttctccacattctttcttgcatttgatatgcccatatagaagttgctaatttgaaatataaacatgctaacttatttaaatttccatttggctagttagtagggagggtgagtactttttgtttgtttattgattgattgggttttttattttgtgaactatgttatggcaaagcatttcagttttctttttcaaataaactaaaattttcttattacaaaaatgtacatgtcataaaattttagacagtgtaggaacgtgtgacatggcacatgcaagttccccggatcaatcctaaccttgagaaatcaccactgctgacagtatgggaatgataattccagaatcttctagaaatttttgagtgctatccatttgactttaaagacttctgaaggttcattcatggttttcgtgtgttaaaaggtgttttgtccagtgacatctttgtcaaataaaggtagtaggcttattttgataaatttatcttttcagagaagccatgtagcctagtacggggcgggggtgaccgcacctggggtccccactgaatgctggcatgtctccctgtgctcagcagggtgtatatggatctgttggccttgtctggtctgttgacaggattgctttttgtctctactgtcaggctgttgagctggaagggcagtgacgggaggctgaggggcttctgctcttttgacagtcccagcaccattgccttagtgatagtcacagccagtttctactctctatgtactttgtgtgcttgagtttacttaaacctcacaacagctctgtgaggtgtaaaacctaatattattcctatttttcatagtctaagacatggattcctagaggccgaacccatttgcttagggccacaagatagccagctggaactcaattccagccctgccaggcaccaagtcccctggagatgttagctgttcactttgcaaatctccatttctctgcaccatctctccatgagccccatctccctgtcagcctgtgtatttattggcctggtccagatgtgtccagggacctggggaacctcccatcggttcccattattataaagactttgagcaagttgggggcaggtaaaaggacatgtctctccaagggctgcatcccagaatcagggctcccgagtgagtgggaagagcatctttgcctgggtcataaagtgtggttgccatggcggcagcatggcaatgctgatgcaagtgctggccctgttcccaggagcccatctggtgagctgagagttagtgaggggcccaagagaatggggcttgctctgccctgtgctttagatggaccatgtttgatagaaatatttggtaagtagcacgtagctgataattacagtcatttttctcgccccagtttgtggctcttgtggattaggcggccagaaaaatcttgatgcaacttggtggagctctggggcaggatcctggaattggactgtctggccttaccctttagtagctgtgaggcatttctaaatctaagctctcagtgccacagcttcctcatctgttacagcccttattccacagggcccccgtgaggattaaatgagttaatcctcataaaaagcacagtacgaatagtagtagtagtatgaaaatagtactaatattaccctcttttactcagaattacctcatacccgccactccctttttttagccgtcattgaggtctgccaggattcagcatggtggcttgctgtttggtgcagtgctgaaatcagtggccttgacattaccttcctttctaccacatgagctctaacaagcctgacgcagttccactcccacatttcactgacagtttgggaataaacatgtttttatgtgtggccccagtcactgccaaaaacagcatttatggagcatctaattaccttggagactgtggtgggtcctgtattggagtcaataaactgctttaagcaatgctggctaatttaagaatttttggcattttaaactgttaggatcaacagaacatttattataaatgcccatatctgaggacccacttttaagattgcaatgttcattttggaggggttgggccacctacatatggatttattagtttctgatcaatatagtattgaataaaatataaagactttcttctgctcctcccagggcaagaagcccttacggagtacctgtttgatagaaactagtaaagtatggtatctagagatataatttttgagtaaagagttttctaggatttgaaaaacatgaattgacaggatgcagtggctcacacctgtaatcccagcactctgggaggccgaggccggcagatcacttgaggtcaggagtccaagaccagcttggccaacatgacgaaaccccgtctctactaaaaaatacaaaaattagccaggtgtggtggtggtcgcctgtaatcccaggtactcgggaggctgagacagaagaattgcttgaacgcaggaggtggaggttgcagtgagccaagattgcgccactgcactccagcctgggcaacagagcaagactctgtctcaacaacaacaacaaaaaacaccttctaagcgttgattatttgatcgaaatctctttaaaatgttaagaaaactgagccattaaatgttttaaattgaaattacccttctattaaaagtataatatgcacacagaaaagtttaccattaatctccatggatatttttatttgcagatgtagaaaaaccagtgaataagactaatctctgatctttattgtttttattatttttttttaagtcctgttatacttcatgtaaagagaaccaactcagtattggctctgcgcctggtacatagtaagtgtttgagtttccatctcctttcctctgttgtggctgcttctgcaatggttttaacatctgtttctctgttcatcaactctagagccagattgcctgggtttgaatcccactctgatgcctactagctgtgtgattttgggcaagtcacttaacctgtctgagcctcagttttttcacctgtaaagtgggagtaacaaatatatctactcataaaagttttttgaggacaaaatgagttagtatttatttagcattcagaacagtgtctggctatgacacagtgagccctctgtaagcactggttctttattttttatttattattattattattttttgagacagagtcttgctctgttgcccaggctggagtgctgtggtgcaatcttggctcactgcaacctccacctcctgggttcaagcgattcccctgcctcagcctcccgagtagctgggactacaggtgagcaccaccacgctcggctaatttttgaatttttagtagagacggaatttcaccatgttggccaagctagtctcatactcctgacctcaaatgatccgcctgcctcggcctcccagagtgatgggattacaggtgtgagccaccgcactcagccagaactggttctttttaaacagtgaacccttgacaacgttctctatgacagagagattgagggtactcccagtccatatgataatgggcagtggtgctgatgagttagggagcccatgacctgatcccacatccgtctcatcagtggagagctttggtcttatttcaaacaaggaggaggggccctcagtgtcggtgcgtgggaaggcagagcacaaacaaggagtcctggttagaaaaatacactctcgggaaagaacaggctctccccaggcaaaactttagaaaaataacaatctgctgctccttgattaaagggtagaaaactaattatcctttccggagggacgtgaggctgctctctgccaggctgtgacctggaggtgcaggatgtggatttccttaggatgtaatgaagcctttgccattgaaaacgtgcgatgattcagatggatgtggggggcagggggaggggagagggagaacgatccctttgcttttaaaagcaacttctggacacttcagaaacatttgcgggtcagcactttgaatatggaaaactgattttcttaaattagatttccagaagacctcttacaaaacatcccttcaaaaatgttctgtaatttttgctaattagaccagctgacagtgagcttaggtgtttgaaagcttggtgctgccatctatccgctgatgatgcagatgagaatgccaaatgaggtagtaactgggaaacactttttttgtgtgtgtatgctgaagaaataccaagtagtattaattttagtttctttagttaagggaagagcatgaaaaattcgatatttatataactagtatattatattcctcattgtctcccacaccatactgttagggatggaaatttcccattggcctgtaccatttggctgcagatgtcaagaaagttcaaaaaagtcttacaaatagttattgagcatctaccatatgtctagagggtggggataaaatgttaaaaagataatgaagtggctgttctcagggagctcaatatatacatatactggagacagagtcttgctctgtcgcccaggctggagtgcagtggtgcgatcatagctcactgcaacctccacctcctgggcacaagcaattctcccacctcagcctcccaagtagctggaactacaggtatgcaccaccacaactgtctaatttttttattttttgtagagacaggctttcgctatcttgcctagtctggttggagctcatattttaatgacttcggtggactgaccaatacctaagctctctgtcaatttgtattttatatgaataatgcttcttaggtatctttggacaagtatctctaagctctctttctccatttcactaatgttttcttgtcaagtcaccaggggtctctgctttgccaaatttggtgggcacctctccatcctcctgcttggtgaaatagtagagtctccctctttgaagcactgtcttcacttggcctccgcgttgtccctctcttggttttcctcctaccctcatggggctcttctcatgtctgcaagctgatgatttctgaaaatagtctccttatatttagcagctaattccacatctctatttggaggtccatactatttcaatgttatatgtctgctcttgatttttgtccccaaatctgctcttcccatagccctttgctatcttcccattgttcaggctaaatttctttagagcagcatcctttactgctcttatttcaccttctgtacttaatccacagtagatagtgttattcctgccttcaaatatgttcatcatgcccaggcgcggtggctcacgcctgtaatcccagcactttgggaggccgaggcgcgcggatcacgaggtcaggagatcgagaccagcctggctaacacggtgaaaccccgtctctactaaaaatacaaaaaaattagccgggcgtggtggcgggtgcctgtagtcccagctactcgggaggctgaggcaggagaatggtgtgaacccgggaggcggagcttatagtgagccaaaatcgcaccactgcactccagcctgggcgacagagcgagactccatctcaaaaaaaaaaaaacaaaaaaactgttcaccattccactactcctcaccacccccactgccaccatcttgttccaagtccctgccatccctcatctgggctgctgtaggaacttcctcacctcctccctgcccccgtctcgccacctggagcttctgtctccatacaacattgacagcaatccttttaaaacttaggtcaggtttgttttctgctcggaatcctccagtggcctcccctctcccttggactaaaatccagagaccttgcagtaatctgtgagacccttgccatctggtttcagctccttctgtgactctccgctcttgctcactgcttaccccactccagccatattggttttgctgcccctcagccgtgccccaggaactttgcatgagctatcctgtccacctaagacaggcttccggctcttgcagggagaagcctgccctgggcactccatactaaatatcagctactcccaccacccccgatcccctaccctgctttgtccttctccatagaatttatcaccttctaatgtaagctctgagagaagaggaactatattttttcctctgctgtatccctatgcctaaaataatgcctagcacatggtagacactcagcaaatgtttaaagccaacatttattatgtacttggtgtgaaccaggtagttggcgcagtgctttataggaattatttatttacttctcaaagcaaccctaggaggtctaagtcttatcatatccattttcaagttggaagctgaagactgggaaagttgtataagttgtccaaagtaatttgatggacttgggcttgaacccaggtcttggagactgcagagcccatgcttctgaccaccttgggttaccgttctctccctgtggtggcctgaattggttctagaagtgtttatcgtagctgaccaacacacagaaatgtgaatgagcaacccaaggcccatccatggacttgaaataaggaaatagataggagtcctggtgcgtttgttatgatgagataaggtctctcaggagtgtctgggatatgaatgtgctgtggggcagatactctctcctggatgaggagacaagggaaccacaccaggtggggttagtaaggtgaaaatcatgtataacccaaagtgctttttaaaatttttttttattttttgagatggagtctcgctctgttgcccaggctggagttcagtggcaccatctcagctcactgcaagctccacctcctgggttcacgccattctcctgcctcagcctcccgagtagctgggactacagttgcccgccaccatgcccactaattttttttttgtatttttagtagagatgaggttttactgtgttagtcaggatggtctcgatctcctgacctcatgatccacccacctcggcctcccaaagtgctggaatttcaggcgtgagccaccgcgcccggccttaacccaaagtgctcttaaaagccctgggaaagggtcatgttggggcctgactgtccatctctcattaaatccctcatggccggtatcctcttcaatgctgttcatttggacagctccagaccagactgagaagttggttggcatttgagggcctttttgttccaaaagtgcttatttataaaggatccagcacggcctgagagacgcctggggaaaaggagatgactggggtgaatacagatccacagccccatgtcaggcttgcttcggggtccctgccgggcgcttagaagaccccatgagatggcttccactatgcatgttcttctctgtctctctctgaagtgcatatgttgtattcatgttctttcatcgtgtatggaagcctaccctgtgtattggtgaccacagacttactgagggccgcaccatgaattcattctcattatttattaagctcctattagctgcaaggagtgcagtgacagcagcgagtctaaaccagatagtccctggctttccagagctggttccctggaagagggctctcttacagggtcccttctgtgctccagtcactaagagctttacgtatattaactcctctactcctcacaacagccctgtgagaggggggtcttgttagtaccttcattttacagatggaggaactaggaatcagagatattaagtcacttgtccagcgctacacaggtggtgagttgcagagccggctccagcttctgtgctcttaactactgggcgaagccgcccctgtatggcagcactcaggaagcactgacagtgactattgcagttctccttctgggagattgcacgcatgaaaagttgttctaaagatacaagcttcgcaggaagctaaaatacagaaggggaacacagcaaaatggctcttaagtgggagcagaagacagaccagctgttgctgctgaatctctgagcacagagacagtgcaggggttggagggggaagtgggagtgggaggacatgcagaaagccagaaggtgtgggagttcttatcatcgttgagtgactcaagtaaatatatgcctcagaaatggacttgtaggactgatttctcacaagtactgataaaactccaccactaagccgcttccatcaaatcccaggccacattaaaatgcttgctttctcagcttatttaccgaattttctcttctggagtagttaataggattttatttcacatcattattccgtgtggattttttccattaaatatgtttcttttattttgcccgaaaatatttttatttcaccctcacttttcaaaaattgtagtagaatacacataaaatattaccattgcaaccatttaaaccattaccatatttaccatttcaactatttaaaaatgtataataattcaatggcattaagtacattcacaaggttgtgcacccatcaccactatcgaattccagaaccttttcatcaccccaaaaggaatctgtgtactcattaagcagtcactcctcattcctcctcttcccccagcttctggagctaatctactttctgactctatggatttgtctattctggacatttcacataaatggaatcatataatatgtatcccttgtgtctggcttctttcactttgcatgttttcaagattcttccatggtgtggcatgtatcagtacttcattctttttttaatggttgaataatattctgttgtatggatatatcacattttgtttatccattagttgatgaacgtttcatatgtaccttttcttttctttttctttctttttttttttttttgatacggagtctcactctgtcaccgaggctggagtgcagtggtgcgatctcggtccctggttcaagcaattctcctgcctcagcctcccaagtagctggaattataggcatgagccaccatgctcagctaatttttgtatttttagtagatatgggatttcaccatgttggccaggatggtcttgatcttctgaccttgtggtctgcccacttcgacctcccaaagtgctgggattacaggcgtgagccaccgcgcccggcccttatatgtaccttttcaatagggttattataataccagccatgtgccagacacattgctacatgctatgtcctgaatatatgaaaaattcttattgatcaatcaataagaaaaaaagaacacttctttatataaatgagcaaatgaactgaacaagcgttttacagaagaggaactacaaatataatttcatggatttaaaaaatcatttcgatctcgtctctagttaattctggaattgttttgaatagggtagtcctatattatttgcaaactatgcacatgtatttgtttgggatattacctatttaggggaagaatttcatttgttgctttgttcaagtagatctttatacatttgtgacctaaagatgatttggtatttacagatgtagtactacctctctaaagcctttgtaaaatattttgtccttttaacgtttctgaattcagatggacactaacatccttttggagaatgcgtcgtttttagcaggggttctcaatttatgtattttggttgtcaccaactgctaagacatggagcagtggattttcacagtcagaggttattggaaacggaatgccttatttttctataactgtgctgttcaatatgatggccacatgccacatgtgacaactgagcacttaaaacatggctggtgccaatgaagatgtgtcataagtgtaaaatacacattggattttgaaggcttggtatgaaaaaaaataaagtatctctaacacttttttcctgttgattatgtgttcaataatatctggatatactgggttaaataaactatactattaaaactaaacttatctattcctttttacttttaaaatgtgactaataggctgggtatggtggctcacacctgtaatcttagcactttgggaggctgaggcaggaggattgcttgagcccaagagttcaagaccatcctgggcaacatagggagaccccgtctctacagaaaaaaaaaaaagctagttgtgctggtgtgtgcctgtagtcttaggaggctgaggcgggagtatcacttgagctggggagttcaaggctgcagtgagccatcatcacgccactacatttccagcctgggcaacggagtaagaccatgtctcaaaaaatatatatattatatattatatatatataaaatatattttatatatattatatattatatatattatatatattttatatattatatatttaaatattatatannnnnnnnnnnnnnnnnnnnnnnnnnnnnnnnnnnnnnnnnnnnnnnnnnnnnnnnnnnnnnnnnnnnnnnnnnnnnnnnnnnnnnnnatatattttatatataattaaatatataatatattatatatattatatataatatattatatatattttatatatattaaatatatatgttttatatttaaaaatatatattatatattttatatataaactataatataaaatatattttatatatataatatataatatattttatattatatataatatattatatataatatattatttatatattatatatttatattatatattatatatatgtcattatatattatataataatataattaatatatattatattatataatatatattatataatatgtaatatataatcatataatataatatattatatataattgtatatataatatatataattatagtaccagtatatatgttatatataatataatgtttattatgttatatataatataataagtattatatataatagctattttatatattatataatatatattatataatatatattatgtaacatatataatatataattaaatatattatgtataatatatattatatattatataatgtacataatatgtaatatattatacatataatatattatattatatattatgtaatatatttaatatattatataatatattatataatatataatatgtataatatataatatattatataatatataatatgtataatatataatatattatataatatataatatgtataatatataatatataatataatattatataatatatgatatgtacaatatataatatataatatataatatataatatataatttgtataatatataatataatattattatatataagtatgtatatactatatatatatgactaatagaaaacttaaattacatatgtggttcacatgatatttcaattgaataatgctgtatttaaaaaaaaaaaggctgggcgcggtggctcatgcctgtaatcccagcactttcggaggccgaggcaggcagatcacttgaggtcgggagttcgagaccaacctgaccaacatggagaaatcctgtctctactaaaaatacaaaattagccgggcatggtggcgcatgcctgtaatcctagctagtcaggaggctgaggtaggagaatcacttgaacccaggaggtggaggttgcagtgagcagagattgcgccattgcactccagcctgggcagcaagagtgaaactctgtctcaataaaaaataataataataataataataattaaaaaaaaaaaggctgacagagggtggagaatggttgagaagagtttcagtggacacctatgactcccttgccttcagaatcttgaaagtgtccctgagacaggccacacagggtctggatgtctgcagtagcctccagcttatctctgctttcactctgaacccctgactctcttttcccctcccttgccagggatatctttctaaaaggcaaatctcatcatgtcactccatgcttcagtggaaccccatcaccctatggccaaatccctgactctgcttccctgtccagccttgcccacctatccagcctcatctcatgcctttctgcctccttccccaccagctaatatatgttattataatctgcattatgttcattatatgcaataaatccacaatatattttcatagtaaaagactaagaaatacataatataaaggataatgtccacatttatgctgtctaaataccaccccagctatgtaatcagtcactgtcaacagttgggctgtgcccttccagggccctcatcctacatatacagacctaattctgtatctttgtatagcattcatctctgtacccactatacatccaacatttagtcatatttgcttcagattttgtgtgctccaacccaggccctataccttccctctctccctggaggtaatcattcctctccggttgaaatagtcttaacatctggagtttttacatttttattacatatatatgactataaacaatagagtagtattttgtgtgtttctaaataatatatcatatcatatcatgtatatctcctataacttggattttcatttttttctttttttgagcttttttattaccatatagttctatatgatcttccactataaaaatgaatgtagtggccaggcgcagtggctcacacctgtaatcccagcactttgggaggccgagccaggtggatcatgaggtcaggagattgagaccatcctggctaacacggtgaaaccacatctctaataaaaatacaaaaaattagccaggcgtggtggcaggtgccagtagtcccagctactcaggaggctgaggcaagagaatggtgtgaacccggaaggcagaggttgcagtgagccgagattgtgccactgcactccagcctgggcgacagagcgagactccgtttcaaaaaaaaaaaaaaaaaaaaagaatgtagtttcatttaatctacttccttatcaataaacattaaagttgtcatacttcttccagttcttcacatgtgctatattctcctttatttacctcttaactcttgatgctttttatcttctatagaagtttgtataagattgaaatgatctggtttttgttttttctttggaaagttcggtagaatccattagttaaactgtctggggctgacattttctctcatttctttattaattataaggctattcaggctttctatttcttcttgggacagttttaataagttatattttcctagggatttctgcattttctttaagttttcaaatttaatgccataaaactattgataacattcttattgtagtcgttatttatttgttaaaatggggccttcttatggttgcccagactagagtgcagtgacattatcatccctgactgcagccttgaactcctaggctcaagcagtcctcccacctcagcctgctgagtagctgggattataggctcatgctaccatgcctggttaattaaaaaaaattttttttgtagagttggttttgctatgttgcccaagctggtctggaactcctggcctcaagcgatcctccttccttggccacccaaagcactgagaagctttaaattttaattgctatttaatctgtagttatgtgaccctattcataacagtatttattagtgtcctttccacctctttttgaatttggccagttttatctatttaatgtctattttgtttgtcttttcccttctgcctttttagcatggttttcctttggcttggcctacttttcccttttctcatcacctgttgagtccttcttctctgttaggtctcagagaggcctcattttctctgggaggtctttctggctcctcaaactttggtcgagaccctgcggcactcctcactaccacttaaaaaaaagcaatttgccatgttgtaattttttggaggggaacagggtggatctgaatgccctgtgaggacatgaaagcaggaactgaatttcttgtccactgctgatctctaatgtctggcaccatgcctgacatgtagtagctgctcaataatattggtgaataaattagtgggtgagctcccacgagtagagtacagacccattctccaaaggtgagggctctctttaaggggccattctcagctggactgctggaaagaggattcagctagtgactgagaaattgtaccagctgaccatttctgaggttctgtgattttttttttttttttttttgagacagtcttgctctttcacccaggctggagtgcagtggcacgatctcggctccctgcaacctgtgcctcccgggttcaagtgattctcatgcctcagcctcccaagtagctgggactacaggcatgcaccaccatgtacagtaatttctgcatttttttagtagagacggggtttcaccatattttccagactggtctcaaactcctgacctcaggtgatctgcctgcctcggcctcccaaagtgctgggattacaggcgtgagccaccgcatgcagcctctgtgattcttttttcccgtaatttatgaggaaataaagagttggagttgcagccatggcatgagtagaatgaagctgagtgtgactcattgagccatagaaatgttattgggatgtccctttgttcaagagagagacaggccaaagtgatgagctttctattctgcaaactacctcttcacagtgagcttctccacaaagaattgggtcttcacctggctaaacacctgccagtctctcatcaactatgtcctaaaaacagaaactaaaaagatgtttaagtgaaagaagccattatcttcttaagtggttcaatcagaataaaaatacctggcacaggtggtaccacattcggcacagatttctcttaaaaaatatagctgtttgatttttctagttatgctacaattgttctgatggataaagagaggtaaaacgagaaaagacgaaaaaagtttcgttagcaagatgttctgggttaagaattcagacagtaaaatatttaaaacatatacaacttgctgacgaaggtggtagtctttgagaagggaaagtggagttaggaaattagaaaagagaagtctcttttcatggttacctcaggtccagatttgtggccatgttgttatctaaaacaaatattcataacacattgaagcctttgttttcttttgtgtatattttacccagtccttaagagtgagatgtaaatttcattggccctccaatatgagcctcaccaatgataatggtaactaacatttacccttactgggttaaagaaggagtcttctcataatgataatagctaatttgagtacctactaagtgccagactccctgctagccattttttttagtacatgaatttattccttcaattttgtgaaaagggattattagccccactttacagatgagaaaatggaggctcagagggagtagagagtagggaacttgcttgaagtcccccaccaagaaagggagggagccactattagaaccccaagctggctcttccctaaacaccatgttctgagccccacacagtgcgcagacagcaggagcagtctaaatacatgttcaattctgaacccatactaagaagctgttgtataagtggtcgctaaacctcttctcaaggtgacgagaaacagtcacatttgttttcacatggtgggaaaataaattctgcactaaccctaaggcctattgctgctgaccttattctgtttgattccagacacatacacttgaatttgagatcattccctaactgaaccttgaatgctgatttttctctgctactgtgggcatttctccatttctattatgagctttcccaagggtggggagcttgtggcttttctttcccaccttttgtaaggttgtaacctccctccacaatagcagccccccaactccaacccctccaacaatcttggaagtttctctcttgctgctcacccatccctggctttcctgtgaatccctctatggaagtggtcatacttatccttgtgacatctgtgagacactgggaaatgctgcctagacagaaggctgtgctttgtaaccatgtgtgtacaccatgcacagcctgctcacatgaggagcctgagggctggacacagacgatagacacgccctccaagccttgttcagaagctcagctgagtgtctttgtgtctgggaaacctgcagcatcaagtgctattttctcacttggacttttgctgattgtgcaaaatactgcttctacaatagaagaaatatacccaggactgagaggcccctcctttggtgaggacctggtgttggtgcttccgtgatggtgcactttatgctgctaggatccttcaccagcttcatcaagaagccttctcatcagtatggttctccttccctgaatctgtgcattaaagccacctgggtggtagtgtttggctggggagaaggaggaaattatcaggaggctattatggtatcaggatataattttcaaacatttgttattatttttagagacagggtctccctctgtcacccaggctggggggcagtaatatgatcatagctcgttgcaacctcaaacttctgggcttaagcaatcttcctacctcagcctcccaagtggttgggactacaggcaggcaccacaatgcccagctaatttgtttttatttttagcggagatggtgtttccctatgttgcccaggctggtcttgaactcttgccttcaagcgatcctcccaccttggcctcccaaaatgctgggattacaggcatgagtcttgtgcctggcctagaattgttaagagggactgtagctaatgtgaatgaccggaagcctgaatggtggtgggatgagaggaaggtgggagctaacaattagggacagcccttctctcggtaggtctcctggcagcttctccagctgacagggacacttaagttgcccaacagtatcccgaatggacagatttgctctgatgctttttctttggctatgaggcctgatggtgggaagccctgctaagctgctgccctcccacaaggaacccccaggcagctttctttcaggggtatgctttgccctgtttggggggacttctcttcatgtgagagggactgcatcctctggatctggagtcagacacatctgggtttgaatcccaaattggccaccaaatagctgtgtgacttctggcatgtggtttaacctctctgagcctcagtttatctcatctataaaatgcagtagtgacaatgttcccactatatcatattacataatgttatataaaattatgatgtaagattatttatttaaatgtatgtaatgccattataatatattgtgtataaaatgttatataacactgttataatgctgtctgtatgtcatgtatttacattataacataataagctaccttataagattattgtgagacttagagtacctaaagtgcttagtcctgggcacatctgtaattgaatctgtgttaattattgtgataattgacattatgtgtgatcttctgtggattgcaacatgtaagataaagacacatttactcagaatgttctggtatatattgttactttagaagcaatgaattccatcaaatagttaggaaagcaaagcccagttatgactgagagggaagggagtggtatccagggagaagtattgttgaaatccaaaaattttgttttaaaacagacatttattttcagaaggacttaggccaacatgtaacttaatggagaagggtatgaaacataaataaccacccacatgttctctgtcttgcgatcttattagcctgggtttttattgcttacgtgtgggtgaagaggaggttgaggcaggagggggcctggtttaaaggcacatcaggtgggagttcccatagttttggtgagttgccctggctcttctgtgtcagccctgcatcctgggttgaatgctgttcttggagctaggtgttgagagagaaagggggacaggggcaccacgctgacagctggtaaaaacagcaatgacagaaccagagttagagtcctcatctcatcttgactcaacacagagggtattatttcccctgttttgcatgtaagaaaaccaaagctcaagaaattaagcctcgtgttcagagtcacagcgctaataaacaccatggtatttgaggtcagacaactaagaacagaatcccaatttcatctgtgtgatcagaatcaaagcacttaatatccctaggcgtcagtgctcttatctataaaatgggtacaataatgcatcctaactcacagggtgagagtcatgggattaactatgtaaaatattagcatatgctttttaaagtgctcagtattggttagttgctgctattattgtaattaccttgtattttatctcttttgtatggtagagcaatcaagatttttactcagctctaacataccacaaagcctgtacactggtcactacatgctttctgccttgcattattgctgattacagcagaaaggtcaaggtaaaagtgactattgtgtaaccaaccttttggggtttgtttgtttctgagatggagtctcgctctgtcacccaggctgagtgcagtggtgcaatctcggctcaccgcaacctctgcctcccgggttcaagcgattctcctgcctcagcctcccgagtagctgtgatcacaggtgcccaccagcatgcctggctaatttctgtatttttagtagagatggggtttcaccatgtttgccaagctggtcttgaactcctgacctcaagtgatctgcctgtttcggcctcccaaagtgctgggattacagacgtgagccaccgcacctggccagccttttggtacatcagtgactaaagccccaggaaaagtccaaggtggatgcttttcagagatgcttttcagcaaacatgaaatctgaatatccatattgacagacatcacatgttttaggggagtaatttatccataaaaatattgaaaaaggtattcctgtagttatattggcagctacaaaatttgattaggagacagaaataaggtgcttctggtgtgcctggagtctctttgtgctggtctgtcttgaagctgcctccactgcctctaaggaaattgattcatgttgagaggttaacaggtgaggaaaccagtttcagcttgttacgcgggggctaaatgtcccgttgatggttgctttaaaaacctggagctcaaatgtaccccttgttggaactccccagcatgtctgtgtgacaagggagagttccaggctgagctgaagctatacatctcctgatagtgtccatgtgggaattgagtctatgtgaaaattcaagacaaagattgggagtctggtctgacttttttattgcatccaggttgcgtgttagattttattttactttatacagatgaagggctattttaagggactctgggactttcctgctggggaactgagaaggagtttggggtgaatttggctgctgaagattgcagagctgttgaaaactccatccaccttgtttgggccatttcttgaggcatctctctttttgataaacctgcatttgaaagcagtgacttcctctgaatatccaaccactgaataatgaatacattgtcttttctcttctaggcctaaacggcagcggcaaaacaactttcccatgtttccctctcctaaagcctggaatttcagaggggtaagtgttgccctgggtagcccctgctgttaaatgtcctattatggatacatgctctggcctccagaacggacgctgttagggttggttttactaatcaaagtctccatcaggagcgcatctgtgctttaccacttggggaagtcacacttgaatcagtggttgtgggttaagtaaaaactccaagtggtggccaggcgtgatagctcatgtctgtaatcccagcactttgggaggccaatgtgggaggatcgcttgagcctaggagtttgagaccagcctaggcaacatggcgaagctgctactctacaaaaaaaaatatgaaaattagctgggcacggtggcatgtgcctgtagtcctagctactcaggaggctgaggtgggaggatcacttgagcccaggagacggaggttgtggtgagctgagatcatgccactgcactccagcctgtgcaacagaacgagactctgtctaaaattaaaaaaaaaaaaaaaaaaaaaattcaagtggcccagtaagcttctgctgacattcacctgccctgagggtcttgggctgcaggaagcatcttgtgaagaagctaagaagtgtcaaggttgctgaggcaggcattggggctgttttctttggaacctggagggaaccagtgtacaatgaaggaaaaaagaaatcagaaatgtagagtttattaatctgtagatttatgccttcacagggagctttgttttccagaaggagaagtctgtaagctttaaacagattttaggaatcataaaatttgaccaagcacaaagcaatcaaccttgcttgggagatatagaggtataggaagggtcagattgaacttcttgatgcaaggttgtcttcctcagcataatagtgatgataataataataatagccacagtgtatggaggtcctgctgtgtgctaaagtgaattctagcgctaatctcaggagcaaaacttgcatctgtagagaatgctctgagctctttttcacttccaggcctttgcacatgttccttctgcctagagcactctctttgcctagcaccacactcctacacacactgctccgggcccacacactttacccactgggtctcagccttgacatcacctcctcttggaagaagccctcatgaccaccccctgaatctgagttcctgaatctcctatgtacccctgcagtttcttactattgtgcttagtccttactgaaatttaagattggaagactcaggcatgaagagtgtagcaaccttgtctttctctcttgttcactactgtatctctgggcctagtacagtgcctagcacatgtatgcttaattaatttgtcagatgaatgaatggaatgaatgaatacctttctcacatccatctgataccaaatacttttcttgcatccatccacatgttacctttagattgcgtttcaagttcaggtctttagtctttttaatactgttctgactggttctattcacactttaaaatcttgtatagatctcagtcattttctccaagtgtcttattaaaaataaatatagatcatggaactattttagctcaggttacaatatgctttttattgagtacaaagagaaatgtgttgacttctgaaatagatgtgcatgtcttactgaatgcaagtcatgcacttcctaagtcatttatggttttgtgggtaggatctccatttctcaaagtgtatccagttgtgtgatcataaccattaagtacaaaaggcttgtgtggtcagatctatttgggacatactgagtgtattaaactaaatatgctcgctactgcagggcttctcagagcctttgaagtgttgatgtacgtggagactccataaggagaactggtggagtttgtagcatttcccgaagtcattgatcatgaaatcccttgttgaccaagtagattgtatgcactttggaatagctgacattaacagtcaattttgaactatagagaaattagatctcttgtgagcaagttagcctttttgaaggcctttgttttcagtgcttgccctatccatcctcccttcagtattgctccccttctgctccaacaatggtcattagccaaggcttgtgggtacacgtggagtgaccaaccatccaagtttgcccagggactgtcctgggttgagcactgaaagtcctgcacatcatgaaattccctggaaccaggctaactgggacaattgattaccccacctatggccacgagacctcttcaactgttttcccttgaaaaatgttctgtgaatttttaagcacgactctggtttatagaacttgttactcaaaggaacctgttagatacatacttggtttaagtgaccctctgtttgccccatccttgccaaatctctctaacacaacagtcacattaatttgctgggcactgtggcacacacctgtaatcttagggactcaggaagattaggcaggaggattgcttgagcccaggagtctgagtctaatctgagcaacacagcaagactctgtctcaataaataaataaaatttaaaaaaaagtaataattcactgcaggaaaacaaacaaacaaacaaaaaaaaacaccaaccctgcccctggctaattgcaaccaagtgggtttcagagttcaatgcaatgttgacttcaggttcagccctcaagttcttagctagctcacaagattttcccaaacagcaaaagttgtcagttaggtgattaggccatttgtgatgtttatcttgatctcctgtccttgccttgatttcttctgggccctgaggcttattggtaaaattagacaaactgacatcaagatataccagagggagacagttcagggcctggccaaaggccagattcctccttggccaaaactgatctctctttgcctcagagtgtaatccacagtgacatggtcggggattggggaagggaacccaaccaagtggaaacaccctcactcccagccaggacacactttgtaattgtcattatggtaattaaaattgaagaacgagaaggatgcagaatgtcaggatgaagacatgtgaggcatcatctagctgacacatcttctgtaatgaaatctgactcccaggtctgttaggccaggatgtgcatgctgttctagggcagggtgtgctttttgtgaacactctgctttcttctttatttagaaagggaggtttcagaatctctatgctagcaaattttccacatttatgtatgtgtcggagaaagccattgtattatcagcatttgcaatttcattcctcttgcaaagaaaagggatccaggccgggcgcagtggctcatgcctgtaatcccagcactttgggaggctgaggcaggagaatcacttgagcccaggagttcaagaccagcctgggcaacaaagcaggaccctgtctctgaaaacagaaacaaaccccaaaattagctgggcgtgatgacctattcctgtagtccaagctaccagggaagctgaggtgggaggatcacttgagcccaggagtttaagcctgcagggagcgatggttgcacctctgcactctagcttgggcaacaaagagagaccttgtctcaagaaaaaaaaagaaaagaaaaaaaaaaaaaagaaaaaggatcagtgtttgttcaccaatgtcctaggcacttgtgaatttaaggggatggggtgggggacgaggtgatggtgagaaatggtttggaaaaggcaagagaagaaggaaccatattgctctcgaggagaggtacagtgggagaagctggtaggcaagatctgggtggctgaggagcagactttttgggagaagagagatttcaaaataactttaaagaaagtcttgctgagtgagttgtattgcacccccgtctttgttttccctggaaacattccctgcagacctccattagtcctcagacattaggagttgcatttgtgtttttccttttttatgctggagtgtttggctgtagagaggctcagaaaaggctattgacactcatattacatatcccctctccttaccaagtggtttagccctttcccggattgtcatcttcattaattgcagggtgcattctgcccttcagttcccatgcttgtctaaggagacagaggccctgggtgttaccaaccctccaggactttcccaccctcctgagcaaggtgtggcactgtgcccaccacttaccagacccataggtgctgcagatgcattcaccaagagaagcagagaggatggtttagggtggagtggacatggaaggaacagtaggagaaaacctcacagaatgggaggaatgagaaggctgagagaggaggaaccctggggggtgtctcgctgtgaggcagcttctccatcaggtactcactgcacatctgctcccatctggttggggcagtgctgagctcagagtccagaatttccacccttccttgtgaaaatatttgctgcagctcctcctgttggggtggggtggaggcactgaggctcaaggaagacacacaccctagagctgtgaaagtctctggaacacagctcctgccattgcctgtaagttaactaggaaatgcttaaccaggacctgctgtgaaaggcattgttttaggtgccagaactgaggttttaattaaatacagaccaaatttcagagccctttttgtcttgtctccttctccagtgcctggtctttacttttgtctagtccatttgagaagattttctagactctggggcttagaagtaactttggacattgtagccctgaccttttaatatttagacaaagaaaatgagaccttgtatattagtcaggactctgggttataagtgatagaaactcagttaaaactagctcaagtataaagggaattggttgcttatgtgactgagggaaactgaggtgggtaagcttcaggcacagctgtttccaggtgtattccttttctcagctttgccactctcttggtttgtcttctcctactgcagatggatgtttttgaaggaacagggtgaccataaatggccacacatttccagaggcaagagagatttgcttccaggatccacatatgaaatcccagtgtaggactctgattgtctgggcttgggtcacatagctatgcctcggccaatcgctatggtcaagaagatggggtactttgattagacaggccttggtcacatgcctccctccatagtcagggagccaggtggacagggctctgtaactggtagctccactggagccacttgaggtggggaaggggcagctgctcaaagaaagagtttggtgttgttaccaaaagggactctgtttcctggacagccagaaaataatggagcccactcctaagggtcactcacagtggagagatcaggactagaaccttgtcttttgacaagaggtcctcaaccttctccacactgccttgacccattccattctccgtgtatagaaggaagttgccaaaacctcattgtagccaaatgtttcttgaaggtcagatggagagttgctctgaaattcacaactcagtaaagtgacagagtctctaatgctcacaacacaccaggccaggtcagtatgtattgtggctttaccatctctacactgcaaaagaagccagcaagcctttcacttctcttgcaggctcagtttgtgcatttacttttgttgactgaacgtcagtcccaggccaggctgtggcagtcccgcctggtagatagtatgtattcccagtccaaagatggggaaacagagccccacccctgctatttgcctaaagtacaggtgtagtaattggcagagtcagcatttgaatgcaggactttctgttcccaggccgttagagtatattacctctttaaaacaaggctgatgacacctacttgtcctcaaaggaggttagacgtgaagaactttttaaaagatcttttttaaacttttcatcaccttgatttccttctactctcttcgactttattttaaaccttttaatcttccctactagatgtatgaaaaaatgatttgttaccccaactttgtaatggtaattactaaaacaatagcaataacttcatttatcccaggtatctaacccctggcattcacttacattttacctggcactgtgttgagcattttacgcatatattacttctcagaaaaatcttaagaggtgggtatagtttcagcctcatcttcattttataaatgagaaaatacagtaccttaatattctactgctgagtaacaaattattataaatttagcagcttaaacagcagttgttcactagcttggagttctgtggattagaagttagggcatggtgtaagtgagttctctgcccaagatctcctgagactgaaatcaagctgtcagtcagggctagagtttcatctgaggcctggggtcttcttccaagttcatttgggctgttggaagaattcagttccttgtggttgtcaggaggttctcatttccttgctggctgtcagcttggggtcgctgtcagagagcttgccatgtcatcttcaaagtcagcaatggagaatctccctcacaccacatccattcatgcttcagatgtctctgacttgaggaagagccaaattccttttaagggctcatcagactaaattaggcccactcagatgatctctctcttgatgatctaaaagccaatgattagttacccaatcatgggggtgatatcccatgacattactaggttctgattgcacccaaggggagaggattatacaaggtgtatacactagaggatgggaatcttggggaccatcttagaattttgcctaccacacagaggtttagagaagggaataacttgcctagagtcacacaacaggtaagtggtgaagctaggattcgaacctgacctcacctcattccaaagcacatgttcttggccagcatctgtttggaacttttcttttgtatgaaattatttgcaagtggggagaatatttgcaatattcacctcatactaacctctaacatacagaggactcttggaaaacagtaacacaaatttgaaaatctaataggaaaacagttaatggatcagaataggcagcatagaagagaaaatacataggaccagtaatccgagtcaaattgtgcattctaactaataatatacaaatatttttaaattatgaaagtgcaggcacaccccagagacattgctggttcagttccagaccaccacaatgaagtcaatagggcaataaagtgagttacatggatgttttggtttcccagtgcatataaaagttatgtttacactatactgtagtctattaagtgtgtaatagcattatgtctaaaatatatatatcttaatttaaaaatacttcaatgcaaaaaatgctaatgatcatcttgcctcaatgatgatggctgctgatggatcagggtggtggttactgaaggctggggtggctgtggcaatttctttcttttttttctttcctttctttttttttttatactttaagttttagggtacatgtgcacaacgtgcaggttagttacatatgtatacatgtgccatgttggtgtgctgcacccattaacttgtcatttaacataggtatatctcctaatgctatccatcccccctccccccaccgcacaacaggccccggtgtgtgatgttccccttcctgtgtccatgtgttctcattgttcaattcccacctatgagtgagaacatgccgtgtttggttttttgtccttgcgatagtttgctgagaatgatggtttccagcttcatccatgtccctacaaaggacatgaactcataactttttatggctgcatagtattccgtggtgtgtatgtgccacattttcttaatccagtctattgttgttggacatttgggttggttccaggtctttgctattgtgaatagtgctgcaataaacatacgtgtgcatgtgtctttatagcagcatgatttataatcttttgggtatatacccagtaatgggatggctgggtcaaatggtatttctagttctagatccctgaggaatcgccacactgacttccacaatggttggactagtttacagtcccaccaacagtgtaaaagtgttcctatttctccacatcctctccagcacctgttgtttctgactttttaatgatcgccattctaactggtgtgagatggtatctcattgtgcttttgatttgcatttctctgatggccagtgatgatgagcattttttcatgtgtcttttggctgcataaatgtcttcttttgagaagtgtctgttcatatcttttcccactttttgatggggttgtttctttttttcttgtaaatttgtttgagttcattgtagattctggatattagccttttgtcagatgagtagattgcaaaaattttctgccattctgtaggttgcctattcactctgatggtagtttcttttgctgtgcagaagctctttagtttaattagatcccatttgtcagttttggcttttgttgcccttgcttttggtgttttagacatgaagtccttgcccatgcctatgtcctgaatggtattgctaggttttcttctagggtttttatagttttaggtctaacatttaagtctttaatccatcttgaattaatttttgtataaggtgtaaggaagggatccagtttcagctttctacatatggctagccagttttcccagcaccatttattaaataggaaatcgttcccccttttcttgtttttgtcaggtttgtcaaagatcagatggttgtagatatgcggcattatttctgagggctctgttctgttccattggtctatatctctgttttggtaccagtaccatgctgttttggttactgtagccttgtagtatagtttgaagtgaggtagcatgatgcctccagctttgttcttttggcttaggattgacttggcaatgcaggctcctttttggttccatatgaactttaaagtagttttttccaattctgtgaagaaaatcattggtagcttgatggggatggcattgaatctataaattaccttgggcagtatggccattttcacgatattgattcttcctactcatgagcatggaatgttcttccatttgtttgtgtcctcttttatttcattgagcagtggtttgtggttctccttgaagaggtccttcacgtcccttgtaagttggattcctaggtattttattctctttgaagcaattgtgaatgggagttcactcatgatttggctctctgtttgtctattattggtgtataagaatgcttgtgatttttgcacattgattttgtatcctgagactttgctgaagttgcctatcagcttaaggagattttgggctgagacgatggggttttctagatatacaatcatgtcatctgcaaacagggacaatttgacttcctcttttcctaattgaatagcctttatttccttctcctgcctgattgccctggccagaacttcccaacactatgttgaataggagtggtgagagagggcatccctgtcttgtgccagttttcaaagggaatgcttccagtttttgcccattcagtatgatattggctgtgggtttgtcatagatagctcttattattttgagatacatcccatcaatacctaatttattgagagtttttagcatgaagggctgttgaattttgtcaaaggccttttctgcatctattgagataatcatatggtttttgtcgttggttctgtttttatgctggattacgtttattgatttgcgtatgttgaaccagccttgcatcccagggatgaagcccacttgatcatggtggataagctttttgatgtgctgctggattcagtttgccagtattttattgaggatatttgcatcgatgttcatcagggatattggtctaaattctctttttttgttgtgtctctgccaggctttggtatcaggatgatgctggcctcataaaatgagttagggaggagtccctctttttctgttgattggaatagtttcagaaggaatggtaccagctcctccttgtacctctggtagaattcggctgtgaatccatctggtcctggactttttttggttggtaagctattaattattgcctcaatttcagagcctgttattggtctattcagagattcaactgcttcctggtttagtcttgggagggaatatgtgtcgaggaatttatccatttcttctagattttctagtttatttgcgtagaggtgtttatagtattctgtgatggtagtttgtatttctgtgggatcggtggtgatatcccctttatcattttttattgcacctatttgattcttctctcttttcttctttattagtcttgctagtggtctatcaattttgttgatcttttcaaaaaaccagctcctggattcactgattttttgaagggttttttatgtctgtatctccttcagttctgctctgatcttagttatttcttgctttctgctagcttttaaatgtgtttgctcttgcttctctagttcttttaattgtgatgttagggtgtcaattttagatctttcctgctttctcttgtgggcatttagtgctataaatttccctctacacactgctttaaatgtgtcccagagattctggtatgttgtgtctttgttctcgttggtttcaaagaacatgttaatttctgccttcatttcgttatgtacccagtagtcattcaggagcaggttgttcagtttccatgtagttgagcggttttgagtgagtttctgaatcctgagttctagtttgattgcactgtggtctgagagacagtttgttataacttctgttcttttacatttgctgaggagtgctttacttccaactatgtggtcaattttggaataagtgcggtgtggtgctgagaagaatgtatattctgttgatttggggtggagagttctgtagatgtctgttaggtctgcttggtgcagagctgagttcaattcctcaatatccttgttaactttctgtctcgttgatctgtctgatgttgacagtggggtgttaaagtctcccattattattgtgtggcagtctaagtctctttctaggtctctaaggacttgctttatgaatctggatgctcctgtattgggtgcatatatatttaggatagttagctcttcttgttgaattgatctctttaccattatgtaatggccttctttgtctcttttgatctttgttggtttaaagtgtgttttatcagagactaggattgcaacccctgcatttttttgttttccatttgcttggtagatcttcctccatccctttattttgagcctatatgtgtctctgcaggtgagatgggtttcctgaatacagcacactgatgggtcttgagtctttatccaatttgccagtctgtgtcttttaattggagcatttagcccatttacatttaaggttaatattgttatgtgtgaatttgatcctctcatcatgatgttagctgattattttgcttgttagttgatgcagtttcttcctagcctcgatggtctttacaatttggcatgtttttgcagtggctggtactggttgttcctttccatatttagtgcttccttcaggagctgttttagggcaggcctggtggtgacaaaatctctcagcatttgcttgtctgttaaggattttatttctccttcacttctgaagcttagtttggctggatatgaaattctgggttggaaattcttttctttaagaatgtcgaatattggcccccactctcttctggcttgtagagtttctgaggagagatcagctgttagtctgatgggcttccctttgtgggtaacctgacctttctctctggctgcccttaacattttttccttcatttcaactttggtgaatcttacaattatgtgtcttggagttgctcttctcgaggagtatctttgtgacattgtctgtgtttcctgaatttgaatgttggcctgccttgctagattggggaagttctcctggataatatcctgcagagtgtttttcaacttggttccattctccccatcactttcaggtacaccaaccagacgtagaattggtcttttcacatactcccatatttcttggaggctttgttcgtttctttttattcttttttctctaaacttttcttctcgcttcatttcattcatttgatgttccatcactgataccctttcttccagttgatcgaatcggctgctgaggctagtgcattcatcacgtagttctcatgcctttgttttcagctccatcagtcctttaaggacttctctgcattggttattctagttagccatttgtctaattttttttcaaggtttttaacttctttgccatgggtttgaacttcctcctttagtttggagtagtttgatcttctgaagccttcttctctcaactcgtcaaagtcattctccatccagctttgttccattgctggtgaggagctgtattcctttggaggaggagaggcactctgatttttagagtttctagattttctgctctgttttttccccatctttgtggttttatctacctttggtctttgatgatggtgacgtacagatggggttttggtgtggatgtcctttctgtttgttagttttgcttctaacagtcaggaccctcagctgcgggtctgttggagtttgctggaggtccactccagaccctgtttgcctgggtatcagcaatggaggctgcagaacagcagatattggtgaacagcaaatgctgctgcctgatcgttcctctggaagttttgtctgagaggagtacccggccgtgtgaggtgtcagtctgcccgtactggggggtgcctcccagttaggttactcgggggtcagggacccacttgaggaggcagtctgtccattctcagatctccagctgcatgctgggagaaccactactctcttcaaagctgtcagacagggacatttaagtctgcagaggattctgctgccttttatttggctatgccctgcccctagaggtggagtctacagaggcaggcaggtgtccttgagctgtggtgggctccacccagttcgagcttcctggctgctttgtttacctactcaagcatcagcaatggcaggcgcccctcctccagccttgctgctgccttgcagctgccttgcagtttgatctcagactgctgtgctagcaatgagcgagtctctgtgggcgtaggaccctccaagccaggcacaggatataatctcctggtgtgccatttgctaagaccgttggaaaagctcagtattagggtgggagtgacccaattttccaggtgccatctgtcacccctttcttttactaggaaagggaattccctgaccccttgcacttcccgggtgaggcaatgcctcaccctgcttcggctcacgctcggtgaactgcatccactgtcctgcacccactttccaacactccccagtgagatgaacccagtacctcagttggaaacgcagaaatcacccgtcttctgcatcactcatgctgggagctgtagactggagctgttcctattcagccatcttggctccacccctggcaatttcttaaaataagataacaatgacatttgctgcattgattgactctttcctttcatgaaagatttcctgtagaatatgatgcatttaacccataggagaacttccaaaattgcagtcattcctctcagatcctgcagcttgctttatcaattcagtttatggaatatcctaaatcctttgttatcatttcaagaatgttcacagcatctttgccacaagtagattctatctcaagaaactactttttggctgagtgcggtggctcacatctgtaattccagcactttgggaggctgaggtgggtggatcacttgaggtcaggagttcaaggccaacctggccagcatggtgaaaccccgtctctattaaaaatacaaaaattagctggacatggttgcgcaggtgcctgtcgtcccagctacttgggaggctgaggcaggagaattgcttgtacccgggaggcagaggttgcagtgccctgagatagcaccactgcattccagcctgagcaaaaaagtaagactttgtctcacaaaaaaaaaaaaaaaaaaaaaaaagaaaccactttctttgctcatccataagaagcaactccccatccgttcaagctttatcatgagactgcagcaattcagtcacattttcaggctctacttctaattctagttctcttgctattttcaccacatctgcagtgacttccaacacggaagtcttaaacccctcaatgtcatccatgagggttggaatcagcttcttccaaagtcctgttaatgttggaattttgacctctgtccatgaattgtgaatgttcttaatggcatctagaatggtgaatcctttacagaagattttcaatttactttgcccacagccaccagaggaaacactgtctatggcacctatggccttaagagatgtttttgttttgttttgtttttgttttttgttttgagactgaatctcgctctgtcatccatgctggagtgcagtggagtgatttcggctccctgcaacctccacctttcgggttcaagcaattctgcctcagccgcccgagtagctgggattataggcgcccgccatcatgcctggctaattttagtatttttagtagagatggggtttcaccatgtggccaggctggtctcgaacgtctgacctcaagtgatccacctgcctcagccttccaaagaggttttttttttttttgagtcggagtctctctctgtcgcccaggctggagtgcagtagcgcgatcctggctcactgcacctctgcctccccggttcaagtgattctcctgcctcagcctcccgagtagctgggattacaggcacccaccaccacacctggctaatgtttgtatttttagtagagatggggttttatcgtgttggtcaggctagtcttgaactcctgacctcaagtgattcgcctgccttgtactcccaaagtgctgggattacagttgtgaaccactgtgcctgacctaaagagatgtattttttaaataacaaacttgaaagtcaaaatgactcctctgtccatgggctgcagaattgatgttgagttagcaggcatgaaaacagcattaatctccttgtagagctctatcgaagctctcgggtgaccagatgcattgtcagtgagcagtaatattttaaaagtaatctttttttctgagcggtaagtctcaagagtgggcttaaaatattcagtaagtcatcctgcaaacagatgtgctgccatccaggctttgttgttccctttatagagcacaggcaaagtagatttagcatcattcttaagagccctgggattttcagaatggtcaatgagcattggcttcaacttaaagtcaccaactgccttagctcctaataagaaagtcattctgtcctttgaagctttgaagccaagcattgacttctctctagctaggaaagctctagctggcatcttcttccaagataaggctttttcatctacattgaaaatctgttgtttagtgtcaccacctttgtcgattatcatagccagatcttctggatagcttgctgcagcttctacatcaggacttgctgcttcatcttgcacttttatgttatgaagacagcttctttccttaaacctcatgaactaaccaacctctgttagcttcaaacttttcttctgcatcttcctctcaccttcatagaattgaagagagttagggccttgctctggattaggctttggcttagaggaatgttgtggctggtttgatcttttatccacaccactcaaactttccccctattagcgataaggctgttttgctttcttatctttttatgtgttcactggagtagcactttcaatttccttcaagaacttttcctttgcacttacaactcggctgttgggtacaataggcctaactttcagcctgcctcaactttggacatgccttcctcactaagcttaatcatttctagcttttgacttaaagtgagagataggcaactcttcctttcactttaacacttagagaccattctagggttattgaatggcctaatttcaatattagtgtgtctcagggaatagggaagcctgaggagagggagagagatgggatggttggttgatagagcagtcagaacacacacatttattgattaagctcaccatcttatatgaggatggttcgtggcaccccaaaacaattacaatagtaacatcaaagatgactggtcagacatcaccgtaacagatatgtaataatgaaaaagtttgaactattgaattttgagtgaacaaaatgtgatgcagagatgcaaattgagcacatactgttggaaaaaatggcactgatagatttgctcaatgcagttttaccacaaaccttcagtttgtggcacctgcaaagtgcaataaagccaagtgcagtaaaatgagagatccttgtaataaaaacaatagcaataataatgtatttcatttgttagcctttggaatgtgctagctactgctcctagtactttgcaagtaatcacattcccctacagcactatttagtcaatattattattatccccagttttcaaatgggaaaacttctaccagaatcatccccaaagacccacagcaattaagtagtggatgtagcttttgaacccagtcagtctggtttcagagcctgtgttctcaacaatgtgatgattgtaacaagtgcaattgatgcagaggcatataatgtaaagcatatatttataggatttaaaccataactaaagaaaagcacattaaaaccataaaaactaaagtgatcccttcttacggggaaaaaatatattaatatatacatagaaagaagtctcgtcactgatgaacaacaatatggagtagatgaagtcccagagaactgttgttgtgttagttacatattttttataaagtctgaattttttaaagagagtgtgtattgcctttataattagcaaaataatacacgtagaataattaaaaaagaactccttccacaatcacaatcttccacaagcaacaggaggcttatattaaaagtttcaggtcttagaacacatcggggtgtttcattgaacatgttctgtgggccgggcatcatggctcatgcctgtaatcccagcactttgggaggccaaggcaggtggatcacttgagatcaggagtttgagaccagtctggccaacatggcaaaaccctgtctctactaaaaatacaaaaattagccagatgtgttggcacactcctgggaccccagctgcttgggagcctgaggcaggagaattgcttgaacccaggaggcggaggttgcagtgagccaagatcatgccagtgcactccagcctatgcgacagagcgagactctgcctcaaaaacagaacatgtgctgtggctaagcctctggggactgatgaaatctgggtacacagaaggggctggcacatgctgtggtgtgctctgcagtgcttcaagatgtttgcccccacctcctctcccagttctccccacctctctgagagtcagtctagaggctacttccatgcgcccttggggttagcagttttattggtcagcccagagtctgagtttggtggacagtgcttggcagccataacaaatgcttagatggtgaaaaggtatatgctttggggtcagaatgccagattgggggcttcagacacatttcagagcatcgggtctcttatctgcaaaataggtatggaaaataatgccattttctgaaaaccagagacttagtaattatgtgtgtaaagtgacccgaagaatgtctctcatgtaggtaagcgcagaaaatattagctccatataactagggttcctttattcctgagatgactgttttctaaagataagtatttaacagatgcttttttttttaaatgtgagctgccccctcataaaggcaaaaccgaccatacctgggtttccacttagtcctgcttgtctcatttcccttcaggcagtagagaagccaggctgtatagatcctgacacctgtgagggaaagctcacgtcatcttcaacctgctgacaccaaaaatatgccaggaacattggagctcattcttagattcaaagccgtttctttttctggccatatgtgaggtctgtgggagttaacagtaggcttgtgtgccagttgagcagatttgcatttttgagtttctagatgcctgtttattttatatagttatcgttttgattagtccttgcttagtccctttttggttccagagttatgcagggtaaaatatgcttttactttggccttctgggttaattacaaaatcctagttgcaagtgacaggaattcaactcaaattagcttaaggagagtttttaaaggtacaggggtatgggaagtatttcgtggaatgcagtggaggctcagaagtaccttgaaccaggcactggaagcccatgaggattcttgactcctctctgctcttagcacttttgcttggccaactgactttttccatttctcagtacagttgaaacacagccatctacagagagacagccttctctctctctcagagccagaattactagggagggattctgattggtccaacttggatcaagtggatactcttggaccaatcagcagtggccagggagtgggattatgctgtaccaccatggtgactcctatggtaaccatagtaacaatgggggagaaggggcagtttctagaaggagaaggaggcactggagcagatacaaataattcctgcctacaaaattcttccctatctgtcctcctatcataaaaggtaatcatcctgattccattttttcctgtctgactccatgtgggcaaaactcctaactcctcttctttcatctttggttagaagcagtccatttagttattgattttttttcaacctggacaatctcttctgggagcaagaacagcctgtttggcaagctattcagcaagacataaaacataatagtcctcgggatgaatcaaaataatagcaggtcctagaaaattgtgttcttaagccatttctagactgttgggaagtattggggttcagtcaggggttttaaacagaaggtggtccaagaatcagtctcagtattgttttgtggttagtcgtattgatgactgttcattgaaatttttatttttaattttaatcaaatgtagcctttattacacacacaaaaatgtcatggtagtgatcttgctacctccaaaagagccttatgtatttgaaagcatgagaggagatggtgatgtcgagaactgagggaacatacctatttagaaaatcctccttttctgaagccgaaacttccctttctttcctccgtgttaggtttatttctctttctgcctgtgtctgaatctgggaatgggaattgaagcctcttgcgtggaggttggtaaaagtcctgttattggattttcttctctgtcatcaacttcttcctcttcacagtgagtgtggcccactgaatagactggacgagattggattgtggctcgaataccacccccctttaaatgcccaaatcatactgcccgttaaatcaattgaaagacacagctagaagcaaggggaaaaagatgggatccattaacacacttcacagagagtgcaggcaggatggaaggaccacactacctgagtcctgggcttcgcaatgtccaaatgtcctatctctctgtacagtgtcagctttcatgactgacgatgcatctacaaggactggagttgaacttcaagcaagagactcacagacaaaggcgccctgggccagtggcacacactagctttatcaaagagactcagggacaagtacgcctggtctgtactgcggtttgccaattagctggatgaacagctggctaatttctgttttatctcttgggcagaagacacatgaggctagaataggttatcttcaacggggagccgagctaaggcctcatgtatgttacgtgctcatgtgttcttagtgcctctgtatatttagtgccttgtaagtctcatgcatatttagtgtaaccagatgcctcatgaatattaggtatcttttgctccttccatcccttcttgtctgtgttaggtgcacacatttgacttactaaccacttaattataagtaacatcacttaaaatatattctattatcgaagatgaataagtcttacaaacttattcttcctccgtaattgaaattagtagtctctaaaaactaataatcattaatcttgattgcatggggcccattttaaaatgggctgccctatataagtgtgaagattaaaattcttttcttccttgatttttgggcctcctgcatttgtcagtctccactcaggctctctctgccatccaaccctggaaatctcaatgaacacaactccaggaccagcttttttgtgcatgactgttactgccaactcccacgtggtgctggaaataaaaccagcggtattagatgctgtagcagcagcaaggaccaccagcacctgaccccttggttaatacacattcagggaagaggagacattcttatacagcagaatactgctacatgatgtgtttttgtacctcagggctgattcgacctaacatttcatttagagaaaagggggaatgagactgattacttttttatggacagatgaaaatttgtgttaagtgtaaagctctgacttcagggaagtccatttaatttatgcaggttgaactaaaccacttcattaaaaagaggatggggagaaaacttatgactcagcacaagttagatgagtgactctgtcatttcctctgtctatcctattggagtgatggtgattctagatgttaacatgggctttttgtgcagcctaccccctaaaaacaaacaacagcttcctctggggctcaactgaagatgtatatacaatacttgttctagcagggaggaggcattattgagtgtggtctattgggagaagggatgtctgccttcatgtgttgtcttctacatggtttccatgattcttatttattgtgcgctatttttcaactttttattatgaaaaatttcaaacatatggaaaagttaaaagataagtgcatcaaacactcaccatctagaattaacagttcctaacatttgctttatgtatttgtctctagttgttgatacagtttggctttattttactaaaccattccaaagtaacacaattacagatactatgattcttcacatctaaatatttcagtatatatgtcctaattataaggacattttcctacattatcatagtatcatcatcaaacctaagttatcaataattctccaacattctaatattccatctatattcatattttctcagttgtcttttataactggtttcccccaaatcattcaaggatcatgcactgcatctagctggatttattttttgtttgtttttatccaatcaaggaccatgatttcattttgttatgtttcttaagcctttttgattctcagatactcccctcgtccctccagtttttgaaaagaccaatttgtcttttgaaactttggaggctgggcacagtggctcatgcctgtaatcccagcactttgggaggtcaaggcgggtggattgcttgagcttaggagttcaagaccagcctgggcaacatggcgaaacctatctgtacaaaaaatacaaaaattagccaggcttggtggtgcatgcctgtagtctcagctacttgggcagctgaggtgggaggatcacttgagctctggagttggaggctgcagtgagctgtgattgtgcgactgcagtccagcctgggcaatggagtgagaccctgtctcaaaaaaacccatggaactttggaatgtgtctcacagttgggtttatctgactgcttccctatgatgtcatttaacttgttcttcagctctatatatttcttgtaatctggtaatttggatctaaagacttaatttgttttaggttaaacacttttgggcaggaaaacatcctaagggatgccggttacttgcatcttattaagaggcacacagttgggttgttactagtgatgctaatttgctatgcagggtagacgctgatgagagctcagaccctgagtggggagtgtctctgctgtcatattttggtgaatattttagacagagtttttggcaaagaataggcacttgctccattacctcaagaaaatggctttttaataagagaatatatagttgcaggaacctaggacttctctttgtgggtcagtttcattccccttctctctctgccttcacttgttactgacctataggttctgctcccggtgtctcctccttgtatgtggcactgttgggcttgtcatgatgccagctctggaccaactcagtgtgatctttcagcagctcgctctcctacagcttatggcatagtctcaggttccccatccccaaatccctaagaaaacttcaattggatcagtttttctttcttgcactgggcttcacaagtggtgggcagtcagctggctagctcttaaaagggcttctctacctcttggttcagtcatctgtggccagagagtcaaggtcaaatggatctgtcactcaccagcttgggcaagtaatcagcctcactgagattcagattccccatctgaaatcatatgtagctcatagggttattatgaagattgacttaaataatcatatcaagtatttagcactgggtctgtgacatagtaatgtgtctggaattggtgggttcttggtctcactgacttcaagaatgaagccacggaccctcgtggtgagtgttacagctcttaaggtggcgcgtgtggagtttgttccttctgatgttcagatgtgttcggagtttcttccttctggtgggttcgtggtctcgctggctcaggagtgaagctgcagaccttcgtggtgagtgttacagctcttaaggcagagcgtctggagttgttcgttcctcccggtgggcttgtagtctcgctgggctcaggagtgaagctgcagatcttcacggtgagtgttacagctcataaaagcagtgtgaacccaaagagtgagcagtagcaagatttattgcaaagagcgaaagaacaaagcttccacactgtggaaggggaccccagcgggttgccgctgctggctagggcagcctgcttttattctcttatctggccccacccacatcctgctgattggtagagccgagtggtctgttttgacagggcgctgattggtgcgtttacaatccctgagctagacacaaaggttctccacgtccccatcagattagttagatacagagtgtggacacaaaggttctccaaggccccaccagagtagctagatacagagtgtcgattggtgcattcacaaaccctgagctagacacagggtgctgactggtgtgtttacaaaccttgagctagatacagactgccaattggtgtatttacaatccctgagctagacataaaggttctccaaggctccaccagagcagctagatacagagtgtcgattggtgcattcacaaaccctgagctagacacagggtgctgattggtgtgtttacaacccctgagctagacataaagactctccacctccccaccagactcaggagcccagctggcttcacctagtggatcccgcagcggggctgcaggtggagctggctgccagtccagcgccgtgtgctcgcgctcctcagcccttgggtggtcgatgggactgggtgcagtggagcagggggtggcgctcgtcggggaggctggggccgcacaggagcccatggagtgggtgggaggctcaggcacggcgggctgcaggtcccaagccctgccccgtgggagggcaactaaggcctggtgagaaatcgagcgcagcgctggtgggctggcactgctgggggacccagtacaccctccgcagccgctggcccgggtgctaagtccctcattgccctgggctggcagagccggcagctgctccgagtgcgggggccgccaagcccacacccacccggaactccagctggcccgccagcaccgcacgcagccccagttcccactcgcgactctccttccacacctccctgcaagctgagggaatgggcttcagccttggccagcccagaaaggggctcccacagtgcagtggtgggctgaagggctcctcaaatgctgccaaagtgggagcccaggcagaggaggtgccaagagcaagcgagggctctgaggactgccagcacgctgtcacgtctcagtaactgctcagtaaatattctctccatccctgctactactactattatgctatattcactcagcaggagctgtggacaacgttggtgaagtggggcaaatatcctgggaagggaatgtgaggactatatccatgtattagtccattttcacactgctgtaaagaaatacccgaaactgggtagtttataaagaaaagaggtttaactgactcacagttttgcattgctggggaggcctcaggaaacatacaatcatagtggaagggaaagcaggcacatcttacatggtggcaggcaagagagcaagtgtgtgaaggaagaactgttaaacactaataaaaccatcagatcttgtgagaactcactcactgtcatgagaatagcattggggaaactgcccccatgatccaatcacctcccaccagaccctttctgtacatgtggggattatggggattacaatttgagaggagatttgggtggggacacagagtcagaccatatcaatccccaaacatttctagcatactagaaaaactttcctttttacaaataatttttccattgggacatggaggctcaagcctgtaatctagcaatttaggaggccaaggcgggtgaacccttttgagcccaggagttcaagaccagcctgggtaacatcgtgaaatcctgtctctacaaaaaatacaaaaattaggcaggtgtgatggcacgcgcctgtggtcccagctactcagcaggctgaaatgggaagatcacctgagcccaggaggtcaaggctgcagtgatctgtgatcgtgtcactgcactctagcctagctgacaaagtgagacactgtctcaaaaaaagttaaaaactaaaaaaaagtaaaaaaaaaaaaaaaagaaaagaaacatttttccattttatagagtgatcaattcagactctaggttatggaagactgagtctggaccatttgctctttgtgtaaatgtgcccttaaataaaaaagacattcctgctgcatatggagagatgtaccaatttagagggaagaaagaaaatttgttgtgcaaaaagctattgaatgaattttaaatgtagtctgaatatattcttgaacattctatgtattccttctgataggtgttgactgatggtaattcagatcttgtgtatcttgtgacgcttggcagtagattcggttctgactttattttgcatgcatctctgtgtactgccgcagactggtactgaactaactgttcttggcttcttaatcatggcaccttagttgcccaatgagaatatgcaacaaatgactacattcctctcatgtttgcagttttgatgtggtacaaattaacatcttgtttggaaggataaaagaagattattttgataatgaggtaacagttgaaatcattgacctcagcaggtcagtctgaggattggaaattttttaaagcttcagaattagcattttaagtgataactcaaaatgctggtgagggtactgtaggatggactctgtcacaggtgttcagtggtagtgttacttggtcatctttctggaaagcagtttgtttatttatgtcacgaaccataaacatatgtaagtttattggcccaataattccacgactaggaatctatcccacagaagtcaccagagatgtgacttatgcacgaaaatgtttagtgctgcagcagttacaatgacagaaaaaagtggaaaaagtgtgaatgcccactaatgtgaggcagttggtgtaaagtgtggttttgttcatatgagttgtaagtgacaaggggaggttgaggaagagttttaattcagggaaaatgtttattggtatgttttaagaagcaggaaacaaaattgtatatacagtacaatttgggctatgaaaaaaagcacttgagaggattaaaagaaaatacgctgaaatattaataatggtttccttttgggaagtgaggttatacatgacttttttttgttttgttttgactttcgtacgtttctatggggtgcatgtattaattttatatttgagggaacaaaaagctgaagtcataagacaaatatttgaatggcaattttgagtggagtcttaggttttaaggtttaagaataaaaatcctccccaacaggcaacagaaatgaatctaagtcagaaatgcaatgaattggactaaatcccatgcttacttaagatggaattttaaaatatggcatcacatatgtttgtggaggagtttcaaatgtgagaacttggtaaaagtgaacttggaggaattttgtcttctttttctaacagcaacaacaacaacaaaaaaaccccataaatcttacttggatatttgagaggggaggaaagcaccttgataagaatggatactgtgtactcagccaagaaaaaaatcatggctctaaagcaatcatcctggaccaaaagattcatattccaaggaattaataggtagctgaatggtggtgcctctctgtgttgggcacattatttttatgagttctgagtgcttgcttgggacagtactttggaatatcactttggaaaaatcagagaaaaatacctaatatggcagcctgtgtattccccttaatttaattatgaaactcagataactacagattgcaaatttggtttttttaggaaaaagatatgtggctttttttttttttttttttttttttttgagacaggatctcactctgtcacccaggctggagtgcagtagcacgatcatggctcactgcagccttgacctcctgggctcaggtgatcctcccacctcagcctccctagtagctgggactgcaggcacatgccaccatgcctggctaatctttgtattttctgtagagacagggttttgccatgttgcccaagacagtcttgaactcttgggcttaagtgatctgcctgtctcggcctcccaaagtgctaggattacaagcgtgagccactgcacctggccaaaaagatatgtggcttttaaaaaataacttccacccaacagtatgtttcccatcacggaacttgtgtaattatagtctaatgtgttttttcttaagaagaacctctgccaggcattaggaagttcatcagcaatttctcaaacttctcaaggagggaaaagccttgaggtttagactggaataggtttttcaggtctacagaattggtacaaatggatcggatttgctgttcttgaaacataataaagcctcctgctgccttattcttccagtcttgatgtcatgtcatttttttcttcttttaaaaatatactcatctcattatccagagtgactaagaggcgcagcatatgtgccactaaaatacttgtcctcgattcgctctttcttttctcctgatacctgttgctcaggaaatgacttacccatctggtttcattagtcattctgatgtgctttgtcaaatgccctccatggagcgtggtattgaacatcatctccctacctcaataaatgcccatttcccttcacttactacatgcatttaaaaaatatattttagggttttggtttaaagactaaagttccttttgctttatgttatttagtggcactgaacttctttaatatattaagaaatatttccactaccaaactcaaagagcaaaagtcaaaaaaatgcagtgaacaagattaggaaagaatccttactttgaggcaaagacaatgcaagtatctcaattaattcaacatcggtagttctcgtcaaaaatctatcccaaaatctgtgcctctgtgtgtgttgctggaagaaacacgaagtttgctttctgggtggtttcccttcagctgcctttcattccttatgcttgacgctggttttatttctagaagaaaccaaccttaaaagtctctggtttagcaataggaggagttcaaaacattttcacctgttgttagttgtgtttgtttaaacaaactcatgcaactattgttgcttacagccaccgggttcgtttctgctggcctggcagggtttgtgttggcaatggtagagagatgctatcggcatctcattgtgtactgtttgcataacgggacaggacagccaactccagccattaaaaaaaatgctttggattagatgaatggttttattaaggtacctgtcagattgggaaggtgcaactgtgactgatgaggacctcctgaagaggatcccagccacagctggtgggaggggggggctggtagttgacccagactcaggaatgtggctgcactgcaatgggctggccacccaagagtgggagagggtcatcggtgagggagagcactggcaaaagcattgtcagttgcattgtcctttggggcttcaggttttttatacctcagaggatctagggctattccggaaacatcagccaagggaagctctactggattttcctcagttaatagcatctacacaaggctttccttcaagaacagtcatcctgttagctactaataaaataacatagaagtgctgaagttttgagcctggaaacaataattttaaagatacatagtgtttgagtttacttatttgctcttagaatgaagtcaccacttgtcaccgtgactatggaaacataggaaatacattttggggagttctgcttaagtcattccatgtcccctagtaaggttctcaaagtgtggtccatgggacattagtggcaacagaacccggaagcatattagatatgcagaatttcaggctccacccaagacctgaagcagtagctgcatttcattgagatccccaggtgatgtgtgggcacattaaagtttgagaaacattccgatttttagggtggtctagattcaggttgcagatactgtcgactcagtagagatttcatgtgaagctctttagtcaggatttggggtgatggaaattggcatgtaaaccgtcccttctttctgtagcagaagaaagttgggctgtgataaatttcagttaaccaggagccatgactctagccacttgggactgaaataattagtgcaaatccttctgtagttcagaatgagtagaagaggccacagtcagggttaaaaactctggtatcccccactctcactctcctttctagacccttcttccccaatccagaggacccaaattgcagcctttttgtcctagataggccctcctggaggtctctctttaatgcagaggatgccccttttctcacagtgtgcacatagtaggccttttgctgaccttgtgggtgtcctttattgtcctgtgcagcaaggtcgctatatcctgacatgtgactcataggcaagacagcaatttctgataaggagggaagggtggccattccacctcctcactgaggcccgtgtgttatgtaatgcatttcctgcctttgattctttacccatgtggccctgcctgtctactgtcctggctgctgttttctttgttctgcagcagaggaattcaacctctctggggcttaaatcccactcaaccctggctgtttcttggcacagtttttccttaggtggcagttcactggggggcagaggcacattttccaaaccctgctgtgtctcagttcatctaatatgtcttcatttcaagagagatttgggcaaaggctaagctgattacagggctcaagtggagccctgagcacatttcagatctggaatgcaaattgttgtctgcagtaattgtagtttgcaccatggccctactcagcccccatggtcattttcctgctgcaaaataagcagctttgtgctttcaaagtgggaggtaatgagggggagaggagcacctaagggacattaaggagtgttttcagagcctgtctgcaagcctgagtgggagcagaacggacccagatgtgtgtagggatgctgccactgaaaagctctgtgaccatgggccaggaacccaacctcgctgagcctcaatgtcttctagtccttgcttcagagggttgctgtggtgataaggtggcaatgatgtggcaggacactcaacatggtgcctggtatatagtagatgctcaacaagggggagtttcttttcactgcctacaggtgccataagctttggggtctgcagtggggaaacacgtgcccttcttaaagggtgattccagcacacatgttggttaatactctcctgctctgaagagctttggtgcatccttctcatgctgcatgtgtctgcagaattgagggctggcttagagtgctggcttggggtagatttcctgcatgtcaatctagctgtgtgctgtctggcaattgcttaacgtctctgaacctcaggttttctcattcataaaatagacatcataatcatttttgattcacaggttgttagaaatatttatgtaaaaacaaatgtaaaattgagcaccagtgcttgacacaaactgtgaaggcagtactattgttatcccctttgcagagatgaggaaatcaaggtttttgtttgtttgtttgtttgttttttatgggtcaaatgactttcccaactctgcagctcatatgcggtaccacctggactctggcctagcagattggctctgtggtccatggtaggtatccctgacattgaacctccaggtggttggaaatactgcacaaacacactttaggtgcctgatcctggggctcccctcctcagacccctcatttttgttgaaaaattctttgttaaattgggttaaagcagatcataataaaatcactattaccatattatataatgttacatatcgtatatttaaaatataagtttatgttatatattatacttttatataagattattatatgtagtatcagcaacagctatttacacagatttgcattgctattggaaatgccctagccattgtcagcacttataattgctttttgttgtgccacatgggggcttattatccgtcatgttgctgcaaaattacttgtttatcttatagtctctaggaaactgcaattgttacttactatgtgccaggcactatgctcaatgatacatatttgacttatttgattctcacaagaactttttgcagtgggtcctcttactgttcccatttaccagaggaggaaacagaggcacagggaagttaagtaaatgatcaggggtcacgcattaagtgacagcactgggatttgaacccaggttatctggcttagaactcctattcctcacttctgtgctaaactgccttcctttatttctggtctgtgttctggttgctatgccctcaccaccccggctggcttggcatttccagacctctggggctgcacacttaacacagcattccctggggcctgttactaagtatgagtccctctcagcctcaaagggtcattctggggactcctcccacccctcccggggtattcatccaacccaggaggctctttgtggctcaaccacacacattcttttaaaaaataaaaatcagcttttcattttaatgatgacacaacccagaggtgaggttcttgttatcacactgggggaatctgggtgattggagttgtaaaatcaagtagctggggaattccttgttttctccataaattatccatgtgagagctctgtgtaatttcacattacaggagggaatggctgtgtttaactccttctgttggaagggcagacttatttcacttcttactcagccaggagagggagttggaaagcatagaaatggaacttcttgttattacaattcctggctttcagcaaatatatttatgtttgtgtactttaaaaatacataggaaaagcatctgactagtactgtattctatggccatggccactgttcttgacaaaaagaatttctatctggtcatgcagctgttctggctgagaaacttgccctggttccccatttcctgcagggtggagttggaactccttccttggctccaagcatctcatccctggccttcgcatcctgtcccttccatagaccccttgactgtctcctcgcctcctgaatgaactttgctgttcccacttctcacctttgcgctgacccccctctcctcagcctggcaactcctatacatcactgacaaccagctggaatggcactgtcattggggagaccctgagaatggtccctggcttcttcctctgcagcctagtgcttcgaggctgtgggaaccagcaggttgagcagtgagcattgtgtacaggtctgcgtctcctctggcctgtgagcttctgaggtatttttgcatgcctgatgctttgaacacagagctgggcacatttctgttgaacaaaggaagctggtctcatctttacacatgtcagtctgcatttcttccccaagaagggtttttgggtgatgggtagaataccaggtgggagattggaccaccagcctccaggctccatgagagccaggctgtcctgtggctttggtgcctgcactgtggccagtgtgtattcagtcactgcctgaatgagtattgtggtaagaacctgtgctgcaggcctagactccagtccttattccattactgccaagcttggcacattggacaactttttttaacccttctgagcctctttcctcatctataaactagggataataaaagtacttatctcatagggtggtcatagaattaaattagcttagcctaccatctgacacatagcaagcccccagtcaatggtggttcgtattgttgttaataatgaagtggattggttacaggatgtgataagtagtgggaaggaaatcagtagggtatcatgatagagaataacgatggtggggtataaggcatggtcctatagacagcctggtcagggaagcctcctgtgagctgaacttgagtgatgacacagctgagttaagcagaaaatgaatttattacagtgtctagggtagctcagagaatttcggaaggaccagggaaacagggacaactccaaattataccaccaaacagttattgtaaagacactattgctaccactgctgggtaggtgtagacgccatggcttgcaccaccaatgctggttgtaggctgtggctacccagtctacccttactctgcctctgcaagctgccaccaccctcgcagaatggggtctgcagcggccctgccgctttgcatcccagcacatgattggctgagcctgctcatgttctcatgctgtggctgcaagggaggctgggaagcaagtgtatggcactctcatctcctctggtagaatgtgggctctggttcctgagttggggaattccccaaagctagccaggtagggggttcagctgcaggagactcaaagggtgacccttatgtcagaggcatgtgaacaagagcaactccatcttgaataggagctgggtagcatgaggctgagacctactgggctgcattcccagacagttaaggcattctaagtcacaagatgagataggaggtcagcacaagatacaggtcataaagaccttgctgataaaacaggttgcagtaaagaatctggctaaatcccaccaaaaccaagatggcaacgagagtgacctctggtcattctcactgctacactcccaccagtgccatgacagtttacaaacgccttggcaacgtcaggaagttaccctatatgttctataaaggggaggcatgaatcatccacctcttgtttaacatataatcaagaaataactgtaaaaatgggcaaccgtctatggagtagccattcttttattcctttactttcctaataaacttgctttcactttactctctggacttgccctgaattctttcttgcatgagatcccagaaccctatcttggggtctggatcaggacccctttcctgtaacacagagactcatggagtaaggaacacgtagtgtcgctgggcctcagcagctttcatctaataggcagtggtgctttaagaaaggcctgactgctttcctcttagacaatgatttttttaaaaagagtgctgaatttggaagcaactagttctcaatgtgatgagaggctaggaactattttttacacatcatttagtttgtgcaggtgtggggtagcatgtttctcccctgtttatcacagacttgcattcctgttggaaatgccctagccattgtcaatgcttataattgcttcttgttacagccacgtggggcttattgtccatgattttgttgcaaagtttattgtttatcttatacggtctccaggaagctgcatgcggaaatctctcagccttaccaggaagtctgacttaaagggacagcctccagggcagagccctaactgggaggaggtgctgagcttccaaccaggaccagttaccttgggtgagagttggaagccctttccacctgtctcatttggtttgctattttccagtgttttggtgattcctttctgattctgaattaagggagaaaaagtggcaataccaattcttcatgtacacatgaacacacccaaaacataacaaaacaaaaaaccactttcactggtgtttaggcagaatgaacactctgagtcatgggacacacatgcttttaaatctcttggtttcttgggggtattttcataaaagtcttgaactttctagatggatacagggatttcagggaagtcagcattgtaagattaaaaaaataaatatgacttaagttttaactatgctctcattttttttctctattggaaggaagaagggaaatgggaaactgctagtttctattacctttttcttagatgcccagttgacagtcaaatcaggatagaaaaatcaaactctggatttcagatttggtactgcttttcaatttgctaggaggaaaatttgaaccagtttccatcgttacaccaaaaaatttcctcttctgtttgaaaaaaaataaattattactgtgcctttgtcttttaaaaaatattttattatggaaaaattaaaacctatacaaaaatagaaacaatagtatgatggcccaaagttcccatcatccattgttctgcttctttttttgagacggagtcttgctctgttgcccaggctggagtggcacgatcttggctcactgcaacctctgcctcctgggttcaagtgattctcctgtcccagcttcccgagtagctggtattataggcacacgccaccatgcccaactaatttatatatatatatatatatatatatatatatatatatatatatatatatatttagtagagatggggttttgccattttggccaagctggtcttgaactcctgacctcagctgatccttccgcctacgcttcccaaagtgttgggattacaggcgtgagccactgcacccaggctgttctgcttttaaatacatatgtcagttagtatcctaccatcctccctgcaacctgctagggataaaggagtcattcctgttttacagataaggaaactaaagatcaaggaaattaagagtgacttaccaggtcattcaactagtaaatggcagagccaaaaatcacagagcccaaatattaatttattgttaactattccagccagatggtttttcccagaaattatccctaaagagttatctgaagtcaaaataatggtgagaaactttttaataagaatgattcttgcttttgttatatatttttaacttggaaattcggtgtgtcaagcattgttttttgatctaggcagattacttttaaaaatcctcctgagtattcatgtaagtgtcagaaatacccctccctcccacccccatattcagattttccacttccaaccaactttgacagtgcaatgccaaatagtaagtctcatttccaagtaaggaagccctttggctgatagatatcagctaatcagtttttaaacttttttttcttcctaaaaattgtgcagaggtcagtaacccacagacaggagtttcacttttaactgacagtgtaaggaaggagacttgacagtttcttgaaaaagctgcacccagggtgtttatgtttctaagaaataaactggatgagcttatttgcaagcggcccctgtgtgcttcatgcagaaattcttcaggtggcccttgcttcttgtgttagtcaaggaggcagaaccgcagcggccaggccggtggctgcttcacagcatacatcagctttccttttttttttttgcattcacttttaaaaatagctgcccatgtatcagttgccaaaataatgtgaggaatctggttataaaagttcagatttgtttagagagaataaagacagagctcaggcgattgctcgtaacaaaaccagtaagataagcactcaagattagccatgactagcaatcgttgagacttccatgttccagcatcatttatttttagttcctgtgttgaaaccatagatgaagacttttctatttattcattcttgaccttgagcagccaggtctgctcccacattcttctcatcattttataatcttgttgagctgggatactaagcagggctctccaagagcatcaacattttcaaatgttcacagtctcttgagttgaaccaccttgagtccaataggccttggcctgggaaagtgtctggacaccgctgctccatttgtctagagttcatggtgaagcaggcagaggaattgttcaggttttacttggattaaccacccttccagctttgaggagtagataaagacattcaataaaagtgcatgactgtgagcaactctcaggctctaatttgatattctttttatttctcactggcttgctgtgctttatgcctccctgataacctagtaacacccaaattttgtttttccttagtgttacctgaatttgtttttgaatttttgtttttccttagtcttacctaaatttgacaacagtcttagaaacctaagatctgagaactaataatcttatgatgttggaaccttgggtaagccagtgtgcaatatattattttaatttggtcacggctaccatcccatttgagattttttccaacctttttttttttggtctttttttttttctttttatggagaatagggtctcaccatgttgtccaggcaggtcttgaactcccgggctcaagccatcctcatgtctctgcctccctaaccactgggattacaggtgtgagccactgcactggcccatgagtttttttttttttttttttttttgagatggagtctcgctctgtcacccaggctggagtgcagtggtgcaatctcggctcactgcaagctccgcctcccaggttcacatcattctcctgcctcagcctcctgagtagctgggactacaggtgcccgccaccacgcctggctaatttttttttgtatttttagtagagacagggtttcaccacgttagccaggatgatcttgatctcctgacctcgtgatctgcccgcctcggcctcccaaagtgctgggattacaggcatgagccatcgtgcccggccttggccatgagatttttttactacctatttttaaattcagtttgtggaattttaaaatttgaagtatcaaatggggtatgtttaaagaccttgaaattccctttccaactgtaagattttgtgacatttctggcttgttaagtacaaataagaaagacattaaggaaccaggataaagttcaaatggaaagaatcatcgttgcttgccaacttttaatgaagaagtaattctgctaaaatctaaatattttattttatgtaaatgaaattctcacaaccctgacgagtatgttccttataatatctttggtaaggaaattgcttggaacttctcaacagaaaataccctcagatatatcgaacaagaacacaggaaacatggttctggttctagtgataccatgacacttttggtgacaccttagttaggtcccagttttggtgctaatctctttagagcccaacaagaggggttgttaccagtttggttatttaaccagctgtgggaaaacagggttcatctttgcatcgtaggcaccctataggtagtttcctgtgtataaatatatgattcaactctatatacggaaagaaaaataccataccctgaaaacctatgcccccagaattttgtaggtttttttcccccttttaacatttctctccaatctatgtagaatttatgttggatgagtatgaagaagggctttaaaatgaggcttttcattccaagaggcaagtgaattgtcccattgttagcgatccttctctagtggtttgtgctctaatatgtcagattcttgaatatcccagagcaggtttctcgctgtgtcttctgagggctgtatgcttgtagcaggagctctgaagtaagcttgctaggccccactcctgaccaacctcaccacctctaggccacgtgccatgggtaggcgtacaccacctttttgagtctcagtttttttaaatctgcaaaaagaaagataataataaggcctactttgggactgttgtgaggatcacgtgggaaaatacatggtaagtgctcatattaaaacataaaaaatccttagtcgctgtggtttcagtaattgtggctgtatgatatgttaatatccacacacaggtgcactttcatcatgagttatcaacattggcagaggtaagaggaatggacaatgagaagtgacatttcaagtgtatctttcgtatttgctaaatgtccacagggcaggtggctaaatgagttaatttccttccataccatagcatgctctgcagtaagaggtcaaaaatgtgcgtgacagggaaagatgccctggatgttaaatgaaaaaagaagcaagtggtagaacaatgttatcattctatttttgaaaaaaataagatgttacacccagcaactcgtgtttttagacagaaggaaatgtctggaaggattaccaccagagggtgcaaactggtggcccctgggccaaatgtagccagcaactgtgttatgtggcccatacagtacttcttatggtgatgaatagttgccagcatttacaaattgagagattttacataaaaccctgaatttcaggcttctattgaaaaaattagaatgtctgctcaccctggatgattaaccccttaggaacccgaaaagctggaactgacctaagacaaaaactctcagtggtgccccagtgcccacctggccttttctttcaggtacctgacccctgctcctaaatccttttgggtttatgaacctctgtctacgtctggctttttaacaccagtgcatccagcaaatgggatcgggatagaaaaaaaagtagggcctttgggaagactcactttttactttatatacttctttgtggtttgaatgtgtatacttctgtgtggttcgaatgtgtgacagtgatgctatgttactattaaaatgtaaaaaccaatacataaacatgtttgaatacttagtagtatcctagatgccatagagaagactcctgttccttttgatatcccattataaagctcaaaatgaacgtggaccttgcggatcagagcctcttactattgaaattctcctcttgaagtgccttcttcatggacccatttcaatccgggagttcttgcttctggtcagagcaagggcatcagaggagacggccgtgccctgtttttgcttcctttttgcaggcttgcatccctttcccctgccagggcatctgttggccctctctctgcccctccctgctccactgctacctgccctggagcccctcaagtttcacctcttgcacgaagtgctgcagcccacgggtttcagttcttctttcccattcagtcagcagccggaagttaggttgaatcattctaggatttgttcatgtgaatgtttccttcctcctctccaaagaaataaaacgtacaatgccctggtcgtctcacatttccagtgaatccttactggggtgaggctggccttggctgctgggactccttgaagtggcttgtcagaaaatactccaagagaggaatggctgggtgatggagcctcccgcatttcccagggcactgtctttcttcatcggctgaattgtccccaaagctagctaatctcaagttgtttacaggcttgttcaaatttaggacccttcctgtgtaggaggctggaacaagacgccttaggaatacctgcccttacccctccaccagccaccacttaaccagcttgctttgtggggagtcaggctttaggaaatagggaatcccaaggacaatctgaaacccacctctcagtggacactgtcatttgatctgacactcattaccgagtgcttccaggtgctagctccatggtgacccagatgcttgcctgaaaggcgtaaggctttttacagtgatttcacttcctcctttctctaagcaggtgtgattccctcacactttttgaagcaagacccaagcctgtcagttcagcttccagacctattaaagtacttggtgtcttccaaaataccctgtagttctgcactgccttgctgttgagtttgccagttcttttgcctagaacacccatcagaacgctgcccatgtgtctctggctctgagaacccttctcagactttgtccccatgaaaatgcatttgccaagctcacttatttcctggacccctcagcactttttgcaaatttctggcaacgtgaatggaaagagcctgctttctcataaaagtcttggatttaatctccttctgttagaccggaagcttgttgttcaaatgaacctgctgtctttgctgggtccccagactttactcaggcttgagacagaggaaggctcttaaaaatccgtgcatttgtaagaaggccccaggaaaccctgggctaaatcttaacagctaaaatttgtaattaggaagatttttgcaagtcaaatactaccccattagataactaaaataaataaataaataattgagaactacactggagttatgtctccttgagtttgagaccttctgccaatgtgcaaggagggtgagagtgctggtttgtttgtggggaaggagtgagccaggcatagttttcaatctgaaaccttgtagtttcctatgagacaagtctacctcacccaagaggtctgggttttttataaggcaaggaactggagcaagatgttcattctggtgagatccccacttcataaaacaagaaatgtcagccatgaattatttccataatagctctgagcaggaagacctcttgttatccatgacaaaagttgaaagggaggtttccagaagcagctattttgaaagggctctgaagagaagatgccaggtttgcataagacaaaaagaaacggatgggtgtgtagttgcttttgaaccgcgactcagtgtgggctctgtatcccggacatggctactgattcttgggtaaagttcaagtagatcattgattcctctttgaagacccaaagctctcctcccagtgtcccttctcctagtgatgctttattttctatttcaccccagtgtttgggtctgcaaagctccaggcagcacagccgctgcagccgatgggatgcttcacattgcttttggtggggacccagtgagcactgtttgtctcttacaggctggggattgtcagtcagaaactgaacttctggtgtacctttgaatgcccaaagagtgctctgcaaaagcagcagtagcaggagaggtggggagctcttgactggtgcggctctcagcctctgacacttgtaactgatggcccctgtcacttcctgtcatgcagcccaagtggcggggaggagttccttcagggaaactatgctcagccctgttcagagaatcctgtgcacagggctccactgcagttaggagccggtgagtccgggtggatgaggtcagagcgccccatggtgtggtgctgcctctttgtccgttcgcaggtaagccccctgctgctgagcctgggatgggccggctctcaactcccacccgagccgggtggggtggtgccaggatctgaggtgtgggaggatgcagtgttctctttaccttccaagaaactgatcagggagctgctgttaaaagcacctgggatgatggagccagattcccgcctcactttcgtatgaatcagaagagcactgtgtggctgtgtttaagaccgcagatggctttgcttggttgcgagggtgagctgagtggcgtgcgtagctgtcagggcctcctttagcataagtgattggaggggaacaaagggaagggcttttcacgctctgctgtgcaatgctactgttttaatttttgtaagagaatggttttaattaatgggaaggaaaagagggaaaagaaggatgcatccgccttctgttttgttgttgctatttaatcacaaagtggatttccaagatcttctctttttctttggattggaagatggctaaactcagttttagaagttcatgctggttggagcaactgttttgtagatttccctaaagtgatcctggtgttttgagtctgtttattattgggagagtgaagtcagatattatcagtggagactcagacttgataccattctcattaagaacatcgttttttggtttgggttattttggaaagagtgtctggaaatgttatatttccatgggttgaagaatggttaggagctctgaaggttacattccctatcccttttatttatttgttttttgtagaggtagttgttaaagttttggatgagccaaaactgttctttatttgtttgtttgtttttgttttttgagacagaatcttgctctgtcatccacgctggaatatagtggcacaatcacggctcactgcaaccttgaccgcccgggctcaagcagtcctcttgcctcagcctcccgagtagctgggactacaggcatacaccaccatgccctgctaattatttcattttttttgtggagacgtgggtcttactatgttgctcaggctcatcttaaactctgagctcaagcaatcctccttgagctcaagcttcagcctcccaaagtgctggggttagaggcatgagccactgcacctggcctgccaaaactgttttttaaaggcaatgcccattgctttttctattcttctcatcagaactatgttcctgggactgatttctgtaaccctaattccagctcttgtgtatgaccattctagacatactaattttttttcaattttttttattgtggtaaaatacatataacacataatttaccatcttgactattttaagtatatagttttgtgatattaaatacattcataatgttgtgcaaccatcaccaccatccatctccagaactcttttcaccttgcaaactgaaactctatactcgttaaacaataactctccattcttccctcccccatcccctggcaaccaccattctactttctgtctctgtgattttgattactctaagtatctcatataagtagagtcaaacagtatttgtctttttttgactggcttatttcactttgcataatgtcctctgggttcattcaagttgtaacgtgtgtcagaattcccttcctttaagaatattccgttattgtacatggtggtaatattgcatggagctctgaaggttaacagagaaacaaatactcaatttctctgtgaatatacgacactattgcatgattatatgtagtacatattttgcatttcattattacctctaatagtgattgaaaactaccctctgtattacaaggctgaaagatttgagagctgtttactgcatgccccacattaaacagtttttcttgtcaattaatattgttaaacggtgacataccacattttgcttatccattcatccttggatgggccttgggttgctttcatgttttagctgttgtgaataatgctgctatgaacatgaatgtacaaatatctcttaagaccctgctttcaatttttttcccataagtcattagagtacagctagtatttggttacatgagtaagttctttggtagtgatttgtgaaattttgttgcacccatcatccaagcagcatacactgcaacctatttgtagtcttttatccctcactcctctctcacccttcccctcaagtccccaaagtccattatatcattcttatgcctttgcgtcctcatagcttaactcccacatatcagtgagatcatacgttgtttggttttccattcctgagttacttcacttagaataatagtctccagtctcatccaggttgctgcaatgccgttaattcattcctttttatggctgagtagtattccattgtataaatataccacggtttatttatccactcctcgattgatgggtgttccatgattttgcagttgcgaattgtgttgctataaacatgcatgtgcaagtatctttttcgtataatgacttcttttcctctgggtagatagccagtagtgggattgctgaatcaaatggtagatctacttttaattctttaaggagtctccacactgttttccatagcagttgtactagtttacattcctgccacctgctttcagtttttttgagtatatacccagaagtagaattgctagaacatacagtaattctattttgaatgttttgagtaaccgccatactgttttccacaatggctattccattttatattcccacctacagtgcacaagggttccagtttctccacatcctcaccaacacttctaattttgattttttttcaatagtagccattctaataggtgtgaagtggtatcaccttgtagttttgatttgaatttctctgattattagtgatgttgagcatctcttcgtgtgcattattggccatttgtatgtcttctttgcagaaatgtctgttcaagtcctttgctcactttcgaattgggttgcttattttttttgctattgagttttaggagttctctacatattctgaatattaatctcttttcagatatattatatgcaaatatattatcccattctttgtgttgtctctttgttttgttgacattgtttagacatagttttttttgttgttgttgttgtttttttttttaggagacaaggtcttgctctgccttgctcgagcccaggctcgagtgcagtggcacaatcatagctcactgcagccttgaactcctgggctcaagcagtcttcccacctcagcctcctgagtagctgggactacaggtatgcaccaccatacccagctaattttttaacttttttgtcaagaccaggtattgcaatgttgcccaggctcgtcttgaactcctggccttaagtgatcatcccaccttggccttccaaagtgctaggattatagacgcaggccactgcatgccccccagatgtatatttttaatactttgatgtgactggggtaatttcagcctttccccatctcactcacctcactatttgttctcttgacaaagaataatttttgagtctttcaagtatgaaagttgacaatattcaaatgattgattacatgtcagtgatagttaatacaatgttaataacaatataatacgataataacttacatttattagatgcttatctaaacactttactcagatttgctcatgaaagtcttacaacactgtagggattggctactatcattattcttgttttgcagatggcaaaactgagatttacagaagataaataatttgtctaggtcacctacatggttaagtagtggatcaggtttcaaacccaggaagaatggattcagaaatgatgtttttagccattaggtgctatgtgataactttaatgtggggtccttcccagatctcctattatgtgcaacatctgcagtaacactttgctttccagtgatttggtaagttatcccattttggtgaatgtttgctgtggtccagttagtgcctaagtaagaggcacctatgacaagtcactactttctctggactcagtttccccacttgtcaaatcagagatgtctctaaactcattttagctcagatatgaatctaaagtatgcaaatatcttgcacaaaaagtcaaaaatagttttcatatctgccctacttcaaagtcaaatgatttaatgaatgatttaatgaatgatttaatgaatgtgtttaagtacacatttcccaaggatatcaactagaactcaaaatgtaattggctgactagctactttattctgcttatgaacatatatatgtatatatatatgtgtatatatatatatgtgtgtgtatatatatatgtaattttttttttcttttagagacagtcttgctctgtcgcccaggctggagtgcagtggcatgatcatagctcactgcagccttcactttttgggctcaagtgatcctcccccatcggcctctggagtagctcagaccttagtgtgtaagggcttagcaacaacaggactctgaagcacctatgtcctgaggtaaacatggacgtagtttgattttgtggagggaaggaagcagcatattcgatgcaaggtggagactgcattttaaagccactattctagccatgtttttacagcttgcccaggacgccaagtaggagccatggaaggggaagttgattcaaactagatcctaaaaaggcctctcttgatggaacactcagacgtgtgactcggagcgggcaaggtcagagtggtgaccccagctgttcaccgggacagaaacaatgggtggctttaggacctaaatatagacaaagtggatgtcacttagggaaactcattcctgatactggccggggtgggcagttctcttgggaagcagctcctgtgtgccaacccttgctctgccagccctctttttctgaatatctctgtccatattctagcttccctgcattctttgggcacctgcctcagcttggcagctttgaaataacccatgacagatccttatttccccatctctcccttccaagtcttccttgcagtgcttaccacctctctcctttacctctcacagaccccacccagcccctgccataaaccccaggtgtcctctccaccatattccttgtggagggacgagagcactgggctaggagtcaggaatctgaggatcaagttctggattttgcagttaaccctgggcaaggctaaacttccccagtacgaggttctccaagcagaaccagtggagacgtagccatcaaggactgagatcctggaggttgcagcctgaagtcaaatcctcactgtcacttactctgtgaccttgttcaagttccttacctctctgggcctcagtttcttcacctgcaggatgaagatgctgatagtacctgcctcatagggtatcaggaatttataagataatatctgtgaagcgcttcaaacagcttatcttgttagtgctcaaaaatgctcactatgattatgattgtgatttttaggaaaaagagacttgaaatagatcagtgtttcccaaatttcactcacatttttcatatccacataccaccggtactattatttttcagttactgtatttctttaaattatctctttttcgtttctgtttttggctttttaggtttgggttttttggtttgtttttgtttattttttagacttagacacatcctaagcagtaatagccctgaaatcacaggttggaaatgtgtttcctaaaacatattataataaatatatacaggtctattgcatatggtctgagatgatattatatcaccagtggggtccactttacatgctttggggactgcagaaccagtggctctgagcatctgaggtccagtttgctgcctctagtgattttgactgtactcatcccatctttccatcaatcaggcactgcctgagaaccatctttgtgctggattctgcgccaggtgccaaggtggccaaaatatgggtctttggagtccccactatcttcttcgaatggaacattaccagcccagagaaaatgggggagagagggacacacacaaagtgacctaatttctgaaactccatcttaaaagtaagaaaagccagggccactctccctgcctcaaacctctggagttgggtaaaggagatcgtctcagtcagcttttgctgagtaacagctaccccgaaactcagtggcaaacaataacaaacatttactcttatgcttataagtgcgcaagttggctggggtggtctgtcctacatgggttcattctggacagtactactcacgtatatattcttctcttgtggagcaagcagaaacacatgatgtctcgtaagatgtaggctcagagttggtacactgtctctttcacctcacaggatcaagccatggatgtcagggaaaggcataaatatttgctgaagaataaattgatctaccaccaagatcatcaccatttacttactgaacccacatttactgagtgtgtattgtgtgaagcactctgcatgttgctgggagtggagggtgttaaacgtagtaacagtaagtgatgaaggtgatgagaacgcctatcccaaggcccggcatgtattaggtcctaaatgaatatgtgatgaatggtgatgtactggtacctcttgagtgctgactagtgatcagtatttcacagggattgtttcatcttatcttcccagccctcttgggcagatacagcaagctcgggtcagacaagtgcaaggctgttaaatgcttgtgatcttctgatatgagaaagggagagttgatggaggcatggcagcagggagaggccacatgccgtgaaaccatccctgatgctggggagagaggcaggctctgcaccagccaagcacaggttcaaatcccttatgtgtatatttccatgcgcactttgtggactgttttgggcacaaactcttcaagcacccacacatactaagaatttaacatggtacttggcctctcatagtttcactacatcactagccctctgccttcctgagttcatgtgtatctttgagtattctctttagaaaactgcacatagttatgaaaatgtctgtgtggtcccctggctcctggtgaagaactctgctctaatttttcactccatccattctcccttctccttctttctctctcttaagaaattactccagaagcgaagcggtgtttttctgtatttgtatgccagtgtcaggtccagggtctgactcgtattagctgcccaatgagtgttttctaactgagtgagagaataaagatgatagtgttgatgataccttgtttgcatgtgcatagcgtcagggaatttttgaactgaatgagatagaacatacatgtgcatgtgtcattatgatagaataatttctcttcctttgggtatatacccagtaatgggattgctgggtcaaatgatatttctgttttaaggtctttcagaaatcaccacacatagcatccaacccctttattttctggattataaaactaagactggattataaaccttacccaaaggcatacagctaataataataatattatgattataattaacatttccccccaagcagatacaattagatctcattccctcagtaccttttcagaatacagggtccattctgatgtatcagttttatggatcatgttgcaaaactgagttgtcttgtccctcgtatctgaagccaaagacatggatgagagaaacatattccacatctcaactgcagaaccattatggtgtgagccccttagggcaaagtgcttgtcacctcacctctttctctggatctcccctttccactctgtccttcagttcttgcccagagctgtgtatacggacgcggagatggggacatttgtgctgaggctggtcaagctgtgggtggaaggtggattacagacagagcaagggaggaatttgttcctgcagagtcctggaaatcttatttggagctgttcttctattcttagtttcgaaggcactttgttctctggtgcattgttttaacagccatcaggaaatcagtccccgctcggggtcactggtgtctgcctgtggctgcccaggtgggaagtgtactggtttgttgcagggttgatcctttgtcatcaggatcattgtagccctttctccttttgttgcccagcctgtctgcctggggcagggaagggtaaggaggctctttttctttgtagcaatgataactgtacttcttttgttcttttaagttcaggggtacatgtgcaggtttgttttataggtaaccttctgtcatgggggtttgttgtatcgattatttcatcactaaggattaagcccagtacccattagttatttttcccaatcctccctgtcctcccaccctccaccctctgataggccccagtgtgtgttgttcccctctgtgtgtccatgtgttctcatcatttagctcccacttataggtgagaacatacagtatttggttttctgttcctgcattagtttgctaaggataatggcctccagcttcatccatgttcctgcaaaacacatgatctcattctttttatggctgcatagtattccatggtgtatatgtacaactttttctttatttagtctaccgttgatgggcatctaggttgattccatgtctttgctattgtgaatagtgctacaacgaacatacatgtgcatgtgtcattatgatagaatgatttatatccctttgggtatatacccagtaatgggattgctgggttgaatgatatttctgtttttaggtctttattattatttaggtctttcaggaatggccacactgatttccataatggttgaactagtttacactcccaccaacagtgtataagcaaataactgcatttatttctatgtaaaaagaaagatgctaaaatcgggcctccatagcgttgtgccctctggagcagtgttgtccaatagaagtagaatgttggccaggcgccgtggctcatgcctgtaatctcagcactttaagagactgaggcgggtggatcacctgaggtcaggagattgagaccagcctagctaacatggtgaaaccctgtctctactgaaaatacaaaattagctgggcgtggtgatgcaggcctgtaatcccagctatttgggaggctgaggcaggagaatcacttgaacccaggaggcagaggttgcagtgagctgggattgtgccattgcactccagcctgggcaacaaaaatgaaactccatctcaaaaaaaaaaaaaaaaaaaaaaatagaatgtgagccacaatcgcgattttaagtttcttagtaaccacattaaaataagtaaaaagaagcagacaacattaattttaacagtacattttaactcagtatatttctttctttctttctttcttttttttttttgagacagagtctcgctctgtcgcccaggctggagtacagtagtgtgattttggctcactgcaacctcttgcctcgcaggttcaagtgattctcctacctcagcctcccgagtagctgggattacaggggcctgccaccacgcccagctaatttttgtatttttagtagaaacgaagtttcaccatgtttgccaggctggtctcgaactcctgacctcaggtgatccacttgcctcggcctcccgaagtgctaggattataggcgtgaaccaccacacctggcccaaatactagcatttcaacctgcaatagctataaaaattgttaagaagatgttttacattctctttttcgtaccaagtctttagtatccagtgagtattgtatacttagagcacatctcaattcagactagccacatttcaatgtcagtgaccacatgtggcttacggtagccatcggacactgcggatccacagagcaccagtaagtgcttcttgtgacgacagaaatgttttctatctgctccgtctcatatggaggccactagcctcagttagctattgagcacttgaaatgtgactagtacagctgaggaggtgcattttaaattttatttaattttgataaaatgtgaatttaaacagtcacatgtacctcgtggctcccatattggactgggcgcggttgctcacacctgtaatcccagcactttgggaggccaaggtgggcagagcacgagatcaggagtttgagaccagcctgcccaacatgatgaaacccgatctctactaaaaatgcaaaaattagccaggcgtggtggcaggcgcctgtaatcccagctactcgggaggctgaggcagaagaaatgcttgaaccctggaggctgaggttgcagtgagctgagatcgtgccacttcactctagcctggcaacagagtgagactccgtctccaaaaaaaagaagtgaatttaaacagtcacatgtacctagtggctcccgtattggacagcacaactctagagatttgatgttattagaaaaatatcagtttaaacttgaccagggtatcatttctcacctaccatgttggcagaaattagaaagttggataatgctgttcgaggaggggaacaaccttttatacatggccagtaggagtataaattacagcaggctttatggaggccaattggcaatgtttagcaaacttacaaatacacattcccttgaccccaacagttctgtttctggatattaatgctacagagtctcttatgcgtgtaggctggtttatgtagaaggatatttgctgcagcagaagattggaaactacatacatactcagtcaatggggacttaaataaatacattattgcacattttaaaaatgtaatttgcaactactgaaaaaaattgattatttcatagcatggaaggctttcccaaatatagtgttaagcaagtgtagagcagtacctatagtgtgttagcattgggtaaaatagatgatttgcttatttatgtctagggctggtctggaagaatgcagaaggaagcgatggctgggatgtgagagaggttgacatcatcatatggtgcctatacccttttggaatttaatcctgtgcatgtgtatattacctattcaaaaaatgaatacctaaaaaataaaaagagaaaactctaagggaaaggtgaatcagagaaggcttcctagagaaaatgacctttggactggattgtaaaagatgcataggagtccttcaggcaggaggaaggctgaggctcaaaggcgtgaatgagtgggatgggttcagtcatccatatgtacccagcagtggcagagtattcggtgtattaaagagcagagtaatggagtttcgacatgcatgactagctagatgggagaggttttgtgagtagagtttggacttaactctgaaccagaggagccagaaatggttcgaaggaaatgggaagtaacatgcttgtattggtatgaatgacagctttggtggagtggtgagtggcctgaaagagtggttctcaaagtgtgatctgaggagccctaggagtccccaaggcctagagggtactgacgacataaatacaaaacagatgttctttgtatgtgtctctgtatgtgtcgaccaaataacaaatcatagcagcttgattgcaggagcagatgtatgaatccagctgtcttctgtgcagccaaacattagagtagtcaaaacagagaacaatgttactcctctcatgtttttttgaaaatatagttaatttttattaaaatatggtaattagattaacaagtaatatgtttatttttaaaagaataaatatttttgaaatgtctcagttttggctgggcctggtggctcacgcctgtaatctcagcactttgggaggccaacgtgggaagatcgcttgagcccagaagtttgagaccatcctgtcaacatagcgagactccatctctacaaataattttttaaaaggctgggtgcagtggcttatgcctgtaatcccaacactttgggggccaaagtgggaggattgcctgagcccaggagtttgagaccaacctgggccacctggcaaatctcatctctaccaaagaaaatacaaaagttagctgggcatggtggcacgtgcctgtagtcccagctacttgggaggctgaggtgggaggatagcttaagctggggaagcagaggttgcagtgagctgagattgcaacactgcacccaggcctgggtaacagagctagaccctgtctcaaaaaatacatatatatatatatttaggcatggtagcatgtacctgcttccagctacttgggaggctgaggcaggaggattgcctgagccaaggaggttgaggctgcagtgagccgtgatcatgcctctgcactccagcctgggtgagtgagaccttgtctcaaaaaaattctcagttttattttctaatactgtgtatattgatagatacaaccaacataaacaaaagctcattgggaccctcactaatttttgaaagtataaaagcatcttgagattaaaaaaaaaattcaggaaccactggcctagaagcaggcaggccctgtgtgtttttaattctggttggattgaaataaactaccgggaaacaaatgcagctatccaaacaagggtcaggcaggaggtgagctagcagggctgcagctgatgtacactttgcatatccaagtgcatagtagggtatgggtggtgtctgttaaagaaggagcttagttgatggattggttttgactgatgagaatgttggtgcatgtcctatatttcattttcccactagtggatgcttctgttatttccagtcctttgctgttataaacatcctggacatgtctgcaagtgcccttgggcaagacattctctagagtatctctctaaaagtggaacactgagcagtaagacattcacattttcagcatgcctggaagctgtcaagttgctatccaatctgtgactctccctctagccttgtatgagagccctgatgtctccaaaccttcatattatcagacttttcaattttgccaatcccagagtgtgaaatggcatcttgctttaatccctctcccacgatgacccctacctccattctgtaccttggagcataactctgaattgtaggcaattcagcagaagtctttgtcaccaggaaacttggggttcgttctctctctctctctctgtgtgtgtgtgtgtgtgtgtatgtttagagaggggacacacagaagcaaattctgtattctgcttccctggatgaggaaggaggaaaaaactgggacactgttctttattttagacagaaattgcccagtcagctgttactgttcttgtggcatttgctgtcatttggggctacttgggtcctcagtgaaggaagagaaaacaggcctctctgttgcctgacttgggttggtgtttggggtaaggcccagtctgaggcattaagctgagacctaaggctttgggcacacaagtgtagtgtgagagtataagtctccttctctggtctgctcacatgtcctcacctgggtcaggccttcttgcaggcctgaaaccagggccagcttcactggcctgcaacctgggcaggcacacagggtcctcattcagaagggccatgtgcccgcttcagtgctctactatagtcatctcgaaactcagtactttttggacaaagggccccacatttttattttgtgtcaggtcctgcaaattatatagctagtcctgcctgaagtatctttgtgtctctcagactaaaaaggatgtagggagaggggtacagttctgtgggtggccctgttctctctgctctgtgcagggcctgcctcccactgtgagctgcaaagctcttttgaatgaaacactcattttctcatttcatgcatttcttttcttttttaaaaatctgtctatctccatccatctatccacacacgcgcgcacacacatgagatcctcattacttatgatttcatatttgtaagtttgcttactctctaaaatctgtttctaacgccagaattaatactcatggcacttgtgcagtcattcacagacacatgcagagcagcaaaatatttgagtccccttagcacgttgccagcagaagatgaacaaggtgatacactgccttcttgttctagctcccatactgtaaacaagtatcctttttgtggtctgtttagtgccatgttgttcacattgtattttttgttggcgatttcagtgtgtaagaaggttctcaagtataatgctgaaatgctgtctagtatttctaagcacaagagggctatgatgtgccttttggagaaaatacacgttagataagcttctttcaggcttgagttatggtgtcattggccatgagttcaatgctactgaatcaacaatatgtattaaataaggtgtcgttaagcagaaatacacataaaacaaggttatgtattgacaaaaatattgcagccatgcctgggcaacatagccagacctcatctctactagaaataaaaataaaaaaattagtggggtatggtggtgtgtgcctatagtcccagctactcgagaggctgaggaggaaggatcacatgagcccaggagattaaggctacagtgagcagtgactgtgccactgcactccagcctggacaacagagtaagaccctgtctcaaaaaaaaaaaaaaaaattacaaccagaggctcacagaaacttagccctgtattccccccaggagcaatggtttagtattcattaactcagtgttcacaatgacttaatagaacatactactatgaataatgagagtcaactgtatatatatatatacagtatgtatatatatgtacatatacgtatacatactcatatacatatacatatacatatacatatacatactttgccactctcttgtttactctccattttgccctttcttctaatctcttgcatttttgattcactctcatttgtcagtggtccttctgacattagccttggaccctcaagggcaccaatgaaagggcctttattcatttatccatgtatttaatacacatttgtggatcaccttcttttgccatgcactggtctatgctggaatctgaacacagaccttatgtttcaaaaacattgcttatgcatagggttgttataattggtgattttgagacaaagtgagagtctcatacttatttctggaaagtgtttcccaatctctgccattctcattacccactttccacccctacccaaaaacttctttggccacataatgtcataaatgcataaaatgttagaaggaaactttagaggtcacctgggccaactccctcagtttacagataatgaaactgagatccagactgggaaagtgaaatgcctggagtcacaaagctagttcaatggccttaaaaaagcaggtgacaacccaggtaataatagttcccagttgctctattttattacttatgtatcaggtaagaaaaagataacatcaattgtgatctggtaacttccgattaaaagcataaaacagatttctataaattgtctacattgtaacaaagctggagaaaatgtataaatggaagtagaaaaatatctaggtttaaccgttggtggtggtgttgttttgagacaggatcttgctctgtggcccaggctggagtgcagtggtgtgatcatggctcactgcagctttgacttccgtggctcagtcaatcctcctgcctcagcctccagagtagctgggactacagtgcgtgccaccatgcctggctaatttatatatagagattgggttctgccatgttgcccaggctggtcttaaactctggctggtttcaaggaatcctcccgccttggcctcccaaagtgctgggattacgggtgtgagccaccacacccagccaactgtattgttttgttttgttttgtttttacaaaaatatttcttatctgcaatcaaggtatctagatggttccagtatagagggtgtttagatttctcacttgggtgattttcgtgatccaaatacctgttgttataacacatccaaaagtgggcatcacttggtcctaacaatatgtaatatacatttgcaagccaggactgtgacaacaaagggagttgggaggtggggcctctgctacaaagccagccaggaaacagatccatcagccttcacttcccgttcactccccaaacctagcctccactctctcccctcccaaaaaggggaaggaagaaggttaggtaaagataacgtgcccatcttcaaacaaaggatggcgaacgcttttgggtcgcccaagcactcccatttcctgtggctaaagttagacctattagatatgaatttcatttttaatccatgactgggcagacagagggttacagtgccaggagtggttcacatcttctccaaaaaggatgggaaaaaggaggcgtcccttttcagtcatctcagggcataggggaacagagagttgctttctctgtacttgtcacagcagcaaaatgcatgggacagttactttgtgtgacaattaagagagggagcttccacaaagtgtttcctaagtcccactcatttgtgaatcacctttgacctgaaaaaggcttcataattttctgtaaaacaatgtattttttctttcatatttatatttaatggaaagtttatattactatggtaaacaaaaaaccagtatgcttgccataaatagataagtatcaaaataaaatatgcacaaactaatgtaaataaattctaactaggtgctattgtctgagcctctttgtacgtagaagagaaagattgggcatggtaaacgttaggggagtattcaaggtgaagtatcctcaatttgagcatttctctttgagggatttacgatggacaatgaattgacaaagtaataactttcttgttatgtgatctgttgctgggtaaagaacataagctgactctcccggtgccccacccatatggccgaggccacttcagatgccatctgcagggcctcctgtccacatctttgactttctatgtccttctacctggcagggtttctagccagggaagctaacatcctgaggagcccctttccatcaatgaggggaggagttggtggattgaaactcccacctcctcacccctcagtggagaattatgcggtgtgtttttttgttgttgttttttgtttttgggacggagtctctttctgtcgccaggctggagtacagtggtgcaatctcggatcactgcaacctccacctcctgggttcatgccattctcctgcctcagcctcccgagtagctgggactacaggcgtgtgccaccacacccagctatttttgtatttttagtagagacggggtttcaccatgttagccaggatggtcttgatctcttgacctcgtgatctgcccgccttggcctcccaaagtgctgggattacaggcgtaagccaccacgcctggccatgaagtgtgttttatatgctctcagggggtccccagtgggttgaatgccggctgcccacggctgtaacctgatggctccatactctttattggcttccctccttttctttgtctcattttcccactccccaccagttcttccagggatcaccccagaagaaaacagctgatacttacatctttgctccaggatctgctttaggggaactccaaactaacagcaggtaaacataaaagaaagaagacttactaaagaaagaagactggccaggcgctgtggctcatgcctgtaatctcagcactttaggaggccaaggcgagtggatcacctgaggtcaggagttcgagaccagcctggccaacatggtgaaaccccctctccactaaaaatacaaaaatcagccagtgtggtggcacatgcctgtaatcccagctactcaggaggccgaggcaggctaattgcttgaacctgggcagtggaggtttcagtgagctgagattatgccgctgcactccagcctgggcaacacagcgggactccatctcataaataaataaataagacatacctaaaaatgttttttaaaatagatacaggccaggtgcagtggctcatgcctataatcccaagactttgaggctgaggcaggaggattgcttgagcccaggagttcgagacgagcctgggcaacaaaatgagaccccgtctctacaaaaaatacaaaaattagcagggcgtggtggtgtgcacctgtagtcccagctacttgggaggccaaggtgggagaatcagttggacccagaggtcaaggcttcagtgagctatgatgccaccactgcactccagcatgagcaacagaactgcgaccctgtctcaaaaataaaaaatacataaataaataaaaatagggccgggcatggtggctcacgcctgtaatcccaacactttgggaggtcgaggtgggcagatcacgaggtcaagagatcgagaccatcctggctaacacggtgaaaacccatctctactaaaaatacaaaaattagctgggcatggtggtgcatgcctgtagtcccagctactcgggaggctgaggctgaggcaggagaattgcttgaacccaggaggtgaaggttgcagtgagccgagatcacaccactgcactccagcctggtgacagagggagactccatctcaaaaaaaaaaaaaagatacatatagatagattggaaatgaaagcatcagaatgagttcatggttatacatatatacatgcatgttttttccctgtatctactgagagggcctagaagcagtggcacccccgtagcaaaaacataactagtgcccagatcttggcttctaaatactcctccactaaagggaaccagagttccttggagaaaaggctgattccaggactggggcagggagaatataggaagatcttggaacatctttttgtatcaaaaagtaatgaagtgccctaagaatgatgggcatgtgaacaagctggacacaggcaccaggttgtagggctctccctagccaagtctgggacaatctgagcatcaaaatgaaaaatgatagtaacggatcataacccactaaataaaattggaatccataagccaacatggatgtaaataataaataaatggtggagaatggaaagctcttccctccagtagaagaataacttataaacattgaagggatgatagagttgaaaaatcgtcagtggacactaaaactagtgtgttaacatttcatgaggaagaagacacttccatattttcaatttgctggttacttaaaaacagaaaaatagtaactttccagtagagaaatttagaagatgccacctcaactaaatagtctaagccaatgtcaccaatattgggccaaaccaatgccacatgtcttctgaggtgatgtgctaagaaagactctacattgtcacttctgtcatattcctgtgaaaaatacaccacatgaaaaaaatattctcttattactctagacatttttagaatgtgcaacctgaatctaatcatgaaaaaacatctagtaaaccctcaggtagggaaattatacaacgtaactggcctgtcctcttcaaaatcattaaaatcaagaaacacaaagaaagcctggggaactgttccagattcaaggagactcaagaacacgtgacagtaaatgcaatcaatgcagggccttcagttggattctggaccaggaaaaccaatagctatgaaacattttattggaatagttggcacctttttaaaaaaagtggtgaacgagttgatacattttgtcaatgttaagtttcctgcttttgataataattatcctgtgtaagaggatgcccttgttcttaggacatacacactgaagtatttagggtctaaagggacataatgtctgcaactcattctcaaataattaggaagaaaaatattttatattcatacgtatagaaagagagagagagggagcaaatgaggtcagctgtaggcagccatgacactgagtaaaggattttcaggagtatcttattctggacttgcaaaccttctataagtttgaaactatattaaaataaacttgccaaaaataaaataaattctcaaataaactgcacactctgccctccccaagaaaaaggcctgtgttcctttgttcctcttcagggaatctaatatactctcaccacacaactccagagggcatcaggccattcgtgctgccgccagctctgcaggatctgccagccccctgtgcctgcaggccctcatgctgaggcacaattcctaaggcctaagaagataatttcagaattatttaatcaaaaatagctctcttccaaacaaaactggaaactcttccaagaggctgggtgtttatccttaaagatgcccctgtctctcagtaggaaagaaacaactgtaaggaaaataactgcataataatgaatactctttccctcagaacgatggacctgaatggccgggtgcggtggctcatgcctgtaatcccagcactttgggaggccgaggcaggtggatcacaaggtcaggagatcaagaccatcctggctaacacagtgaaactccatctctactaaaaatacaaaaaattagcccggtgtgatggcaggctcctgtagtcccacctgctcgggaggctgagccaggagaatggcgtgaacccaggaggcggagcttgcagtgagccaagatagcgccactgcactccaacctgggtggcagaacaagactccatctcaaaaaaaaataaataaataaataaataagaacaatggacctgaatatgccaacacagcctctttctgtatgtccgcactggaggcaactggagcctcgggagcagccatggaccatttctatgacaaaggcccctctctctgcccagctagagctcattcagcacaggggaggccaccagtctttcagagtagtcatgactaactcgggaataatgctcttggcgatagtccgtagagaatctgtcagaacaataacgtgaaagccagttcccatttctgatgcagcgcctggaaagaagtcagctgcgattagagggacattttcttcctgcagctgtctttgaaagtggaggaggggttcaccacaaccccaaattacagggagggagggagggaggtagagggcccctaaacaccagggacatgcaggtattcagggtacgccttctttagtgacactgtcatgttctgtcaagttctgagtaaaaagcaaaagttgtggtgagccacaaatgggctgcagggatgggggaaagtactttgggctaaattttctaatccggagtctttgcttcaaagttcatcccaatcacttttatcctgaagtctgaaacggagacctggcgtttgcagaatcaaagcatgtttatccagcatttaatccatttcccaggaaatcagtgttttaccaagagtggaattcttttttaggactttcgtggacatttctaaggcctaacccagcatacagagaatgttcaactactgctatatgtgaacaaatgaacccatttgcccataaaatggcaaatccatagaatttttttaaaattttttataattaaaaaaaagagaaagagatagggtcttgccacgtcacccaggctggtctcaaactcctgggttcaagcagtcctccctgcttggcctcccaaagtgctgagattacaggcttgagccacaaaacctggcctaaactttcttttcaggagaactaaaatgccaagaaatacagtacataaaatatcattttttattctggggcccacaatatttctgaattttgacaatagaaacacaggaacagtaggatactcagataaattaatttcactatttagtttcattcattcaacaatattttattaagcatctaccatgtgtcagacactgtgcaaatgccgtagatacattggttaacaaaagagatgcagtgtctgttctcagaaagaacacagttgagcggacccaggtgattccagtgtacaagactgagctcatacctcagagttgtcccaccaaactgtcagaagctggattatttatctgccagccccagtccctcatagattgaaagctgatcccagtggcattaattctccggcatttctggcctgtggaaagctgatttgtgtgctttccacacggtgtgcagggaaatggtgattgcccaggggttgtcagccggctgtatctgctacacgagtgaccggttctgatactcctagagcagccttagtcaagtcatttaaactctttaagtctcagtttccttatatgtaataacttctttgtacagctgtaaggattggttataatacatgtaaagcacccagcaaggcagtggatttttttttttttttttttttttgagacagagtcttgttcttgctctgtcacccaggctggagtgcagtggtgcgatctcggctcactgcaacccctgcttcccaggctcaagtgattctcctgcctcagcctccagagtagctgggtctacaggggcacaccaccatgccgggctaatttttgtatttttagtagagacggggtttcaccatgttggtcaggctggtcttgaactcctgacctcaggtgatccgcccgtctcagactcccaaagtgctgagattacaggcatgagccactgtgccatgctggcagtggattcttaatagacagttgttataaagcccagcaaaggggttgggcgtggtggctcatgcctgtaatcccagcacttgggcaggccaaggcaggaggatcacttgagcccaagagttcaagactagcctaggcaacaaaaacagatcctatctctacataacagtaaaataattagctggacacagtggcacatgcctgtaatcctagctacttgggaggctaaggtgggaggatcccttgagctcaggagttcgaggctgcagtgagctgtgatcatgtcattgcacttcagcctgggtggcagagtgagaccctatctctaaaaaaataaaataaaataaaaaatcccagcaaagggaagggactaccttaagcagccagaatatacaataaagaaatggaattttggcaactgaagttgtgagtttttatatggtagacaacaccaaatggttgtacaagggaaccttttgtttatttaaaggaatgtcctttagaggacagcttgacaagagcagcccgtttctctaccatttttcatctctgctttgtgcggcaaattgccccaaggagtaggtgttccagacaccagtgattgaaagggagctttgcactgtgctctccctagggttaaaggcctgcccgttggcatttggggaactgttcatgaacccatggggtgttgtggctgataagacattaccagaaccaggagcatttctaggtaggagaaagcgggaacacgagccaagtgaacgaaaaactgacaactgtctttgtaaattcaggttcccagtattattgtggatgatgagcactttgaatttgaattatgcagttggacaatctaagctgattgtttacatggagtagttttctagaaattaaacaatgatttggacattccctaaactgcatatatatagataatattttttgttgataatggcttcaaatcattgcatcagtgaagaattttaataagtaggattttgttatagtgtttaaaaaataagtgaataaacatataaaggagggccaaggaagcaccatagcatattatgaaccaaggattgcagtgaatccaatctggtgtacctgagaaccagtagaaaataataattacagtaatttagaaggcctagtaaaagtgctctggttaatgcaattttgtgctttgcgtcacatccactgttgaaaatccttgtgaatatggactccttctcccaccttagatcgatgcccgtattttttttttctgggacaatttttctggaaaatatatttggcagccctctatcctggatagatgagttttctgtcttttctcctgctcccctggccttgagtgttttggagggaaaagcagtttgtaaatgtttgttgaatgacagagtgaatcctgctgcttgttagccatcagggttggtggtggcactgtcaggctggctaggtctcctccctcctcccacttgtttggttggacatgtcttccctcccgtgggagaagaggatctttccttggctaagactgtctcatctgtacctccaaacaagttaagggccaggtgttccatggctaagatcatataataggggcttttcctagtttgccaacgtcaaattaatgagtagacttttagacattttaagtattttccccatgattttccccccggtgcctgtacttacttgctgttactgctgctgttgctactattaccattaatagttaatatttgagtagttgctgagggccacgcattgtgctaagctctttacccacactgatctatttaactttcacagtaaccttaggagggaggtactattcgtgtccccattttataggtgaggaaactaaggtgcagagaggtaaaatgatgcgcttaaggttccacaacaaataaatggcttaactaagatgtaaactcacaaacactgactttagagtctacctaacatcttcaacctatagttagtggtatctgagcacataattgcatattatatttgttaaaatttagttccccgtagctctgaaaacatcatgatttcccatttctccaccctgtcagcacactgaagacagcctagaaaaaaggactggggttcctggatcctagaaaaaggaggatgttttaaaaataaggaaaaggaaaaaaaaaaaaaaagcagtgtactaaaaatggagtaggggccaggcacggtgggtcacacctgtaatcccagcacattgggaggtggaggcgagaggattgcttgagctcagaagtttgagaccagcctgcaagacatagggagatctcgtctctattttttttttttttttttactttttaaaaatggagttggtgctccttctttcaattctctcattcacttctggagcttcagactggagaagaacaaaatgtggatcctctccctgctaaaacgtgaatttagcaagtcaagttccagctaagggcaagtacaagaacacaaaatccttttgctaatctttccgcaaagaaagagcagatgaaaggcaaggcatcaaagcctctgaaaccaccaaagttgtttgccagcaaagagataaatcaaaaaggttcgagatctggtttgaatttaataattacaaatgactaatcagggactatttgctgccaagtcaggagctgcactctctcaatcagtacgtttttgctgctctggtcacctggttattaaatagaaaagcccagtgattaaataacagggttgttctgacactaatcagttcaatcttggccatttaaaattaagtcaggcttgcagtagcccttgtctctgtgaaagaagtgggaacgacacagtgcaaatgtgactgaaggtatcctgagagtgtttgtggatagtcctctgggacctgggtagttagaaagagtcaggcagcgtaccaggtctcctgcccatcattctgcaggatcctgccatctctaataccctccctgcctgactctcaacatcaaataacaacaaaataattatgccagcagtgacagcagtagtaatagtaattacggtaataaccgcagtagcaataataattacatttttcaaatctcttgccatatgtctggctctgttcgaaatattttatttcttttaatacttgaaataaccccatgatggagaaaaccaaagcttatagaactgctttatagacactgacgtatcccatacacttagaacctgcctggcacatagtaaatgctcagtaaatatttgttgagtgaatgaaggaatagagaagtaatttgcccaaggtcacaccaagtagcaaaggtggagctgcattttgaactgtctcatttatgctcttagtttctttgaggtatgtaggtaaatgccttgtgggtctttttatattgttttaaaacacatatgattttaaacaattatttatgtatttatttatttatttagagaaggagtcttgctctgtcacccaggctggagtgcagtggtgcgaccttggctcactgcagcctctgcctcctgggttccagcgattctcctgcctcagccttctggatagctatgattacaggcgcacgctaccacgctcagctaatttttgtatttttagtagagatgaggtttcaccatgttggccaggctggtctcaaactcctgacctcaggtgatccgcccatctcggcctcccaaagtgctgggattacaagcatgagccactgcgcccagccatgaaacaaatatttaaatgtattttaccttatttgtatgtattaatttaaaggaaacgcagattgtttttaaacaatgtacaaagagaaatagcatcatatgcagagaggtcagtggtttggcagtcagggtggcctccagaaaatcctctctccagcactcactcactttgtgaccttgagcaagttactaaaaccttcctgagcttcagcgttcctctctgttaaaatgaacaccacaaggcttacttaaaccgggctgaggagaagcttaaatggcacaatccattaaactgagagcatagtccttggctcatagtaggtgcccaattccagcgtctgtttccctccacttttgtattggaaggcacctggtgattttctcaaaacctcaaaggaggtctggagaggatggaagttaagccaggtaaggacacgctattcaggcttggaccacggccagctcttctgagaatctgttgtcgggtaaggataggatcagtgcttttcacagagaatcttccccaggacaaccgaaaaggcagtttgttcatgggttatttaccgatgagattcagatgtctgccttgtgatatcagaaggtagccaaccctaaaaagagatagccacagagtgtcctggaaacaataatgtttgtgaaagtgggtcgaaaggttcaggtgaaggtcaagctagcaggatctctcaagcagaggcagtaacgagtctctggcaatgttcacttgatccttccaggaatacccatatctccatgagacctcccattggaatatgcacaggactttgctctattgcaaattagcaaagggaccccctggtcatttttgttttttgtttttgtttttgtttttttttgagatggagtttcgttcttattgcccaggctggagtgcaatggtgcgatctcggctcaccgcaacctccgtctcccaggttcaagcgattctcctgcctcagcctcccaagtagctgagattacaggtgcacacaatcatgcccagctaatttttacatttttagtagagacggggtttcaccatattggccaggctggtctggaactcctgaccgcaggtgatccaactgcctcggcctcccaatgtgctggaattacaggcgtgagccaccatgcctggcccctggttgcttttttaagaagcagtggtagggttttttcagcacttgagcacttctagaaagtggtctatagcaaatatataacctgcagggctaaggacttagagactacatgcaggtctattgtgcccacaaattctcctctgtaactgcctttctccccacccccatataggcacgtggcattgagacaaaggggtcaggtgcccattaagttcatttagggtttggttcagctggatgttccctttccatctgaggtgttatcaatcttggattacttgctcttaaagcacagagactgagtccccagactgtcgcccagggcagtacatggatagattcgttggtcagggatgtgcctcacccttgaacagatctgacattccttttcgtaggagtggaaatggccaatgtcccacttggaccaatgtctaaacaactgtaatttcttttaacatgtctgtgcattttaaggaaaataaatgcccctgctggtaagaaaaaaaaaaaaaaagctcttatttgaaaaacaagaatcttagcttgaatgggcaggttttttctccaaggagatttgaggttgaagaatttaagccttcaatgaccttcacttttgaggtttttgatttaattttggctgcccttttgccaccaggtggttaatgaaagggaaaggtgtcacctcaaaaacactggcctcctttattcattctttcttttagtcacccatttagaaattattcactgacctactgctcagcacagggcactgaggggttaaagttatgtgctgaaatcagagtgcagagactacagcacaattattgggctcaccgaaggtgctttgttttcatggttgaaagggaagtggactgtgcctttgcttcagtaaatttgacaagaataacagggtgggtccttggctcctcaaattggctgggaacctgtcagaccaagtgtgcaaatgcacagttcacacacagtgcccttcctgcctgggaacgcccccaggtaactgatcagtggttttttatgcagaggaagtaaaatggcattttttacttcctgtgggcaattcataacaggagctgccacttactgtgcacttactatgtgccaggtcttgtcacccaacatctatgatcctcacaacaccctaacctggaaggcattatttctactctacagataacatcccagagtctcagcctcctcctgatacctcccaagatcccaggtataatactgtagcctcccaaggcaggagaagcagaactcaagaaggaaatggggttattctaggcagcgggacgcccttgctgctgtgccccaattcgttccccagcacatgttgctaattgtgatcacagcattctctggcttgctatgctgtgcagtccttctcaatacagtgctccaaacaaacactaccagacattctggatggcaagtgagacgtaacctatttgccaccagtgcttgccaccaatgcctgctacctgatagcagacactgatagctcttaaaactagaaaggaccacaaaattgatttggtctagacagtgtgtgctgtggtcttgaagaccagtctctctagtagaataaaggttattttcttgccatattcctcatgctcaacaccttcctagaccttctgtgcaggtctgatgtgccatcccagactctgggacgggacagcatggtggggaagcacatagtttgaagtaggaaagacctggatttgaatccaggctctgccacttgctaatcatgaaaccctggacaaattcctgcccctttttgagccttcatctcctactctgtagaatggagatgataaccattatccacctacctcatggggtagttatgaggatcaaatgagatcatgcatataaggatttagctctgtgcctgacatgtagtgagcgttcaataggctaaagctttcattattatcagtgtgaattattagtagtagtagctccagtgaagttcaaagtgagtgccgtgtcctgttgcactctctgctttctgagatgctcatttgtttatgtttccgtggcttatttccaactggtgatttcttccatgagctactctgtagatcactggcatgaggtcaacaccccaatattctagaaatcccagttcctgggtagagcgtgaaatgtctttatgtggtgtttccatctgtacgcccttcttcaccaggtcctttctgttctctcttcctgtggccctctcgagttgggcaattagtgaagaagacaagcaaagggaggaggaccaagaggatcaacaaaatccagaaatcctattttaagggaagctggctgtgtaccagggattgtcccaggctctgggactgtgagcatgactgaccaagtcctgccttcatgggcttatgtctcatgaaaaggtcaaccaaaacccagaaaacaattaaataaaattatctttctaaaatgggtctgccctgctagcctctgtcttagcaccttatctgactcattcatgacagagatcacaatctgtaattactttgttttatttttactccaaactagtgggcagggaacatgcctggctcattcactgctatatccaaggacccagaatggggttttgcgtgtcaaaagtgctcagtgaacacagagcaaatgaacaagtgacttagtgatggtttgtgaaattttcgttctgagcccagagtttaaacttcaggctacttttttgttgctggcagtggtcagtcacctccctatgtaagaaaattgaaaagaaaattcattttcataattcatgcagtttttattttataaaacatgtgggttccttaaggagatcattctatcccagattgactgtctatggctgaattaaaaagaccattggaggccatttgtcttctggatttgacacttggagcaggtggcagtatctggcaggaactgggttgggggaactcatgaggcttggctccaaagctgggtagtgtgttgaattggtctggagagggctgcatgcctgtgaggagaggagcttctcttattattcactttcctgcatcaatgtgcatctaggctactgtcaacatgtcaggttgacaaaatcattgagctcaaggaatggaactgtagcaccataaaactcaataatctggtaataccaggttgcagcatgtatcggtgtagcctatggtctgggcaattcataacaggagctgccacttactgtgcacctactatgtgccaggtcttgtcgcccaacatctatgatcctcacaacaccctaacctggaaggcattatttctactctacagataacatcccagagtctcaacctcctcctgatacctcccaagatctcaggtataatactgtagcctcccaaggcaggagaagcagaactcaagaagggcatggggttactctaggcagcaggacgcccatgctgccatgccccaattcattgcccagcacgtgttgctgattgtgatcacagcattctctggcttgctatgctgtgcagtccttctcagtacagtgctccaagcagacactaccagacattctggatggcaagtgagatgtaacctatttgccaccaacctttgaacagtgtatgtaaaaggctttgccctaggaattagaatcctggattcagagtgttacgttgtaaccatgtaactttgagcaaattgcttctctctcctgacctcagtttattaacctgtaggatggaaattatcccataccatatctggctcaaaaagtcaccatataaatataagctggtgaattggtttcactggcactgaagtgctgtttttaattgtacctggatggtgaatcagtaaggatcagggccctgtacaaacatgaagcatcctcaaaaacggcagctgtgcccggagttgtgatcagcatcttctcgaggcttccctcaaggacgctgagtggagtatttgacttcctaaaagtcactgggtgagcttgttaatccagattcctgggcaccctcccaaatggctgattaagcattcctggggatggctcctggcatcagcatctctgaatcattcctcaggtgattctgctgcacgctgcaccactgtttcagtggaaaaatgtatatatgtagaacgccactgctctgtataggaccatattgacctttggaattttaaatatctaggtagctgcttaacaaaaagagccccaatatcttccccatctttgtctgacaaactcttattcatcttttaggcctattcaaatgcctcctcctctgggaagacctccctcacagtcctcccagagccctccaacccatgttttgagcacctactgtgtactaggcactctactaagctctaaaatgcattactatatttactcctcttcctttgagaatagaagctaatgccatcatcaccacctctgctcacaccttagagttgagaaaaggtggctcagagaagcaaagtgactttctctaggatgtttggctcttattgcattatagttcatcataataggcctgtctctcctacatgagtgtgaggtccttaaccatgagaattgctgacctttgcatttctgggagtgaacacagggcccagcacatagtaaatgctcaacaaacctttgttaaattgaagtgaaaaaaataatagaacaattatagtaatataaaaaagagtagttctgtttgctttccagtctctgcctttgttcaagctcagggttccactagaggaggaggctgacttcttttgggactgaagactacagatgtcttcagactctcctgtaaccccatgctggtgattctggtcttctggtagctttcttctaagtaacatcagaagacctagcaagtcacaggttagggactgaagaaacacttgactgattggttgagctgggggtgcagaagagaggtgaatgtatctttgatgagctttattgtggcttatagattacatttattttcttctaatgaaaagaaaaaggccaggctcaatggttcactcctgtaatcccagcattttgggaggccaaggcaggaggatcacttgagcccaggagtttgagaccagcctgggcaacatggcaagaccccctctctacaaaaactaaaattagcccagtgtggtggtgtgctcctgtggtcccagctacttgggaggctgaggcaagagaattccttgagtctaagaggtcaaggctgcagtgagctgtgttcacaccactgcactccagcctaggcaacagagggagaccctgtctcaaaaaaaaaaaaaaagaaaaacatactttttcacatctaacttggcagactgccctggtcataaatgtacaaatttatttcaaatacagttatcttcagtccaactaataactttttaaaaatcatatggctataaagcaggaaagttggagaagatgtttaagtttctttccaacattagggttctgtgattacattaggaccctggataaggtttagagcaagtttaaattacttaagtacaaagcacctctaaaaatggaatatcttcaagtgaattagattttctttccaatctaatctcctcttccaagttagtcagaatctgaactttgtatctaaatttctaagccttgatatatggagacatttagaaaaaaatgaaactcaaagagaaacaaactgtgacagcaagcataagaatagtaacacaaaccaattatcctagagcttaatagtttctcataacttcttaggctttcttagaagtgttcatttataggctgggcgcagtggctcatgcctgtaatcccagcactttgggaggctgaggagggcggatcacgaggtcaggagttcgagaccagcctgaccaacatggtgaaaccctgtctctattaaaaatacaaaaattagccaggcgtggtggcgtgtgcctataatcccagctactcaggaggctgaggcaggagaatcgcttgaaccgaggaggcagaggttgcagtgagccaagatcagaccaccgcaccgcaccccagcctgggcgacagagtgagactctgtctcaaaaaaaaaaaaaaaaaaaaaaagaagtgttcatttacatagcttggttaaaggttttgggtaccatggtagaaatgataaggattgcatgtgctatttgattgctttttttcttgccttaatcaaagccataacccctacttacctttgaactttgttttttcgtttgttttgcagcgaaaacggaaacagagcacccaagatgaagatgctgttagcctttgcagtctcgacataagtgtaagtatagtcctttcttcccccactggcaccgagagcatctctcttctccgaaggttatttgttaataatatgctgtgtgcttgaagtgggcttccaggatctgactatggaagttgtgacctgggggaaattttttttaactgaaaaacattttatttcactggagaaaactgtgtggccaacttaaacttccaagctaagttgtttattgcctgtgtcttttctctcataaaatgaattatgaactcagtgcatctgggtagaatctagataaataccagtgtactcttttagaggctggttccagaagatggaacagatgtttgtccccctttgggggaaagttagtggcttggcccagctcaggcagccggatggcccaaaggccagaataagactccagaagcatagtggagtgagtggctttggatcagcagatcttagtttgaatcaagattctgtacttaccatctgtgtgacacctttccttaccagtttcctcatctggaaaataggaatgaaaagacttaacctgacaaaatttgggagggggtcaaataaaacaataaaagtgagaatattaaacacattgcctgtacatactgggcacccaccaaatatttgcctcattttttttttctttttaaatcagaagtttgtagaagatgctcaagtgtcttggtagttgactattggtgatgatcaaggtggaaaagcttccttggctttgtttcagaacatgtccttggatacttaatttcatagctttctttgtgtggccaccgtgtctccccactgatgcaattgggaagcctaccttggcctctgatgccctcattatcctggggcttgggggtggagtaggaattcaggccctccctgggctccccttgtcagttcatcatctgcacatccctggggtttaaccactgtgttctgtggatccgtctaacattaggccgtgctcgctctcctctgtggagaccatgaaagctactcttatgagatgagaagccttccatgctaggaataaagaactgagtcatggttctggctctacctataattaacagtgtaccttggacgagtcacttcctttctctgaacttctgtttcttcttttgttaaaaaagaaaaagaaaaaatgtttgggatcagcccttctaaaaccattgtgaaaaggaaactcattagatatggattgttaggtactcaactgataacattatttaccaatgtgaacaatttttttttagctatttttaattactgcagagttttctgtgatgcaaccagccatgatggagcgagcttgaactggctctaattaatgtacttgagcgtctgttttaccatgtggtgtttgtttgttccaatctttagaccctcagattgatggagttgggccagtttactaagttgccgtggtgaacaggacaaaaagatgatgttcctttgggttttactttactcattgaatattttgttattgacaagtgaagtctatggaatttctcttagcagcaagatttttttgtgtgtttgaatctttttaattttatggaagtttacttttagaatttaaagattttcagaatttaaagactgtcagaatttacagagcccttagccaccatgtatgtattccagtcccctcactttgcaaataaagaagtggaagccctggaggtgtaatgactcaggcaagacttcaatccaggtcacttctaagattatgccttgtcttacattttcccccaagtatatattgatatccatttttcaggaaagcatgtctctagatgctttctaatcgaagaaccactaacattgtattaaaggactatttacaattatgaattgtgatttgatttttgtcttgtttgtcatcaatggccttgacttcccatcaaggtcacaagactgtggataatttggcttcttttctccttgtgcagctacggatgatatttccttttttcttaaccatctcatatgttatgttttatcacattaaagagacttgtatagaagataaatctaccccattaccaccaacatggccgatccctatgcttagggactcagctttggacagactcatttctgatttacctggcatttttcctgaatcttggcaaacagggctgagtttccaccatttattgccacatagtattataataattgcagaagttggaagaattctagaagctgttggaggaacatgaaaactgctgttctgcagattccgctgaccattacagtcatatggagatgacagagggtgtgacagatctagatgtggccatggagggaatgtgactaaatttaagtaactttctcccagtaggcactcaggagagatgagttgaatggaactaaatggtagatagagccacacaggagaagatgttttgccataaaggcaacaatggtgaaatgaatatctgaatccaataaattaattgctctaataagtaaatggcctctgtgggctactcaaaggaactttatctttgtgcatttaaatgatgatatctaatagagtcactgtccctgagctaactggcagtattactgaagagttgtttttggactgtttctatgtgtagtggaaagtatctttaaaaaaaaaaaaaggtgggtcccaatggatgactcataccagaggatgcgagggtttgggaaagtaatatgagtaactctcaatttttattccatttaataagttgtaagacattcgccagatgtgtgctttgaacaagaaattgcagatgaggggacaggtctttggagaccatattcaagttttcattgagtcccagcccaatgctagatacacagtagattcttgataaatattgttgatgggttaaaaaacaaaacagtgaactcgcctaatgtatacctcttttaaagaaatgtatctgggacttaaagttgagaaatattaacacagactatgtccccctttgattaaaaagtaagtgccctatagcagtggtccccaacctttttgacaccaggggccggtttcgtggaagacagttttccactgaccgggtggggtaggggatggtttcaggatgattcaagcactttacatttattgtgtactttatttctattattattacattgtaatacataatgaaataattacacaactcatgataatgtagaatcagtgggagtcctgagcttgccttcctgcaactacacagtcccatctgggggtaacgatagtgacagatcatcaggcattagaatctcacaaggagccaaaacctagatcccttgcatgtgcagttcacaatagggtgtgtgctcctatgagaatctaaagtctccaccgctgatctgacaggaggtggaactcaggcggtaatgagaaagatggagagtggctataaatacagatgaaactttgcttgcctgccggccactcacctgttactgtgcagcctgattccgtggccctatagaatgtttatttgttatcatcactcagacacccttcaggatgactgacgttattcttacagaacagggatcctcgattgtttggggggatgcatcacttaactctttccggaatctgttgatagcacaggaaattttacaaaattgatgtgtgatttcaggggatttatggatcccagccaagacccctgttaagagtttctcttacagaggaaactggaagggtcttaaagctcggtgatgggtgacgtatctccaaataattgttttctgaccctcaactcccagcacttggtggaaaatgaattctgactggagagtcaatgctagttgatgatataatcggtcactattttttcccaccgcctcacccaatcccctgactgggcccccaacttcctggtgggttagaacacaaactatttctgagggaaaataaaaagcaacgtacacttttgagagcaatctgccgagtggagaaggctcccagcagccacctacgaatctcccctcacgtcagaggatatgagtaggatggtttcagggagcttgcctcccccacagcacttttctagtttaaattctaatgggcgagagacgctgtagctcatgtcaccacaggaaaggcccttggtgccagagctcctgctgcagagcacagctcagcaccagacattctttcttataaaacaaatgagctctgggtggaaataaaaatagcctccaatgataaagtaatgtaaaaataaaaaggaatatacgttctctagaaaaactggaaaatgtgaacaatagtttgacaatcccacctcaaagccatagctacattttgatgtatttccttcctgtcattatatacaaacctttaattttttttcattatgaaatatttcagacatacaaatggtataaagataatagaaaaccccatgtagctaccaatgcaactgaagaaatacgccctaaacagtgatgccaaagacccttgcaaaaacctttgctttgcggagtttgatgtttatttctgctttgcatgtccataaatttgctatggacatgtatccctaaagagcatatatatttttaaccagcttttaacatttatataagcatacacagtttttaaaaattgagatcgggcaggcatagtgggcctataatcccagcactttgggaggccgaggcgagaggatcacttgagcccagaagttcgagaccagtctgggcaacacagggagatcctgtttctacaaaaaaaataaaaaattagccaggtatggtgatgcatggctgtagtcgccgctacttgggaagctgaagtgggaggatcgattgagcctgggaggttgctgcagtgagctgtgattgtgctgctgcactccaggctgggtgacagagtaagaccctatctcaaaaaaaaaaaaaaaaggattatagtacaaattaatttattcatgaatttttcacttactatattatgaacgtgtcatattatgaaatattctgtaagaatattatttttaataacgatagagtactttatcaaatgtgttcatttaaatctattccaccaaccctttactgggtatttagataagttccaacttttcgctattataactaatgctgatgggcatccaggaacatgtttgtgtaatctcttttatcagttggataaagtttgagatatgaaattcctggctaaaagagtatgaatatttttacaatctctgaataggtttatcctctgcttctggcagtgaagtggaaatgaactttagagctgttgagtatcttgtgtggaatctcacaggcatgggagattgttttcagctttccctggcccttctctcttcccactgcatgaccagtcccttgctaagactatgacttgagatgggacatttacttcccccctccacccatcctgccaccctttaggaaagcccctgacagggcccacacgcctctcttgactggtggggatggagctggtggcgatggagctggtggtggggcatcttttctatgctggtggggctttcccatgggagcacatggctggaccatcacttggagtgggataggattgggattcacattcttcctgcatttttttttttgttttgctgatttgcaaccatcaagatgagccctgtttaatctcctggcaaggaatacttgggaagaatgtgctcacagctctcagtgcttttgagatccatgtattgttgttgttacaaccactcttctgtcccctttgagaaatctacacagaaatccacatggcagatgtttgaatctcaccccttccctctcttcctaagttgaggaagagctgagctatggtctgccaacagtggaggaggctcttctggagctcactaacatgactgcaagaccctcattgaggccgagcagtattcagcgtctctgtggcctcctcactggcctccctacctctttgtagtctgccctccatgtatcagccagggacatctttccaagtgtaaattttatcttgtcatgcctgcctctaggttcccagactgtgcttccaaagccttgcaccgtctggcccctgcccacctcctgaaccactcccttccaccttttacacatgcaggccaaccatgctggttttctttcaatttctccaactcctcatgctccatcttgtccctgggcctctgcacatactattctcccatttgtggaatgcatgctgtttcttctccccgcatttcacctggctcatgcccccttacccttcatatctagctctcctctaagaagctcccagacttcccaggattcctttatacctctccctccagccattccctaccaccaccaccaccccactctcacaagcttatgttgccatcctagcctttatcacccagcattgtgatgcctgcttccatttcaccttcagaggcaggctgtgacccttcacagggagggctgtgttccactctttttacatccctagcacctggcacaaggccttgcccgtagcaggtgctgaataaacattgaatgaaggtatgcttgaagtttcttctattgtatgaataattgaaagaaagggacagataaatgtttaaaaagtcagtagcatttcaaaaaaaagggggcttgggatagaatttttaaaatttaaggcagaagatgagatgaacatatttatctcagatgtgtgatgccaggaagtcttttggacttcaatcactcgggtacagaaggctgttcctgatttttgttatagtatatggtatagttgtgatctgtttgcaagctcaccaatagcctgtgaattccctcaaagcaaatacatagtgtccatcatagttgctccataaatatgtctaggatgggtgaatgaatgaatgaatgagtctcagattgagttacttacatgggtgtttctgagatgctcagtattattcttactagcatggttttcctgggattaatattaatcagaatttcagggaggaagggaccaaattgctatagagtccttccttatgcagcatggctgtgagagactcattagatacatagcaacaagagcagctactgttgatttagtgctactatgtgatgggcactgtgctactatacattttattatttaatcctcatattacccctttagagatgaggcaaacggagtggatagaagttataaacttgcctgaggccttacagctagcaaataccatagcttttggatctgagtcgcaggcctgtcctcccaatcacagtgctaattatagttattatattagtaaatagcatactatagcaggctaatatgaattaagcattcatatgctctgtgctttccaaatacctcattaaattctcacagtggtacggtcctgtgacaatggaatgtatcataccctttttgcagatgaggtaactgagagccagagagataaacaattagttcaaagtcacagtatgtaaatttaagcccaggatggttcgattccacagcctccccacaccacctccaggacaggagaggagaagaaagcttttggctccctggctttcagtgctgaatgatgtttagtgcttttagctggtcttattggcaaagttgctttgaggtttatgacaggcatccccaaatttccattaactgtgcactccagttatttatcctgtcatgtgcatgcccaaagcacaagcattgatatagaagagggggaaaaaagctttcctgtctcagttaagctaaatggtgtttcattgccaggatatgttaaaccaggcacggaatagcagcgagatttattttatctctgctcagcagagtccagataattaaaaaagataccatttctgtggttttgtttctcttggtctgttctggaacttgctaactggggagattagcctcgccctggccagcatggggccttgatgaattatgtgggagaggttaataatgctcttatcaccgaggagaccaggcctctagctgagattgggtcttcattaacacatgcttatatttaacctgttggcattttttgtttgtttgttttgggtttatggtctatttttgctgtctgtgaaattgtttgggcctaaggtagcagataccctatgtttggtccaatggttgttctgacgctgccgcctctgatggcaaatttacttgtgctttgagcgttcacatagacatattgcatcttgcctttggcctaatagattaggtggtagataatagttgctgtgatcttttatctttgacacacttcttgaaaagcacagtgacaaagaaattccaaggagtttcaggacacactctcggatatgaatgatataacaaagtgtaagtcagcatattcaccttttcccattccccttcaaagtgaccttgatggggcccttgttaaatgaaggtgcttgtgccccagaacacctgtttgttgggatttatcaccagaattacaaacttcaggaggttagagagtgaacatcattctgtacctcagtttcctcacctgtaaaacagaaatcgtaacaatgccctgccttaaagttgtaaggctaaaaatgagttaattcatgccaggtgaggtggctcacacctataatcccaaaactttgggagactcaggctggaggattgcttgagcccaggagttccagaacagcctgggcaatatagtgagacctcgtctctacaaaataatttatgtagccattaaaaaagaatgagatcatgtcctttgcagggacatggatggggccattatctttagcaaactaacgcacgaacagacaaccaaatacatatgttctcccttataagtgggagctaaatgatgagaacacatggacacatagaggggaacaacacacacttgggccctatcagagagtggagcgggggagaagggaggagggagaagatcaggaaaaacaactaatgggtactaggcttaatatttgggtgatgaaataatctctacaacaaacccccatgacacatgtttacctatgcaacaaacctgacatataagcctgaacttaaaagttaaaaaaaaaaaaaacaaacatagcacaaaagtaaaacttgtttgaggttttaaaaaataataaatttaaaacttagctgagtgtggtggcatgcacctgtagtcctagctacttgggaggctgaggtgggaggatcacctgagcccaggaggcagagactgcagtgagctgagatcatgccactgcactccagcctaggtgtcagagcaacatcctgtcttcatttaaaaacaaacaaataataaaataaaaagttaatttatgtaaagtacttagtacctggcctatcgtgagcacaaaaaaataactactgttgctattgattttattatacaaaatcaactttattgttaagttcaagggtctttgttattaatacaagtattccataaatagaattgatcatgtaattttaaaaagcagtatatgaggccaggcacagtggcttacgcctataatcccaacacgttaggaggctgaggcgggtgaactacaagatcaggagttcgagaccagcctggccaacatggtgaaactctgtctttactaaaaatacaaaaattagctgggcttgggggtgcatgcctgcaatcccagatactcgggaggctgaggcaggagagtcgcttgaaccagggagtgggaggtcacagtgagccaagatcgtgccactgcactccagcctggcaacacagcaagactccatctcaaaaaaaaaaaaaaaagtatatgaaaagaggtatataaggatttttattacagcattgtttatgatagctaaaactggaaacagcatgaatatccgaattatatagacttgtaaatgcattcagaatataagtgtaaaatgcagttacagaacacatgctatatacgttatgctcctatatgtttatatacatttatctatataaaggaagaagtatggaagagcatacactgtattgtggatagtccttagattgggagaatggaattgtggggatgaggagattaagttgtaaggattcctgagctttggtattttgcaaaacctatgaacacccctttccccacaaagactgtttatatgtgcccaaagcaaaattcacaaggttatagcaaaccagttatgttgaaatatagttataaaaatatttaaaaacaaatttgtggttagagcatgtgcttcttaatgcattaagtaacatctggcaacaagtctaataactaatacaccttcagtgatatgataagaataagaataaatgatattttgaaatacctacaccaactacactgtcatttgaaaatatagtgatttctgtgttgacagtcacaggtctgagaacgcttctgtgatttgtagcctccattcatactggaaagaaatactaaatttcaatcattggtgaaaataaagatgtatctcatttttccatctaagcttgaagatgccctgaattttattcagtgaactcttgagggtctgagaattctagattatgaatccctgcttaagacactcagtctgttatgataagcttttctattatattacatttgtaatacaaatgactgcaaaaaatataagaataatagattttgacctgttggtatgtgagattattagtgttagtaaaggtaagaatgtaaaacattatataaaagttgtttttaggaagaccatgtaatagtcatgaagtcagttctcagcacttggtgtttagatttttccttgagaacagcttagcttactggtccttcacattgctttttttaacctttgttttttgtttttgtttttagtttttagttttttaatgcttcatatgcccatctacacattgctttttgaaacagataacttgagccacctcagtattttagtagaaaatcttttctgcttctactgttgaaaaaataatttggggatagaaaaatattttattttttagagatgaatatggaagtgtttaggggtaaaatgtcatatctttcatttactgtcaaattctttagcataaaatataaagtgaatattttaaagagaaaaacaattttatttttaattatacaagtaacattgtatacattctcatcatttaaaaatcaaacagcagagatagagctaacagtgactctaccatgccccagtcccacttacctccttaggtgtaataatcagtttactgtctccttccagatatttagatagagttagatagatagataaatagatatgtaaaaattagtttgtgatggctttttaaagacatgttgtcattgtttttattttaattttcaacttgcttttttcccttttaaatagattttatttatttattgattgctgtgagaagagatagtatattgaaagctattcagttacagaatagggcatcctccgaaagcaaaaggaggaatgccttgtctttttcttctatatagggtagactttactttttttttttagagcagttttagattcacagcaaaattaggcagaaagtacagagcattcccatatgcccccaagtcgatgtatacatagtctcccccattatcaacagtttccatcagagtggcacatttttcacaagtgatgaacctccattgacacatcatctttcaaccaaagtttatagtttacattagagttcacttgtggttttgtacattccatgggtttgtacaaaagtgtaatcacacatatccaccattatggtttcatacagaatgctttcactgccctgaaaatcctctgttccacctattcatctccccttcttcactaacctctggcaatcactgatctctttactctctccatacttttgcctttttcagaatgccatatagttggaaggatacagtatatagccttttcagattgacttctttcacttagtaatatgcatttatggtttttccatgtcttttcatgacttggtaattcgctacttttttatcactgaaaaatattttattgtatagatgtaccacagtttgtttatccattaatttagtgtaagctgtatcttattcttttaaactgctgcttattattgcataaaacagatgggtatagtttatttttaatgcagttctccactgagaaacatttttgttgtgtccaatacttcccaataacaaacaatgactatctctacaccccagagcaagtagtaaggtacacttcatttaaataacagtgtttgtaactcttaaacttatatatccagaagtatattccttctatgtcatgcataatttaaaatatatatatatataaattgtagttgtgaatttaaagaatgttatattgacaagttttacctttcaactgccttaaaatgtattcagtttatcattaatactattttgactgagatttttgctgtaagaagtcactagaaagtaatacttttgtttctgattttttttccaggctggagcctgggtctgtccacctgaaaattatgtaaataatactggttaggaagtttcatctgggcttccatgcccagctaattgagtttacccctaaatgatttatgtaattatatcaagcctcatctttgatctggttatatattcctggtttcaattgcagaagctgtttgtctgtttttcttacttttctcaattgtgtctgatacctgttctctgtgaagagaaggagatatgttgacttttgcccttgatcttaccatgcatagaattttacattacttgacggacactgaaattcttgggtaacttcagagaaatgttaaaagaatgaagtgaccaggagaattctcgtggtttgtgtgtcttcctctaccctgctgtttaacttaccctgcgatgtgctgatcattttacggagagagctgactcagtatgagcaggtggtttctctataagcataacattcatgactgatattgaaggtgaaacatttgaaacgaaatcacgggcttatcttcagtggtcacaatgccaggtttggattaactccttagcaatcctgcagggaaacctgaatgggtttattcccaacagactgaccttttccccttataatactgtaaatggaacttttttttttttaactcctcacgtacctcaaaatatcaatttccaaaacaggaatcctctactcagcactaaaatcaataaatctaaagagcttctttgtctttatttggcagaggaaagggacgattttgctggtcagctctatataaattccattgaagaaaatattgttttagaattaatgagttaatttgttcattctttagtgcattcactcagcgcgtccactaattcaatcaactggcatttactgagctctgccatacatcatacacgggccactgaaagaagctaaacttaagactcattcatctgcagacaagtgggggttgcactcttgcttctgaaacaagttaaccaagcacagagaaggcgcatctaagctgtacccatggttgtttttctcctttttccaaaggatcaattctgactcttggttggttttgaaagaaattttactatggattcttttctggtaatatttttctctcttagaatatccttgaaactggctgggcgcagtggctcatgcctgtaatcccagcacttttggaggctgaggcaggcagatcacctgaggccaggagttcgagaccagcctggccaacatggtgaaaccccgtctgtactaaaaatataaaaattagccggatgtggtggcacacgcctgtactcccagctacttgggaggatgaggcaggagacttgcttgaacccagggtgggtggaggctgcagtgagccaagatcgcaccacactgcactccagcctgggtgacagagcgagactctgtctcgaaaaaaaaaaaaacaaacaaaaaaagaatatccttgaaattaacttatttgcttttagctggttaactcaaaggttcagtcgggaaggtgcttcactttattttatgtaaaagccaaccttgagaaattatactttgtggtgggctttgcatctgtgctctccttacagttaggcattaggctctagaagcattgagtttcaaagaaacatcactagggttttttacatctagagaggacctttcattttgttcatgtagagtggttgtggggtactgttccattttagggagaacgaggttgtttgaaatgagccacttctgtacattgttattagtagaagtatttaacaaaatgcctttgctattgattttattctgtaaagtttgattcatatccaagcagatgtgatcaagagtgtgatggtttgataaatagagccagaatcacaccattatcacttcctccagatggtcatgccctcttcatttccacagtggctggatgtctagggcctccaacctggtcttcctcattttccttcagttctctgctcaaatattcttagacttcctctgtcccactatgtgaaatagcatttccaggccaggcgcggtagcttacacttgtaattccagcactttgggaggctgaggcgggaggattgcttgagctcaggagctcgagaccaacctgggcaacacgacgaaaccctgtctctatgaaaaatataaaaattatccaggcatggtggtgtgcctgtggtcctggctacttgggaggctgaagcaggaggactgcttgagcccaggaggttaaggctgcagtgagccatgatttctccactgtactccagcttgggtgacagagcaagaccttgtctcaaaaaaataaataaataaataaataaatagcattttaactcctcggcactcccctctcttcttatctgactttattttttcttcatagcctttatcatcacctgccacattatgtattttttaaatttattatatttgtctcttcacagtagaatataatttttattttgttgtttttgccatattatcaacatctggggcagtgtctggcattgtgtgtccgataaacatttgttggataaatgattgagtggctacttggttgttcatatgttacatgctgtctttggaaggttactgtaaacatgaactggatttatcttggcaacattttaagaacatgtcttcctctacatacatatttgccttccctcatttttaaagaaaaccagtacaacaaaaggaaaatcaaggtctacctgaagagaccttgtgatatacaaagcaagataggtaaaaataatgccaggcttttatgagctaataaataagtcaggctaaagacaagaggatagaaggaatgtgaaatatacacatgatttcatatggatgtggaattgttaacaccagtgctacacttaactcagttggtatggaaagatctctcaggatagtggtaggaatggaaattttctattaaaatgaaaaacatcccactgttgcagtctcaattcctttccacttaacgggtgtttattgagtgcacaacactatgcctggtgcccaccatgtggttacagaatgaaagatgcttgtaaggagttatcaatcaacatacattgcttgtttatccaaacttgtggaaaggagtatattctagatgatatagaaatgacagagtaccagtacatcttttatatctcactcagaatatgttctagctgttacattgaaatatgagtaagccttgccgcttgagcattctcaatattgtgaaaaaaatacaggagccactttgaggagacccagcattgttggaggtaggaatgtgccaggttctccctgctggacaaggtggaatgcttccctgctttctgtccagggtgagtggagcagcctcccctaggaacatgacgcagggcaccggtcatactaacccaccatctttagtctcccttttaccctgtgtgtttagcttgttttactcggaaaaggtaaataaggttttggttgaaaataccttttattgattataagcttccaagacagggaaaaactaaacaggaggtgctgaatggacctgaaaatggacctgatgatctactcagcttaatcatgctaataaagaaaggtggggtttgttttgttttgttttgtgttttgagacaggatctcactctgccacacaggctggagtacaatggcatgatcacagctcacctcagccttgaccttctgggctcaagcaatcctcctgcctcagccttctgagtagctgggaccacaggtgcaggccaccacacttggctaatttatttcatttttttttttcatttgcagataacccaaaaggcaaatgattcacctacggctaacagaggtgattgcattttgaataggatgtctgtcttactttgggctgctataacaaaataccatagcctgggtgggttataaacaacagaaattgatttctcacagttttgaaggctaggagtgtgagattaggattccagttctggtgagggtcctcttctgggttgtagagtgtgctgctctcattacctacacacttcccaagagccccacctcccaataccattacattaagggtagaatttcaacatatgaatttcagagggacacaaatattctgttcataacaatgtccaagctcacagatcacacctcactagccacatgcctaaatgtcattaaaggcacagtaatttactaacttccatagaggagagaaaaaccttttaaaaacatattttttaacatggtttggatacagtgagttttcacaaatttgaatattatgtgtaactgaaaaacattggctttaaaaaattataaattatcttcctttacatttgatatttcatgtggttttgccttcacatagaaaagaaggtttcatcataagcacgtttctgatgtgcatttctcatagctgttgacaacttgctgtgttttgctctgctctgtttgccgtagcggaatcattctcctttctaaccaatctgtgcgctgtggtagcatgttctcttctaggttgctgtttaagttttgttatgtgccttgatgatgttccctctctgtaatacaaccagaaattgaggctgcgacttcatttaaattattgtcaggttgtggaaataggcctgccatgtgctcgccatccccacagggaagtggaggagtgtctgaaatgagaaatgaaccagcttctggcaactcatgaagaatgtgtctggaaatagggatggtatgaagggagggttattgctgtgttttatataataaagggaatgattaatgggctcccagtataccacagtaaagaacaaaattgcctttgggaccttggaggctttgtttagtttgggggcttatgtttgactgaaggtctcatgttcttgacaaaagggtgacatttgctgagtaaactttgaaattttattatatgtaatataataactgaagagggggctatcaagacactctctgaggaaggtctatgttaagtggcattgatcattgcatagcttcctgatttacaggtgacttggaagatcattctaaactgtaaggtccttgaggaccttacatgtattcttttattctttcctcattctttcattgatattcacattgactgagcatctcctatagtcacgctgtgttggttggtggtaagagaataacatggtgagcaaaccaggcaaggtgctggtgacttacagtccaattatggaggcagatgttaataatcaccgtaacaagaatataataacaaatgaaaacaaaagctttgaagaaaagagagacatgttgctgttagggcatttaaccagggagcttgacctagtcatgaaaggccaaggaagccttttctggggaagtgaaagctgaaagaaggtaaggtgttaaccaggttaaagaggagagtgaaagagctgtgaccttgggaacagcatgtgcaagggccctgtggcaggatggaacatgctgctttgaaggcaaatgcagctggtaggtggtagatggtgagactggagtagttgacaggaaccagaccacacatagcttcaaaggctatgcccaagatttgcatctttatactaagaacagtatggagtcactaggaaggggatgtgttaggcaggggtgtcatttgtgctttcattcctctggttgattatgaaaccaagggtagatgtggatgatgagtagaaagctgccttagttttctgatgagagatggtggtgtcctggcttagctgtctgtagggcagacaagtttgagagacatatatggctatgtatctttactgcctggtcttgagtgggcacttagtaaatgtttcccttcttggcatgcgttagaagatgtgggttttattttaccttctgtcattgtatagctatcagaccttgtatgtattgcttcacctctctgggtctcagtttccacaaatataaaataatatagatgaattgtgtcctttccagtgccaaattccctaggttcatgatgttttgagtgctatcggtttttcaggcagaggattaaaaggtaaatgtgggccgggtgtggtggctcacacctgtaatcccagcactttgggaggctgaggcaggtgggtcacttgaggccaggagttcaagaccagcctggccaacatggtgaaaccctgtctctactaaaaaatacaaaaatggccaggtgtggtggctcacacctataatcccagtgctttgggaggccaaggcgggtggattgcttgaggtcatgagttcaagaccagcctggccaacatggcaaaaccccatctctagtaaaaatatgaaaattagccgggcatggtggcacacacctgtaatcccagctcctccggaggctgaggtgagaggatcgcttgaacctgggatttagaggttgcagtgagccaagattgcaccactgcactccagcctgggcgacgcagtgagacaatgtctcaaaaaaaaaaaaaattagctgggtgtggtggcacacacctgaatcccagctactcggaaggctgaggcatgagaactgcttcaacatgggaggcggaggttatagtgtgccgagatcgcgccactgcactccagcctgggcaacagagtgagactctgtctcaaaaaaaaaaaagaaaaaggtaaatgtgttggtttaataataggagatcagtatctgagtttgcttacacaaccatctttcttcaagtccttctttctaactccttggatgttagaagacatggttagggggcaccactgtatacacttaacatttcatttatggcaaacaagaccggtctttaattaggttgcctttttaaagcacaccagatgtgagtcactagaaaaacaaaaccaaactcttcaaatgagtaggagtgaatgtaagaattctaatgaatcagcccagggtacacagcctaaatgaagtggaaaaagctaggggaggtttgctaagggggtgcatttgactcttgcgtcctataagttgggaatcctttgtcagcagttgtaacaggcatgctcagctgcaaccacaaacattttccaatggaggagtgttgatagcattttcattgaccttaaaaaaataaaaaatctaatggcagggtcaaggggaaggcaagaggtgtaatttgctggtcagtctcagtcagccgcctgcagcagcctcgtcctgtgtgagactttaagggaatgcacattggcatgggggttcccaggcggaggggggcccagattcagccttggcctcatagaggagcaacaaattgaaacaagagcagccctgttgaccttcagactgcaaatggactgctttctttgtgccatgtcgcccagtgaaataatcctgataaaagctttttgtttagccattggaacaagagcagggattcagggaaagagtatttccccacccttttaaaaaatgttttggtgttggctgttcgacagacctgggttctgctgaaccagtaggcattggagtagggggatttgtggagtagggaggttcttggttggttctgaggtcatctgcaaggtttttgttgcatctctcacacttacagaagggcagtctgaccctgctccccctcccactcccctcaccctgcctttacctccataccattccttttaaagtcccaaaaggtgggtgggtggggagggtcaggggcttactctttcatttgctccttcattttaagctgtggattagcatctatgtttttgcctttgtagcagattggccagagataaccccattattttagtgcatcctgttgctgtgtataggttttagggatcatttgggaactattataggttatagaccagtggaagcagagctgctgcttattagattgaagacatttggtagagagagagttaaaaaaaaaaaaaaaaaccaacaggttagaaggcttcattcacttttagaagagagaaaggaggaagagtctgaggtacattctatagctttgtgggaagaggggatgcttccggcaggatctttgggatttggcagtggcagactctactctttgctccctgcaaggccctgaacagcctcctgagggcccagcagatccaggcctttccgaccccagccctcagtccccaggcccttgtacattttatactcaggttccatttaagaagtgggagatccatagccccttctgtaaatgtatcaagagagaaaatcccgggctcagggaactttgaagcctctgctttagccactgcccccaagcctccattgggctcaaatttccttgcttttcctgctaggaagactgtttcttttgcatgctttcacctgggcaatctaggttttaaattttgagcatttgaggagcttgtgttggttttctaccaaacctagatgatagattaggttccagttccttccagccccaagctttctagacaatctaaggccatcctttgacttcttcaaagttagatggcccctaagactcctccatgtcccaccccagtctgaagttgatggccaaagtcccaggcagaaggcaccaaaagggaagataccaccctggcactgaccaccactcactggtgacaggcgcttcatactgcagcagcccctctgcctacataacaagcctgagaggtgcttatcatcacacttgtcttacaggaagctaaagccgacatggtttcttttctccaagactttgcagatttgcacaggggcctctcctagccatgaatctcctctcctttccctgcagcagggggctggaggtgctttatttctgccgcattgccttttcattgtgggcctagagaccactcataaaggcagatcttctttgttctttagtagccatgattcaagagaagccctggtattgctcttccttacagctgaccattgccagcttctgagcacgaaatgaacttggcacgtattaatcacgtcatcccccaccaaccattaggcagatctttttagaaacataaatcagattacactccttagtcaaactctccagtaacttccaggggcttccatggggtctctaaacttggattggaaaaaaaattacatctgtattttcactaacctccaactgaaatttacatttcctttctataaatgaggacaaaaaaccacagcaatatcagcagttacttgtgactttgtcaccaaaagaacccactgtgattttctcttcacattatactggttacatatatctcagaatattttgtatgcccatttgattgtaaaatgacagtagtggttagatctgccaccatatctgttatttaaacaggctagacacagtggctcacactttgggaggctgaggtggaaggactgcttgaggccaggagctagagaccagcctgggcaacatagtaagaccccatctctacaaaaaaattgtaaaatcagctggccatggttgcacacacctgtagtctcagcacactactcaggaagctaaggcaggaggatcacgtgagcccaggaatttgaggctgcagtgagccatgatcgtaccactacactccatcctgggtgacagagtgagactctgtctctaaaaaataaaaataaaaaataaatatgaacaaagaagttatttaataaattagatttttatgttgcaaattatattttatttttaattaaattgtttgtttatattaatttttatctatctatcgatctatctatctatctatctatctatctctcttgagaccaggttatgagactggctaatttttgtatttttaatagagacagggtttcgccatgttacccaggctggtctggaactcctgagctcaggcaatccacccacctcagcctcccaaaatgctgggattacaggtgtgtgaaccatcatgcccagctcaatgtaatgagttttcttaatcagaagtgtaccaacggggctgggtgtagtggctcatgcctgtaaccccagcactttgggagaccgaggtgggcagatcccttgaggtcaggagttcgagaccagcctggccaacatggcaaaacctgtctctaacttaaaaaaaaaaaaaaaattagcctggtgtggtggtttgtgcctgtagtcccagctactcgggaggctgagatgggagaatcgctttagcctgggaggtgaaagttgcagggagccgagatctctgctccactgcactccagcctgggtgacagagtgagaccctgtctcaaaaaaaaaaaaggtgtaccaagggggtggcaagagggatgtgggctcagtctgccctggatttaggcaacaaggtggtgtgcttttattatttaaaaacaataatacaggctgagcacggtggctcctgcctgtgatcccagcactttgggaggccgaggtaggcggatcacgaggtcaggagatcgagaccatcctggctaacacggtgaaaccctgtctctactaaaaaaatacaaaaaattagccgagcctggtggtgggcgcctgtagtcccagctactcgggaggctgaggcaggagattggcgtgaacccgggaggcagagcttgcagtgagccgagatcacaccgctacactccatccgtctcaaaaacaaaacaaaacaataatacagtcaacttaaagtctattcttctatgatcactataagctggtaactctaaacaatgtccatgataaaaatactcttccctggcgggataaatcactcccataatctccctgcccccacagtcccatccttggtctttcataatcctacatttttttgtttttgtcttcgccatttaaaaacattttgcaagcagaggtccatagggttcagcaggctgcctaggaagtatataacacagaaacaagtaagaatccctgacttaaaataaaatgtagatccactttccttggcctatagggcccaaatgtctaggctcctgcccacctgccaacctcatttccctccaccctctccatctcttggcaccttctaataaaccagaatttattgatgctactgaaacattcaaggtttattctttcctttcttattcccccagatatgactcccaccttgttctgatctcagctttcaatgtcacctccttgcaaaggccattcctggtaactcaatttaaagcaggccttgccctccccgcaagtgctttctgtgctgttgttactatctaaaccatctgttgttcttgttgactgtcttcctcccctcaccagaaggtaaacccacaagcacagacagggactaccattgtcaattgttataatctctagcatcttggcaggcactggcaggggctcagtatcctcagagctgagtttgcttctcttgaactttctgtggtagcagccagttaatatatatttaattactaggcttaaacccattaaaattcctacaaaacctggaaaaatgtactcagctataaaaatgcatgtggatacagtgaatggatagtgcaaccattacagtgaaggaaagaagaagcctttttttttttttttttttttgagacagggtcttgctctgtttcccaggctggagtgcagtggtgcaaacatggctcactgcagcctccacctcccaggctcaagcgatcctcctgcctcagcctcctgagtagccgggactacagacatgcaccaccatgcctggctaatttttgtatttttttatagagatggggttccaccatgttgcctaggctagtcttaaactcctgggctcaagcagtctgccacctcagcctcccaaagtgctacgattacaggcatgagctgctaaaccaagaaactttcaaaatgtaatttgtaggtcagaaaaatggtgccagaactggatgcagtggcttgcatctatagtcccagctatgcaaaggctaaagcataactgggcatagcttgaacccaggagtttgaggctgtagtgtgctacgattgtgcctgtgaatagccactgcactccagcctgggcaacatagtaagaggctgtttcctaaaaaagaaccaaagagcaaagaaactttttagagaaaaggaaaaggaaatggcaccagattcccccatctccccgcttctttggtgttatagccgtttggagaaagcaacaggaatcctgactcacagagccttagatagagatgctttgtatgtcacagaataaaaagtacagagttaggtcaatccctgattgactgactcaattactaaactatcaccaaacacacaagtcctttccatctccttaaactctttgtgctcttcaggctggtgtccctcatggttgcaagatggctgccagtagccactggggtgatatgtttcccttttccagcaaataagttcttccctttagtgtgattgggtacattaggtcacatgcttgtccctgggtcaataatagtcccaggaggaatgccatgaagattgactcagactctgccttggggatgaacggggtgaatagttgcggaaaataggagttccttaaagagggagaaagggaaatcaacgttaggaaggcaacccaccgtggccactgtagatgtggcttgttttaaaatcaaatttatttttgttttaattttgaggaataaccacttagaatagcttctgatgggaatgatcctaatctttttattttttcaaatatgtagggctttttttcttctagaaaaaaattttaaaaaattattgcctttatcttggctttgttatcagtcatgtgatctggcagctgaagaaatatggcccatggctgcagacttggatgcttatataacaggctttggtctccatagttagttttaaatggagagtgtgtgccagggatttggaaaagctctaatgtaaattttcaaagaaataacattgcttagaccttacttagattatgaagagtaagttggttcatcttgggaggcagagcaaagcctctaagcaagctctggaaagcctctagatttttttttttttaattccagttttattacagcagaagtgtcagccactatcttgatggatgctatgaagttaaaaaaaaaaaaaaaaaaacctctcaagatggaaaagaatttggctcactttaggaaaattctaaaacaagaggtataagcaaatgaagggctgtagaagggctgtagcagaggagggagggccccagagacagaggtcagggagaggggttgggacatggtgggtggtggggaagggggagggggacccaaggagaatcaagccatatctgtaaagaggatctgtattcatgaattaccggtgtaataaaacataaatgaaagacagtgtcagtttataagcaataaatagacaagtaaaattgcagtattagacttgatgacataagaatccttccatcccatgtcagcccttgaaagctctggagtaaaaggctagagaaagagcctggatttccaaaaatgttgactcactgtccttatagacagatactagacatagatcattttcttattttctttctctttatcctgttcctcttattatccctccgcttcctttttatccccgagttacgtgtattttatgtggcttggtatcttctgatggcgacaccccccaggactgactggttatggactcagattgtccagacccctaccagacatctcgtccaccactggccaggcccctggccccacatcttcctcctctgcggcagggccccctgctggtctgcaggctctctgctcctttgagagtaaaacaatgaaatgtcacaaccaggaaaagaaaagaagccctttgagccaagtagtggaattgaaaaatgacacttgtcttttctgggatattgttttagaagttaaatttcctttcattttagggttaagcgtaagtatttggaatgccttttctgacggtaactgtgtcatcatcatctgtacatctatgtcacaaatttgggagagctgtggttcagcatgacagtttttccttccactttagtgtcgtagttgtatgtagcagtcatttacagggggtaggagagtggagaaggagggaagacaggcagcccagagtacttttttttttttttttgagacagtctcactcttgcccaggctggagtgcagtggcgtaatctcggctcattgcaacctctgccccccaggttcaagcgattctcctgcctcagcctcccgaatagctgggattacaggcacatgccaccacgcccagctaatttttgtatttttagtagagaggggttttaccatgttggccaggctggtcttgaactcctgacctcaagtgatctgcctgcctcaaccttccaaagtgctaggattacaggcaggaaccaccacgcccagcccagactacttgtttttgcatcagtaaaggccatttattgctgccaaatgagtgttttgaaaagagttagcaaacgtgtatttgaattcctgctcttccactttttagatatgtggtcttgagaaaagacctccagataaaaatgggaacaacaataaatagtgcttgacaaccttcagtctttcctatctcaataaaaaccctttggtgactgcaggcacccctccctcctgcccctcacctctctccctcctctccacccacctcagcctggattcctccttttcccctcctctgaccttgttattgtactccatactattgtgttgaataagtgactcaactgccttggccaccaggtcttgccatggccatatctagtgactttttccactctgacctctgccatgtgctacataagattgactttctctctgtgactgcacactctcctgtttactgctcacatttctgaccactccatcttggattcctttgcagttaccccttcttgtgtccatcccttaattgggggtgtccctcagggtcctgacagaggcctttgggatagctgcttttgaagttctcccctaaacttcttacctttcctacctgccccccaacccccccacccctctaggtatttgcatccccccaaatagtacctatctgttgccaaagccagaagctggggtggcatcatggcctctttcctttaccttgtttcccaccaaatctcaacctgcctgccttctaaatatctccagagtcctccagttttcttcagcccagtgactctacctttcagaggctgcttagtctttggcctgcattcctgctgctaacttggagatctgcctgcctcctttctgtctctcaaatccattccccacactgaacccgaggcatcttcctaaaacacaagttgggttcccgcttcaccactttacatcctttgctgcttctccctgtttccttcagagaaagcctgaggataaatactcctccttaacgtggctttgagacccagcccctgcatgcttgtgtctttctccattgcactgctccttctccatatgccagctaaacagatctgggcttccttgacatagtcctttctaccctctggtctttctgcctggaatctttcttttctttcctttgtcctcaccctttttgtgcctaattgtttttttgttttgtttttttagatggagtctcgctctgtcacccaggctggagtgcagtggcgccatctcggctcactgtaagctctgcctctcgggttcacaccattctcctgcctcagcctccccagtagctgggactgcaggcgcctgccaccacacccggctagatttttctatttttagtagagacggggtttcaccgtgttagccaggacagtctcaatctcctgacctcgtgatccaccctcctcggcctcccaaaatgctgggattacaggcgtgagccactacgcctggccaattgtctttctatgtaacttctactgagagccctcccctgaccctcaaacagaggtgacccctccgaaggcttccataggagcccatgttcttacttggcgtgtaagtgcctgcaaagcctggcataactcttggcatgtagtatgtgcgtcacaaatactcaacaaaggaagggaaggaatgagcatccatggcttgtggaagaggtgttataaattttaaagcattcattaattttggttcttaacattgagcaacatagtctacaataaaaattgagccgggcatggtgactcacacttgtaatcccagcactttgggagactaaggcagtcagatcatcaggtcaggagttcgagaccagcctggccaatacagtgaaaccccgtctctactaaaaatacaaaaattagccaggcgtggtggcacatgcctgtaatcccagctacttgggaggctgaggcaggagaattgcttgaacccaggagacagaggttgcagtgagccgagatggtgccattgcactccaggctgggggacaagagctaaactccatctcaaaataataataaaaataataaataaaaattgagcaataactgttgagcagcaaagtagctcagttatatttttgagtgtggaagatgtgagcttccttctacacaatctctcgaccttttggctggtagacttttggcttgtcaccaccccagatttttctttaacaatgcatgtcctctgttctgttacctctgtaccccatgctcaggtactacaggagggtgctgaattgaaagaaataagaaacacagttcatcatatgtatagatttccatttttggatcaaattcaaagtttaaaaatctgctgttcttgggaggtcttgttttcttgaacacaaatgcccctgaatttcaactagagattcttgactaaagcactttctggctatttttagcccttacttttactgtttctaaaatgcaatgcatggtctatacatccatcgagcagacaaggttcctttttggaaggaataattctagtgagtcaaggaaatggttgagaggatagaggggacatgtcagatcagggtttgatgaatcagccagcccagcccgaaactgaaaagattatcagctgcatatttcacattttcttctccaagttgaccattaagaatggcatattatacaattgggttttttacagcatgtgaatcaacttgtgacaattcggtaggttttttttttctttaatcccatgaaacaaaagagaactagctatgattttggtctgtagagataaggagaaaggatcatagctctgtagctttctgctgacgcattagagaatttgaaaaaacagcagttttggtctttggatgtgtgtgtgcacgtgtacacgcatgtgtgtgtaagtgtgtcaggctgtaccttctggggactggtactgcaatagggtcagtgtggtaggtccagcagtccccttttatctggtctctgacatctctgggctctgattcaattcaaagaaactacaaaagaacacttactcagattctgcctcctgtgagatgaaatcatctaagaaatcaagaaaacgaaggaaaatgaaaatacgttcgaacatgcagggcaccatggggccctggagacttcatcacagagggtgctcaggaggaagattctcacttctacactagggaattttttccggaatgacccatagctctgctgtctagtaggctttccctgcccaagggaaggtccaggtttgggaaatactaaggtggaagcacagtgagtcatgtatgaggaagactcacaggtcctcaggggtgaccaccccttccagggtaagggtcagataacagaggctccaagggccaaatccacaaggctggatgccacctgtaaccactgacattttcttacccagacatgatatgacccattagcataacattaatactgaatctttgttaaaagtaaagttcgtaagaccaggcatggtaactcgtacctgtaattgcagccctttgggaggctgaggtgggtggatcacttgagcctgggagttcaagaccagcctgggcaacattgtgaatgccctgagtaacttaattttttcttctttttgctttgtctgtatcttctaatttttcttcagagattatatattacttacaagtttaaaaacaaattgtttttaaagaaaagagggccaggcatggtggctcatgcctgtaatattagcactttgggaggctgaggtgggtggatcacttgagcccaggagattaagaccaacttgggcgacatggtaaaaccccctctctacataaaatacaaaaattagctgggcatggtggtgtgcacctgtagtcccagctacttgggaggctgaggtgggtgaattgcttgaactctttcagcctacggaactgtaagaaataaatttcttttctttacaaaccacccagcctgtggtattctgttacagcaacacaaaatagactaagacaatagtattgaaggaaagactggagagacaaaagcccattaggaggtgatagagatagtccaggtgaggatgattcgggtattgaaggagggcaggagagaggtgaggttcaagctgaatccacagtgctaggagggaggtgggaaggtgatcatgaggactcaatagccttttgtccttaactagagctgagacggatggaggagaaatggggtagggagaagggagggtgtccctgcaggcacagaggaagtgaggatatgggggacacatgtacccacccttagtacacaaccagggccctcaggtggaatctgagggaattctccaccaaaaaacaaggtggtaaaccggtgaagagataaagctaggagcctgaccgcctgggattcagtcttcactctaccacttactagctacatgacttcatcaagtgacttgacctcttctgtgcctcagtttcctcatccatatattggagataataatagtgcctacctcataatgttgttatgaggataggattagattagttaatatttttaaagtatttagcatggctcctggcatgtagtaagctccataaaatgactgatgataaaaattgaaactagagtgtgagccccttgaaggcctggaatggatgtttaattggcttctctccaagagcctcacatagtgccaggcaggtatataaatagttgtcaaacgaatacacaattcaattttgtaaattattttttgactataccatgagttaaacagaacttagagggctttgtttcctacttatggaaaatgaccccacttcatttcaggttccaaataaccaacttttgttttgttttgttttgtttagacaagagttttactctgtcacccaggctgcagtacagtggtgctatctcagctcactgcaacctctgcaccccaggttcaagtgactctcctgcctcagcctccctagtagctgggactacaggcatgtgccaccacgcccaactaatttttgtatttttagtagagacaaggtttcaccatgttggccaggctggtctcgaaaccctgacctcaagtgatccccctgccttggcctcccaaagtgctgggattacaggtatgagccaccgtgtccagacccaaataaccaagtttataaagaaattctggtatgtaactatttcatcagatggggactgctgatattttcaaaaattccaggaactgcagtgccttgtacctacatgtgatggatgatgtgggaaagcatcaattaagaaacaaatagggcttaggaacagtgttgataaggctcgggctgtgtgttactggtgagggggtggtgggtgcgggggaagggtaatacttaaaacccagaaaatgcataaaacaacttagttttggatcttgaacaaaaattgataagatctaaggcccgaggactccatttggtaaggcgtgttttccaaaaggccctttcagctgtcatatcccggcaggagtataaagtggccctcggagcgggaaaacaagggaagatgaatgcaggcacagtatttttagaatgcattgttctctaaattctagaaacagccaacctagatgaaaatgtgttttcagagacacttttccactctttgtgctactttaagattgatatctagaaatagaaaactgtgttttctttgtctggtgattaaatttcttgttttttttttactcagagatgaggagggaccatctattttgggctactagggttggcataacagcatctttaaggcaacaggacacgggcattgtgggagggaagcagctaacatttagcttttactctgtggacttagcgtgtattttctcctttaatcctttccacaaccctgggaagttgctactatcactgttcccatttttactgatgaaaaatatgaagctggaagaggtgaagaaagtggatcaaagctgtatctttacattgctaaaatgaatccagagactatcactaagctgtgtgtcaatatacgtacagattgtatatatatttacctggaaaaaacctcatcaaacacatgtaatttttattttaaataaatcagaattttagcttctcatgcacacttgtaaagaagaattatgtaagttcctggtaaaagaccttctaattctgtaggtacaggacacttaggtgctattttgtaatccccaggaacatacagaatgaagaagcctcacaaaaggctgctctcacgtcagcaggagctgagtgaggcttgattcactgaaattaagataaaaataaagctcttttagtggttttactaaataaagagcggatacctgctgataataattagtgttcagttcagcctctttaaaaagccgctggtacatcaagtgtattaacatgcctcagtggggccaggtgcggtggctcacgcctataatctcagcagtttgggaggccaagaggggtggctcacctgaggccaggagttggagacgagcctggccaacatggtgatactccgtctctactaaaaatacaaaaaattagccagctgtggtggtgggcacctgtaatcccagctactcgggaagctgaggcaggagaattgcttggaactcaggaagcagaggctgcagtgagccgagatcacaccattgcgctctagcctggacaacaagagcaagactccatctcaaaataaataaacaaataaagtcttagtgggagagagttgcgtggccattgttcaacggtgtatatgtaagactgtgttctctgcagccctaccccctaccaaatgacttttattatgtgataacaacaataaattaccttttgttgagctcctacatttttcaggaatagtaccagatcctttgcttatatttttattattttaccatttacatgtcccaaaaagccctctaagggagagggtattatagccattgtacagttggggagaccgagggtctgaggagttaagtgaattgcccaaagctacagagctagcatgtggcatagcctagagttgattccccaaatattttatttttgtttattatagacattttcaagcaagcacaaaattcgagagatgagtatagtgaagtccctttatcactcacccagtcctaacagttatcatagtttaccattattcttttacctattccctcatccacatacttttttttaaagcaaattccagacaccctatcatttaatccacagataaaaccctaaggtagcttaaatgtcacattaacatttctctctttaaagctatttcctactcagcccaaccctttctttgctccccagtgcacatttcccgagtccatggtgcttattgtagtcgtgatgtctccatctctgtgtgttggcttctcaaaggcaggagctgtgccttccttcccccacatcctaaccacagtgcatagcactgcactctacactgagtaagcagggcctgactactgttcacaaaatcaagggtaggccaggcatggtggctcacacctgtaatcccagcactttgggaggccaaggcgggaggactgcctgaggtcaggagttcaagaacagcctggccaacatggtaaaaccctgtctctactaaaaatacaaaaattagctgggcatggtggtggatgcctgtgttcctagttactcgggaggccgaggcaggagaatctcttgaacctgggagacgaaggttgcagtgagccgagaccacgccactgcactctagcctgggctacaagattgagactctgtctcaaaactaaaataagataacaaataaaatcaaggataaatgctcttaaagacttctcaacttttacaagttgggggttcactattttcgaataatgccagaaaaacaagagaatctttgatgaaagaggtgataaaatgctccctcctcacctccagcttgctgcttccaccttgaaagcatcttactaaacgtacagcacagttggccaaaaacatgcttgggaaaccaaattgaaggtataagatgaggctgaatttggtttgaatttgcaaatttgagtcttagaattatgcctcaatttggttgaattggctccaagacagaagaaactgctttcatggagtgaattatgaggagctgggaagaccacattacccctgagttacaattcttcttgtgaatctttctatctgtagtttatgatttggtgaaaatgtagggagcttgggaggtagagtcagaaaacctatgttctaacccctccaccccctattctgactctaattcactgtgaccttaggcaggtcacttaaacctctctgagcctctgtttcttcatccatccattcagtaaatactactaagtgcctactaagtgctgggcactgggcatcaagtaagattgtttgtgtcaaagtaatttgtaaataaatcctgtaagaactattgatgttttccttgttaaaatgcaattattaatgttttcctggttaaaatgcaacctttggaggagagcactttgaatagcagtctatccttgtgggtgattcttagcattttagagctttgacagggaaaggaagggaaaggaagaggacacaagaccctgggatcactagagacaaatttggtccatggctgggtctgaggaggggtaattatatgggaaaaaagttgtgaagttagtccatacaagtcctgttctaaaatactaccatataattttgggtgtacaggagcccattcaaagcagcaaatacagtgaatcaaacagcttacacatactttgagcccattcccagcaatttatacaaatgtgccccttttgcccagacttcactatgcaatatatccatgtgacaaaacagcacttgtacccactacatctattaaaaaaagtttttttatcacccagtcctggaagttctctagtcattttcaccgtctctaatgattaattcctgttacttgtcgttgcacttgaagcccactttcaggatctacacctctccctgagctataagaccatgatctggagttccaattcaatacctatttcctcctgccccattttctaatttctacatttctggccaaccatgtttgtgttcttgtgctcctttgaggcatgaagtagagtaaaaaatattaaagacatatataaagctcccttaggttggagtgaagaaggaattgttatggacccaaatgggaattttagaactgttaaggagattacatgttaaacattactctataacaaacagattaatgaccttggaaagtctgggttcattttcaatagcatgggttaccagactcagggacacaagggtaacacagagatccttaaagcagcgagagagcgagtgatgctgcatttttgtttcattatcacagtggaagtctagggacagctgctacagagtaaacactatgctgggcactggggaaattaaaatgaatgagatgcagtctttgccacatgcaagcacaacttcggtgtggtctgtttgtgttctaccagacacctttattcatttctttattcattcaacaaacctggctctggggccttcctacagggtttggctttgagtctccaggcagtgaaggttttggaagaaggatatgatctgattggaatggtattttaataaggtcaaggactgaaggaatggcttagtgaagttagggcctgctgactagtaaatcaattaggaagtcagggaaatctcccagggagataatttgctcatgaaggaacatcatatattaaaacgtatactgttctctctcactgtgaaaggaaagggaaaatcaacaaagaaacacaaaatatagcactggtttttagaataatgctgtaggactcatttcaattcaggtatcaccaaatagaccatgtggctcaattctaatatagattttcagtccctcattgctggtgagaccaggctgtatatgatttctcccctgtgttcagatggagacatggaagaaaatgtgatatattagttatctgtaacaatattactacaaacttagtcttaaaacaacacacatttattatggtgcaatttttgtgggtcaggagttcaacattgcttagctaggccttctactacttcagggtctgacaaggctgcaatcaaggcgttggccagggttatggtctcatctgaggtttgactggggaagggtctgtttccaaacttacatgactgttggcagcattcagcttcttgtggttgaaggactgagggcttcagtttcttgttattgttggctggaggccaccttcagctccaggaggccactttcagccctttgccacatgggcctttcaacatggcctcttgcttctttgattccagcaatggaaagagttgcctcaaaatatgagtacataacccaatcttatgtaatgtaatcataatacataatcatgtgcatcctgtcatcttgccatgttctatatggctagaagaaaatcagtatgccagcctattctggccctacagggatgtgaacaccaggaggcagggatcatgggggacatcttaagaggccatctgctatgtgtaatgtttagtgacttggtgaaggctcccagaaaacattggggttgtcacaaaaccaccctgtgtttttgtacacacatgtaatccttgttccatgaaatcctgggaaattgatccagagtcttcccaccctgctaatccttcaggctgattgtttttagccctgctataaggttgaagcaaaacctgtttaattacctgttggctggaatcctggtggcagcagtagttggtattggtgttattttccttttccttttaattttgttttattttattaaatattatcttctttacctgaaagattttctatcttttatttgtttctaaatagtcatttgaggaaaattaacagaggcagacaagattccagacaatatgcttagttttcaggtagcaatttcaagcattctgtttattagtttaacaataagtcataagaaaagaagcttaacagttcttagaaaagctaatcctggcaccatgatggatttaccttgagcatatctttctgtctcaatttccctacctataaatccacagggtgcagtatccatactaacaagatattccaaagggaaataataatttttgagcataaactgaaaatcctacataatagaaacatatttgtattctgcactgtcgagcagaactttgccacgcagctttaaataatttgtcatgcactaaagtgccaggtactctgcttgttcttaatttccttttcttacagaatcttgccagtgacctggaaaggtagatattattctcttcattttgcaattgatgagtctgagattcatggatgtttaatgagtccaaggccatacagttgtgagtcacaattctgcctgattttatgtcctgttaacctgccgttgcactgggaattacagaactaatgccaatccctccctcaaattgccattcatgtattacttttcctgaaattagtggcagttttctagaaatcagaaggggcagaaagtaaagggaatcttcttcttatatatcattgctctctgagaaaaagtattatagaaaagccaaaggtcaaattgcatgatattttcactttacaatataaaaaacatctacactatggaatacatggaatataacgcagcattaagaaaaagaaaaggaaagaaagatggtgaaagatgaaaagattgccaaggcatactgttagatttcttttttcaagttacagaaatttgggctgggcatggtggctcacacctgtgatcctagcactttgggaggccaaggcaggtagatcacttgagtccaggagtttgagaccagcctgggccacatggtgaaaccctttctctataaaaaaaaaaaattacaaaagtcatccaggcatggtggcacatacctgtagtcccagctacctgggagctgaggcagggggatcgtttgagcccaggatgcagaggttgcagtgagccaagatcatgcccttgtactctagcctgggagacagagtgagaccctgtcttagaaaaataaaaaataaaaatggagttacagaaatttaagtatgatatcatttgtgtgctaagctaagccaccacagaacaattctgcttatttttcaaagatacatccatgcatagaaagcagtctgaaaggataacaccctaaattcattaaattgattctgagttaaaaccctaaactggttctctctgaggagggggcctggtggctccagtggcagtctaacatttaatatttaaagtttttacaaggagaaataattcatgtgttacttgtataactagaagtttgagggtttttttaagtaaaatattgaacacaaagtcagccaactggtggcatgactagccacggtcaaaagttggagctatttgtaagtcattttgacaataaagaaaaggatgaactaaaaatactatgtcaccaagatggctttttcctccagagatttctgtgtcagctggggctttgatgtctggccattatctgaatggggcgcctgctcagggatcagctatgaccaccctagggagagttccgtgatgagccatcttggggacagaaggatgagtgagcagctctgcttccttccagacatctctgctcttcaccattttgtcttagcttaggtaatcttccagggctacatgattgtagggggcaggggaaaagatgagggagttaaatgatggagaagagaagggtaccagaagaaactcttctttgaagttaaaagcattggtttctagacatctgctagggatcatttaatatccaggctgattaattcagctgggaagcagtctatagaagctagtatggattccattccttggtgagtcaaatcacttatttcttagaagaaatggcattagagcttaactgtttttctagctcttgcaaagcatgtaattgatgcaaaattagctaggtcccaagcaataagatccaagaaagatctgctagctggacaattttttctaatccacattaaaataaagacatatataactgttaaaataaaaatgtatttatacacatgcatcttacaatcccacatttgactggtgatgcatgggccatgcttggggaaacactgcaagagatgtgattagcctgggcgttggggaggaactgagttcaaattttgcctccataactaacttggtaaccgagaacttaaccttcttagccttcattttctcatctcagggtggacttactagtagttcctacttcatatggcatttttcagaattacttaagctagtgtctataaaggataatgtgtagtacctacaaaatgttagtaaaagaaaaaaagatcttttgcaaataataaaacaaatgccaagaccttgattaaatgtaacttctgcaaaagatgccatcttttgaggatggttcagtgttcaacttcttgttttgggaatttgtatgtgtatgtgggttttggcgctccacacacacactttttggtcctctttttattaatactttgactgtaattcatggaattacctatttcaaatcaatctgatggctgaaaaaggtaaagcatggaatcacagtgattacatagctactctgaaatgcatagaatcacacccaagaatttttctaattaaatgctctttgtgggggtgaggtctctgagtatgaaactatgtaactaaagacttagaaacatcagactgtgggtgcttatgtttaaacttaaatttttaaaatttctggttaactgtgtgcatagaaaagtgaagtttattcagctactcagcttgtaagtgactgccatgatggagaaagtgggagtgtgagctgtgcagagctgatggcaactaactgggtaagttatgtctaaatggaggacatggaagatctcatgtaagactaacaaccaggagcatgctatagctgaaagggggatttggttgaggaagcccacccaataagaagccagcaagttcttctcaccacctctttgaaatttctgcctgactagctggtggttgactcaagcttttcctgccattgctactttagggaaagatcccagccaaggttaatttttcatctcactcttgcattgagatgtcacagtgggcaaatctaggggtctcaataattcgtcattccgttttgacctgaacttgatcagtatagatgaggagccaggagtatttatctactgggggcaaagagaaggggttttccgtgtttttgcatcccaaaatgctaatttaaatattcttaggatcaggtgacatattctggtgcaaacagctttctttggtactgcttaactgtgtgtatgttaataactttgctgttttaatcttacagtttttaaaaaaaccttttctatctcagtaaatctttctaaccatgaaatttaataaagcagcattctagaaattcttaccaaagaaaatgaaaaatgttagtcttcatctcatgaaggaaatgaaattgtttttttaatttttgaacaaatagtattaatgttataatatgttagcaggtgaatttccaaatgcactcctggttgctctttcagccattcaggaataagatttgtcttctcagttttaaaattaggttcagagaagaggtccccagaaacatgagtcagggcagagatgagcttccatcttggtgtctcaaacaaggttttgttgattgtttatggtgcttactcacggcactgcgctgagtccctcagcaaacacccacttctgtgagagacggtctgtaaacaatgaactgtggctcagggaatgcatgttgtaatagagatattttaaaaagcagacattttatgggagcatacttggagcctcaaccttcttacctgtagagtgtggaaactggacacatctctgttccctttccagctttgaaactctgggatcctgcagaaatgcagaccacttcttgtcctagaacatttgttttgcaggatcattgaatagtaaatacaccattggatgctgtaaatatttatggtcccctaaatgggggtgttttttcctgttgttgactgttgttggctggctctcctaggcactgcatgcctttttcactgagtctagcagagaaagcttgtacctctcatttgaagaatgtctgggatggtcttaaaaagcaagttatttgtctcaaagtgctaaaaatatccacctaagaagaaggtgggctgccagagctccgtctgatcctccatttcctcttagtaacttgaaggaaaatgcagaggatgacacacggctaagatgagataatgcctgggatctgggggttgaagtcattcccaggaggattcctgtcagatgaaacgtgtccgggctcgagagcaccaggagccttcgggattgtaccactttctttcccagattttgcagacctagggaccagaccctcccttcctcaggtgggtaaaaggtggtaatgtgatcctgtgttgtgagctgtcaggttctaaaggagggtagctttctagggtcaaagcatccttgcaatgatgatttgatgcaaccagaccaaatcagtgaaagctcagctgccagaccccttgagatttggggatagggcgcagagtgtagacaatttgattagacaaccaagacctcattcttctttgtttcgttgttttatatttttaataagctttcattttggaataattttagatttacagaaaagttgcaaagataacacagagagttcttatgtacctttcccagcttcccctgatgttaacatcttacataacacagtgtatctgtcaaaatcaggaaagtaacattggtttagtactgctaaggaaatgacagactttatttggacttcaccacacagtcttctttaaaaaccaaaatgttgttctgtgagttacctggagtgtaaaataaaataaaatgaaaataaaaaaattcaaaaaaacccaaaacgttaaaaaaactaatgtcacacacacatcacaaatactcatatactaatacacaagaatatatatatataatccagcctttaaaatgtgtgtatgcaaatgcacaaatgtatctggttatgtaaatggatattatgttctcttgccttttgagacaggttatacaaaaaaaaaatttttttttttgagacaaggtctcactccatcaccctggatggaatgcagtggcacaatcacagctcactgctgccttgaactcccaggctcaagtgatcttcccacctcagcctcctgagtagctgggactacaggtgtgtaccaccacgcccagtaaatttttattttttttatttttgtagagataggggtctcactatgttgcctaggctggtctcgaactcctgggctcaaatgatcctcccaccttgttctcccaaagtgctgggattagaggcatgagccactgcaccgggccaggttatacaaattatcgtttgcctttcttaaatgacacacaatgaccatctgtcattgtactttgctatagtgtgttgatctcttggtattttagggctgtttggtcccgggaatttgtgctttttgagttctcaggtcagctcgtcatagtatttctagctcccctctcattactaagctgtcagctgttgcttctctctgctatcagcgtttttgtctgtgcagacctccttcccacatctaaactgcagctgctaactgttaagatgatataactatgtactggggcttcttagaattatggaaagaaaagtacctgtaaatgaggcacatggagaacattactgtgtgtattttatgactttttaaaaagcctttttattatcttatttcccagttttggatcagattttgaggtaaaaccaatgaaaagtgaaataataatttaagtgatagaatcgtattttaacagctaaaaatatgggagtgaatctctgtcttatgtagagattcgtacaaaaaacattcaccccagtattatgttcttccatgcatttaaattatcatttaatttggtaaacattgatctatgtaaaatttttaattattcccccccacagtattttttacatactttacaaaactgtttattgtagaaaagttgggaaatataggtaagttgttttttataccattattgttaaaggctacataatgttacatgttatggctgtatttagcccatggagtatgatatttacattgtttttatttttaaaaaataggtattttcctgtgataaacattcttacttttgcacacagttttcttctgcacacatccaagaggctgtattcccagcagtggaattattgagtcaaaaattatcactttgatggttcttcatggctacttccacatttagcagtgtgttagaaatatgtaagtttctggctgctggaggaagcttgtaatcctgccgttctagcatgttgttcaggtggctgtgtgcacatgatggcacaggaaacagccctgacctgaccagaatcgctggtcatgtattcatggtagagtgaactcaaacagtcagaactaagcattttcaggtaacttattgactcctgggaggaaaccgtttgtcaggacctgccgcagtttattgtgacctcatctgctgaaggcatggccttggagtggagggtttacaaggaggcaagcttccacaggccctgctccatacaacattttttgccctccagcttttagttgcttcatgaaatggtctatttcttgaataatcgtcctcttcaattcccattggtaattattggaccatcttttatcctcatgttttctgcctgatggactgtcaggcagagcttcttggcaagttttctagccaattaaagatggaagactaattccattgagcagtcaactccagttagctcagctggtgggattgtggcgttaatgcaggaccacaagacaagggtttgatcctacatgaactcggtcaaccgtgctcttttcagagtatggtagcagagtagaaaaacgtctggactctttgcttgctccctccccttccttttaagtaaagtctcttttatttagactcttttctgggttataggagtcaccatttttttaatcagcaccaatctttgcaaaagctaaaaatacattttctgaacctcctgactctgatcctgactcttcactttctttaggaaaccatttgattatcaaataaagtgtactttctgcaggttctgcatccttgaaagcatgaattcatgccacatatttggagaatgggtcttctggaagagggtgaaataaagattacgtaatgcagactgattctttcacatcatccttggcctttacacagtgactttttgttttgttttgagacagggtctcactctgttacccaggctggagtgcagtggcacaatcacggctcactgcagcctcgacctctcaggctcaggtgatactcccacctcagcctcctaggtagctgagactacaggcatgcaccaccatacccagctaatttttgtatttttttgtagagatggggttttgccatattgcctaagctagtgtcaaattcctgggctcaaacgatcctcctacctcagcctcccaaagtgctgggactacaggcgtaagctactgcgcctggcccacagtgactttttgtatcttgtctgattgttgtataaaatctttagaactggtttgtatcattcagaataaggcaaaacgagaaaaaaatccaggtaggcagggaatgggttgaaaacgctttggcatcccaaacacgattgtagggactctgtgggtgtgtgagtgaatgagtcactgaaaaaatacattctgaatgagtgaatgaggcaactaattaatctcatggtgagatttgtaatgtttcagaactaatttttaatttaaattgtttccccaactatatcccatttcccaaagaataataatagattgaagttagtagagcatttctgtgcacaaagaaagtatgaagaaatcctgaaacacttatgctaatgctggctttcttccctaaaggaaagagatgaactttattcattaggagtttttcatgaactattgatcgaaaatacacatctgtttttcagtctgttttttccaaaaattggtaactcagcctcatttggagctatctctgaaggataaggaaagaccaggagtgataaggcagcttgcattaatcagatgtgaacgggataccttggcctgctgaattgtgtcacgaaggtcatttttaccacagaaatactcatgctaaacaccaacagtttttctaagagacatgatttttctcccttttgggaaactgaggaaacaaagacttaagtcatttcttgactctctgagaaatcctttttccacgggaagtctgtgtggaggtgcatgattcaatttttgtattcttttttccccagaggtcaggggtgaaccatgggtgactcagccacagggccctttatttatcaggcccattttagctatccggcctggggtgtgttggactttatgggtcatgttctgtgtcgtatgaaaagggggagagaggtggtgcattttaagtctttctgctaaagctaaatagttactctgaggaggccattcagtccttccacgtggcttagacctttggaagtggagatagcaattaattaaacaattaaatcatactctgaattaatgctgttatttagcattaattcagcatattatttagcatgtcttataattatttaattttaatgcgtgaaataggggtgtacacgtgcttttaaaaagcctaatgttaggctgggcatggtggctcacacctgtaatcccagcactttgggaggccgaggcgggtggatcacctgaagtcaggagttcgagaccagcttggccaacatggtgaaaccccatctctactaaaaatacaaaaattagccgggcatggtggtacgtgcctgtaatcccagctactcaggaggctgaggcaggaaaatcgcttgaacccaggagacagaggttgcagtgagccgagatcacaccattgcactccagcctgggggacaagagcaagacttcatctcaaaaaaccaacaaaacaaaacaaaacaaaaaaagcctaatgttaaaattatgaacacacaaaacaagataatttagagaatttatatttagaatacttttaggtaataattcatcacaattcatctttaagtaaaaagtaccagaatgcatttattttgacatgtttcaaacttttacttctttattatactagcagtatgtggatgttgtagaaaattataaaataaaggtaaattaaagaaagactattaaatcatcattttgctactctttatattttggagtatagccctgccaaatgtatgtttacatggacacacaaataggatcacatgatgcacagatactgctttgtgtcttgcttgtcttattttggtacacatcagcattgttcctgttcatatttatacctggatattgttattctttttttttttttttttttgtaagtcagagtctcactctgtcacccaggctggagtgcaatggcacaatctcagctcaccgcttcccgggttcaagcagctctcctgcctcaggagaagctgggattacaggcatgtgccaccacacctggctaattttcatatttttagtagagacagggtttcacaaagtttgatggtctcaaactcccgatctcaggtgatccacccacctcggcctcccaaagtgctgggattataggtgtgagccatcaggcccgaccacgaccttattattctgaatacatacatagtatcagattgtttaactgggatatagcgttattaaattaacccaccgttattagatatatagtatgcttctagtttttcttactatgaacctcatcttttacaataatgatacctgctttctacttcatacctagtgccaatgtgaaacattttccatgtagtagctctctttttatttaattaaggtaaaattcacgtaacattaactattttaatgtgtatagctctggggcatttaatacattcacaggccaggcgtggtggcttacgcttgtaatccgagaattttgggaggctgaggcgggcagaccacaaggtcaggagttcggaaccagcctggccaatatggtgaaaccccgtctctactaaaaaatacaaaaattagccgggtgtggtggcacacacctgtagtctcagctactcaggagactgaggcaggagaatcacttaaacctgggaggtggaggctgcagtgagccgagatcacaccattgcactccaacctgggtgacaagagtaaaaattggggggggggaaacaaagaatattggaatattgaaaatccagaaaaattgaacagttatccagcttggtgaatgtgtgagtgtgatatgcactgggggctgagtctcctgaagtgtgatccaaatttgcatttgcttttccaaacatatgttaaaaaagaaagtgaacatgtggtgagattgtaaatgtgcatattctgtgatcctgccttataaatccaagtttgagccttagagaaccaatctcaggaatgcagaaggaggcgtgtatagggaagtgcgacacattttgtaacagtgaagaaaggaaaatctgtaaatatccataaataagagaacagataaataaaatgtggtgtagggaaggctggatacagttcagctttgaattagacctatatacaacaacatggagggagctcaaaaacaatgctaagtggagaaaatatttatatttacacttagaaaacaatactgcacactatttgtagatgcctggaataaatatagagttaaaaagtgatagtctccaaagaatatatacaaatggccaataaaaacatgaaaagatgctcagttgcagttggctttagggaaatacaaatcaaaaccacaattatccctcatacccactaggatggctatttttaaaaagaggagggaaataaaaaagaagaagtgttggtgaggatgtggagaaattgaaacccttatacattgctggtgggaatttaaatggtgcagctgttgtggagaagagtttggcagtacctcaaaaagttaaatatagtgttaccatatgacacaactattccactcataggtatatacccaaaagaactgaaaacaggtactcaaacaggtatttgcacatggatgttcatagcagcattattccatcaattgaggaatggataaacaaaatagtatatccaaacaagggaatattcttcaaccataaaaaggaatgaatactgatgcatgctacaacatggatgaaccttagacacgctatgccaagcaaaataagtgagaaacaaaaggtcatatgttatttgattccatttgtatgaaatgtccaggcatttcatatgcaaatgcaaaggcaagtgcatagagacagaaagtagattcgtggttgtcaggcactgaggggaggggagatttgggagatacagggtttctttttggataactgagatgttctggaactagatagtagagatggctgtacagcattgtgaatataatgatcaccagtgaattgtgtgctttaaaatagttaaaatggtaaattttatgttatataaattttatctcaatagaaaattttctctaatgataattttctgtaatgaaatggactggtaggatatatatctattccatgataatagttgtcactgggggtggccaaagatggaatgtgggactgaggtggtgggaagaggagatgttagctatgctggtaatgttttatttcttttatccattaaaaaagccctgggagagtgtatattcagggcaacttgaatctgtgtttcctggttacaatcctcacacttggcctaagtaaaccccctacttacatatattttttaaagccctggaagcaaatttaacaaaatgttgagttgttaaatctgaatggtaagaatatcagtatttattatattacccattgcatttgctatgatttttcaccttttttgaaaaataaatcacagcaaatacaaaaggcctgggtacatctgaaatgggcccaaggggcatggggtcaggttgaaaagagctgcctgcttgtccagctcagagccctgctttgcctgctaagatcccactggatcctggaccctctagtttgtgcagtctttctgtatagcctccactggcccctctcgaccaaagtcatcattatactcctgatttaggaagaacgtcaaagttctcaagtccacggtaactcacgatcatacctttgcccttctgactcttccttgagtctagacacaaatcctcttgcctgttgttagagaaccttctgccaccaagttcacccaaagattgctcaaatttaggtccagaaaaaaatggaagagagccatttctgtttctgtcaacatggtaactggttgatgtggaactggacagaagaccttgacctttcttaaaatgttgatcatgttttctgaacgtacacaccagtgtgctgggaagagatcatctctgattaccaggcctcataataactgaatgacagatggaaaccaaagattgcttctccagtggtctagtgtagatgccagcaaactgtagccaagaatggcccactgtctgcttttgtaaataaggttttattgtaacacaaccacactgttatttatttattgtcagtggctgcttttatattgcattggcagaggtgaatagttgcaacagagactgaatagtccacaaaacctaaaacaattagaatttttccctttacaggaaaagttttccaaccctgatggtggttaagaacaagggctcttaactccaaatacccttggaaggtaaataagcatggaagatcttcttattttagagtaaaaatgacactgagaagcagagaaatgaaatggaaagtcaagatgacaaagccagttacagaatggaggttaagggtgtagactctggagttaaatgccatttactcgccatacggccttgggtctgttattaaaacatagctgttgcctcaattctaaaagtgttcttgagaagagtaaatgagataacccagttacttcatcagtaaatatttattggactccattctgggctgggcactgtttgaggtgttggtgatgaaacagcaaacatgagggacaagatctctgtcttcacagagcttgtagcctaggtggggagatggtaaataacagcaaatcaaccaaggacacagtccagtcttgaggtggctgtgactggggctgggaataggaggtggtggcaggggagatgagatcagaagaaagatggaagttgagaatctcctatagctgggaggtcaggaaagactctgaggaggggttatttgagctgatgcctccatgacaaaaaggagccaatcctgcagagatttggtggcagaggaaacagccggcacaaatgtcctggcctggcaacaaggtgccatggtcaggagggaaaggacactgtgctggagcatcatgggtgacgaggagagaagcaggaaaggggggctgagaggcgaacagcaccagatcccgcagggcctcatccagttgtggtgaggaattgggatttgtgcagtggaagccagtggaggtttcaggcaagagagtcagtgctaagatctaggttaaccattcagaatatccttctggctgctgtaatgcagtgagattgcattctgtaggcactggttgcagcagggagaccagttagcaggtttattgtactactccaggtgagagatgatgacagtttaggctgggatagtggcagataggcaaggtgaagagaagtagttggataaggtaacactgttggaagattgcatgaaatgtggtaatatgtgggaaatacttagcacacgggccaaggttgtagtatcatcagcctccctatcatcatcagcactagcaccaaccatccccaccagcaccacctccaccatcactccagccatcatcgtcactgttatcaccaccgtcaccactgtcattaccaccatcccatcattatcatcttgggagagacagtgtagcattatggataagagtatatactcaagctatactacttgtattgaaaccccagctctgctacttacaaattctatgaccctgagcaaattacacctcctctctgtatctcagttacctctgctgtaaaatggggtgatcgtagtattttccttataggacattgtgaagtgccataacacgatcatcggatagtaaatcctaaactgtctgttgctattatttggggactggtataaggtaccatgcttggtagagagttggtgaactttgctaaagtcctgacattctgtggatatcctccttagagactggaaacaaatccctgcttatgtaacccattgactgatgaggctgatggtgagggctctctccctgacccctgaaataccactgtttcagagagacaagacagcctgctgtttgtcagaacattttagcttcaggattttaaatcagcattccaaagatttaaaggcaaagaaatatgtgttggaatttccacagaaaagagtgtcaaggttctgtgcttgcttcagatagctctgtctgtgggggttggcagatgttcttcgggaggcattattacctcttaaagggaggcttgggaagggcattttatttctccactgtaggcagattctcgtttcagctgtagggctgcagggatagctagagcttcctgagtattccaactatgggctttgaacaacctgggccaaatgtgggggcattgctgtctctgtcatgccttctacaggtaggctgctggagccaggggactagcttccaggaggtgagaaaagccctccaattgtacactcaccgggagctcagatagcttgcatgagagcccacgttcactgccaaagacatgtcttccgcaggccctggatggagggcaattgtacaatataaaagtctgtcccaggctgggtgtggtggctcatgcctgtaatcccagcactttgggaggccgaggtgggaagatcacttgaggtcaggagtttgagaccagcctggccaacatgatggaaccccgtctttactaaaaatacaaaacttagccaggcatggtggcatgcacctgtaatcccagctactcaggaggctaagcaggagaatcgcttgaacccgggagacagagatcgcagtgagccaagattgcgccactgccctccagcctaagcaacagagtgagactccgtctcaaaaaaataataataataaaaatgaatacattaataaataaatgtcccagagaaacagtggtgtgtgtaccactccacccacaaccatacaagggatctctttaacttttctatgtaacaaaaaggaagaccagtagcaacacgtggttaaagatgtgccataacccaggatggatcttctccttccactgagaaacaggctcccacagatggcaggttttactgctggaccagagtcagttcttacgcctgagggctgggacttttagaactatggcaactctgggtatcttttcttactacttagctggacaaattgtttcctagcttttaaatgagggagagacaggttgatatagtataatgaacacccaacttggtttttttggtttagtttagttttgtttttttgagatggagtctcactctgtcacccagggtagagtccagtggcgcagtcttggcccgctgcaaactctgcctcccaggttcaaacgattcacctgtctcagcctcctgagtagctgggattacaggctcctgccactgcgcctggctaatttttgtatttttagtagagacggggtttcaccatgttggccaggctggtctcgaattcctgacctcatgagccacccaccttggcctcccaaagtactgggattacaggcatgagccaccgtgcccggccatgaacacccaacttttaaagccagtcatagatggagtaaaatctaaattttaccatttagtagctgccacgataagcaagtcacttaacccttctgagtctcagtttcctcatctgtaaaacaggaatagcaatacttacattcatggttgtaaatataacaatgtatgtaaaatgaaaaatcttactgttatagcaatgttgaattttttttttcctggtgtacttcacgtatatcttggcttgtgagtagtacctgcaagatcttgaggttagggtatgccttttttttttttttttttttttttttgagacagaatctcatgttgtcacccaggctggagtgcagtggcatgatcatggctcagtgcagccttgacctccccaggctcaggtgatattcctatctcagcctcagcctccaaagttgctgggactacgggagtgtgcgaccatgcctggctttttttttttcttttctggtttttttttttttttttttttgtagagacagggttttgccacgttgcccaggctggtctctgaactcttaggctcaagtaatttgctcaccttggcctcccaaagtgctaggattatgggtgtgagtcaccatacctggccagggtacgctcttaattttcaaatgtctgctttactagcaacaacagacatttactgcgcacttggtaagtgaggctgtcactgagtgcattcatgtgcatttaatcctcgcaacagccatgcaaggtgaagattataatcccccattacacatgaggtttaagcaggtgaggcagcttgcccaggtcacaagcaagaaagtggcagagctgagatttaaacctggaccactcagttcatgcccttaactcataaacaccctgctatctcttaaaatgttcatgcccaataattgacattgctccttgtgatgttgtaacatgaatgagtcatacagagacagtggttgtcctttgcttcttgatttctaggaagtctttatatattacagagattggtgctgaaatggatacgagttgtaactatattttcccagtttgtcatttgtctttgcttatattttcattgttgttcttgtttgccatgtaaaagtgtttaaagtgattttatctttttatattttaggatacaaattttatcaatcttttctggcttccggactttgagtcatagttagcaaggtctttcctacactagggaaaggcccatcttcttctcttttatgttttcatatttacatttacatctttgatgtatttggtgcttatcctggtatacaatgtgaaaaaaaattaaaaaataaaaaaacactttttaaagcactcaaataaaattatcctatccaaatgtggtcagagttggcatatgaagaatatttggggtagtgaattttcatttaagcaaaaaagcagatttattggtaccattgggtgacaagcagtgacttcttcacagttctagttagaagacctttagtctgatactttggtaggggttttccatctgctgagctggtaaagtgtaaaatgtgaggttcaggagtgggcaactaaacaaatgaagcttttggaggtagctttggatacttatgagatccctgactccccatgccatcagccttcaaaacctaacctgtgaaacatccttgacattttcctactttcttctctttgatatcgttatgaaataattccttagccctcatgggtttgtttttggccaaagtgtatggctgtatcaataggttattatgcttgtctcctagtctcaaagagcttatgatcttgttgagggaagcaagacttagatatataatataaatcctgaatagtgcaaaaaagtaagaaggcagctactcatttatgtggtagagtctcttttgtatatatttgaatcaaaatgcttctagttgtgacagaaacatagctcaaatttctttaagcaaatagagaatttatgtttaggtaacagaaaagaccaggtgtcatgcttatgtaacagtcaaaccttcaggcatggctggatccaggtgcttatttttgcttaggaatctctttttctcctcacttctcagctttcatttttccttgttgctttcattctcagatatgctctccccttctggtagaaagatgaccacaaacaatgagtgccaagcttacccccttctaacttaagggtactttcttgtctagtttctcttgcaaaaatcccaagcctggttctcatgcctcttcctgaaccagttactagaaggaactgaaccagttactagaaggaagggttgctgattggtcagtcctgagtcacatgtactcccaaagaaactgatagcaggctcagtcccattttaaccataagctctgagaattggggagaggcagtttccctaaagaaagttgtagagccatgatcagaaaagggaggaacccaagctgagtgagccaaagccccagaatgcaccgcagtatgagctgcttgttcttgaagctcttaaataattggctccaggtggccagcatcacaaacaatgaaagtcttgaatagagtagatggactctgttaagcctataaaaatgaagcctcaccgagttgctgtcatgtgataagagcaataactttagtcgattctcaactgcattacaaaataaaactaaacaaacagaaaatgttgctgcctattactgatgatgggtttctgagatcctaaatggaatttgtcagaaaagctatcatcatgtaattggcatttgtcaaataccaaatcccagcagaaaagaacatagagagggattgtttccctcttcccaactgctgactatagtttggaaaaagagtgaggtctcaaattgggctggattcttaaattggtgcttttgtgaacgtcattttagaactcattccacacctgaatattctatagcttgtgaagaatgtggcgtggagtgcaggggtctctgtaaatggagtggcatggctactttgttggctgtgccaggaatattagctgacgtttaccatgcctggcactgtgccctgtgccttcactgcatcatctcatgcagttttcacaatagccctatgagggaggtactcttttcatccccattttataggcgaggaaactgaggctcagaaagattactcactcacccagggtctcagagcaaattactggtggaatcagaatccagactggggctgctacactccagtatatggattcctaacagtgctgcataattaactggcttgtgtcaccctgaccttgtcacctcacagagtttcttcactcttttttacaggtatacatcgtttaacaaaatctttaaacagtgatgccactgaagtgttttactctgagaatcctcttatatcattagctcttaatgatgggctataaatgaactcctagatttttctaatccattccttcccacagtttccagaaaacaccctaaacaattgctaaagtggactggatagtagttcattcctctcattttatctttaggaaagaaggcaagcacgtggaaagctgaccaagctggtcatcagctctgaacttaataattgccaataatcttcaaaaacagtattgagctgtgagacctggtaattatatactagtgtgtaaatggttcaaaggctaggcttttaagcaaatttgggtttgaatcataatcctgtcactctgacctcaaagaagtagtagagcctgaccgaatctcagtttcctcatctataatgggagtcattagaaggattgagctctaaaggttgtcctggggattaaaggagatgatacttacaaagtgctcagcacaatgctgcccctaattgtgatcaaaaaagcctggctgctagtaaagcaaccatttatgattactattactattgttatgtcccattcttactccttccccctccaaaataaataccaccacaacaaaatctccatttttatcactgacattttgtaaacatctttttctttgcagtggtttgcaaagcaccttgcaatttcctctcttcttaattcctggaattctgtttgaacttgaattgcttaaagctctctgttaagcaaactatctcttgtgttttttcctctgatgtccacaggctttgaaacagtagcttttccataatctttgacaaaagtttgcactaactccctgaaggactggttttagtacagccttctcgtccatctggctcgttctgttttttttttttttttttcctttcctcaagatcttttctctttgtttagttttttaaaggggaatctcttgaaagtctcctctaacatattcttactccccttttcaagattaagctgttatcttggtgacaggtactgacaaataccacatagactcacaaatggtcatgtggtttggctcacagattagtgcctttttcaggtgataattatcccctgggcagttacaaaagctttgtcataagaagttgattatttattgcaaccctggttctggcagttaaaataacctggggtctagttatttggggttttctttctctccccaaggaacatctctggaattcatttatggcaaaagaaatacacaagggcacatatcagctttttaatcaagataacctcccatctgtagagcatttcatagattccaaagcacttccaagtccacaatctcccagtgaacttgattctgggagccagtcagatgtgtctttccaagcaaggtgaagggcaggaggagaaaagtgagaacaggaggctgggctgtggggttggattttgaggtgattagcagtctggtagatgcagttaggatatgcctggctggaccatgacaagatggagaattggggctcctgctttctggtgactttttcagtcatgctaataacaaatgacctgtgagaggatttcacaagactcagagagaacttcaatcattaaacaagcctttatagattcatttgagctgttgtctttttttccctcttatatttaagacatacatttatattgtaacattttactctgcatctgctgcaagaggaaactataggataataatgattgcttcctgatcaaaagtaggtgaattcctagcagaggtcattggaaagatacatggggaggaaaagtggaatatttcttcttttagttttggtagtgttccaaagaagaagaaacaaatttgaagagactgatggtttacaatatttacggaaacaccactaccaaaatgccttggttctatcagcagctgtgtgcacctcagttccattacctctcccctttttaataaaaacaacataaccacatggcccatcattgggagaccttccttctgatacaccgtgatttttttttttttttttcagagtcttactctgtcaccctggctggagtgcagtggcatgacctcggctcactgcaaccgccaccttccaggttcaagtgattctcgttgactcagcctctggagtagctgggattacaggtgcctgccaccacacccagctaatttttgtaattctagtacagatggggtttcaccgtgttgcccaggctggtcttgagctcaggcaatcaacctgccttggcctcccaaagtgctaggattataggtatgaatcactgcacccggccacaaccgtgatttttattttgtgtattttccctgccaagcttttccacatgtatatttcacatatatatatacatataggtgccctcataaacagttttcatcctgcttttcattaacttagcatgttcccattttgcttggcttcatcagtatacttgtttatgcagtgttcatgcagtggatgtcctataatctaattaaacattccctattgcctgacatttggatttcagggcaattagtgcaggactggaaagtgtgggccctggagccagcctgacccagatttcctgctgtgccacttcctagctgtgcgatcttaagggcttgctttcttcatctgtgccatgggaatgataatactttcctgaaagggttgttcagaggagaataacgtatataaagcatttaacatagttcctagtacatagtgtattcttcatacttagtagctagtctattattatttctaattatcactatttagatgacactacactgaaaatcttttcttcttttagattcttttcttttcttttcctcgcttctcttctcttctcttctcttctcttctcttctcttctcttctcttctcttctcttctcttctcttctcgagacagagtctttctctgtcgtccaggctggagtgcagtggtgcgacttggcttactgcaacctccacctccccggttccagcgattctcctgcctcagcctcccgagtacctagtactacaggcttgccccaccatgcccggctaatttttgcattttcagtacagacaaggtttcacaatgttggccaggctggtctcaaacttctgacctcaggtgatccacccacctcggcctcccaaagtgctgggattacaggtgtgagcccagccattggattattttattttggtaaagtcacacatgtagagatattgggctaagatatttgcatatttgtattgctcttggtaggtattgacatctctagatatcacagtagtttttactgtcatcaatggttctacacatgccattttcacttataacctcaatggcattgaccaaccaaaaatgataatttttaagttggataatttagtgttaaatatgatatctggagaaactgtaccctcaccagcatataacaagaaattataactttctaagttgaataacttagtttgttaatcatgataccttgtgatctgcttatactggaaaagtagagaggatagtataattagcacctggtcaccatcatccagcttcaacaattactaacttcttcccagtctcactacactgtgtttttaggagtattttaagcaaaccttggccatatatcactttactcatcagtactctgctatacctctctacctgataaggaccctattttttttatttatttatttttttttgagacagggtctctcactctgttgcccaggctggagtgcagtggcccgatcactgctcactgcattcactgcagcctctgtctcctaggctcaggtgcctcccaggtagctgggattacaggcatgcacctactaaacctggctaatgttttgtatttttttttttttgtagaggtggagtttcaccatgctgcccaggctagtctcaaactcctggggctcaagtgattcacccaccttggcctcccaaagtgctgggattacaggcatgaaccaccacttttttttcataagtcaccatcccttatcccatctgacaagattaacaataattcctcaatgttatctaatattcagtccaaagttgcatgtcctcatattcaaattttacttcagactgcacatttggtgatactgaagaattcttgttaatttgtctcaaagacgtccttgtacagttaatttgtttgaatcagtatcccaacatggtccactcattcctttgtttccttcttttttaagagagaaggtctttactatgttgcccaggctggtctcaaactcctatgctcaagtgatctcttgcctcagctttccaagtagctgggactacaggcatataccactgtgcctgactggtccacccatttcttatcattgttattgtgaaaaatctcactgtcccccccttttttttaccctcttgctgaggaaaccaggtcatttttctggcagaatattttctagccaggattcaggtgtgctttctcattatgtgttttaatgttttcctctatccccgttttctgtaaactggtgagtagatctggaggtttgataagcatcttccttaattttagcatgaagttattttgagggcacagcacatccttacagtacctccctgggtagagtcttatacagctgagcagataccagttgctactggcctcccctggcagtagtataacagcacaaaaattcaattgaccattaaactggtaggtcaataaaagttgaatgtaggaataaatgatgacattagcttaggctgagtgcagtggctcacccctgtaatcccaacattttgggaggtcaaggggagaggatcacttgaacccaggagtttgagaccaacctgggcaacatagtgaaaccccatgtctacaaaaactaaaaaaattagctgggtatggtggtgcacgcctgtagtcccagctacttgggaagctgagatggaaggaatgcttgagcccaggaggtccaggctgtagtgagccacaactgtgccactgacctccagcctggatgacaaaatgagaaaaaaaaaaaaagttgcaccagatgcagtggctcatgcctataatcccagcactctgggaggctaaggcaggaggattgtttgagcccaggagttcaagaccagcctaggcaacgtagtaagacccccatttctacaaaaaataaataaataaataaaaattagccaggcatggtggtgcacctgtagtcccagctactcaggaggctgagatgggaggatcacttgagcccaggaggtcaaggctgcagtgagccacgattgcaccactgcactccagcttgggagacagagctagactctgtctttaaaaaaaaaaaaaaaaactgccacctggtagaacatggttaattaagtggtagtaataagaattgttagaactcaaaagaataaactagctccacagggctgggttgacctgggaaagcttctcagaagaaaaacttggtctgagacttgaataatgaatggtattttaaaacatggagaaggatgagggagggactattctggacctgagttcaaagatacacaaagctttttaaatgtcaaccaattggtcctcttatgttgacagcccttgatacataccttctgtgccttttcctttcttttgttctttaattcattcaacaaatatttattgagtgcctattatgagtcaacctttttgtggcccggggaatatgttcatgaggcagcctagttttatggtaaaaacatcagctgggaatcagaagactttagtcttctcttaagtcctgtttttagaatacaagtataaaaaaattctttaagtttattgttgctgtcagtatctctagatggagactttggcagctcagacagaggatgtagcatactgtcacctttcctgggaagaaaggacttctgctgtttgaatgaaatagtttttttcgttaccttctttcctctctctttattctttcttgtgggagcactttatcctttgagctccaaaaacaaagctggaaacccatgaaacaatatttgccacgaccctgggcaaagatacaaatgaaaacaagcagaattctttatcagccagacagttcacctttgttcatattccaagcgcgtaggatggcagcagggggtgcagggggaggtttacctgtggttatcctgctgaaagaggtatgctcattctcacgaaaaagaattgatcttgagactgaaaatggcttatggcagggtgggtggctgagaacaaaagcaattgttagcatttttgagatattcatacatcttgagcagcagctcaacttctatcagtttgatccaggtcttttttcctttgaattcagttctatcagcatctattgagtgcttgctgtatgcaatactagtcatttcaagaggaggaatttagcttcctttcccattatctccaccagccccctcactccagaagcacctcaaataagcttaccagctaagcatgtacactgtagtcgctgtgcaaacatagctttgagatggccaccctgccacctcccacatgactccctgaagtccttttcttctttgtcctctcctgtcacataaaattcagaattttcaggagaatttcagaattttcagtagagtttcagaattttcaagatagaagggaactgagggtcacccagttctgtttggtaacaaatgtgttccacttcttcccctagccagagtcccaggacagagggttagctcattatgtctttggctcctcttttatccctaacctctcgggtataaaatgtaagtgattaatgttccacaagacttggactgaaaaactttaatccagtacattctgtttgatcaaaacagggtccaggaaagttaaatgacttgtccatagctgccacagtctgtgggtaaacagggaccaaaacccaaggccacttgatcccccatgcgtggccttcctataaagccacttgcccatggtgtggacatgattgccctgtgggtacggggcatgctggggccaatgacacgctatctttggggaagggtgtagctttgtggttaagaccatcaacgttctggcagactaagtaagttctggcatggctatttagtagctgtgtgatcttgagcaagttacttatcttctctgagcctccatgccctcatttatacaacagggcagtaccctcttcagcaggttgtgaggattcagtaaggtaatatatgtcacatgcttgtcacaggtctggcataaggcaaatggcacctaacattattttctagcttttcagcactcaggtgtgaacttcccaagtcataatggttctttctgttccagctgaagttaactcaaacctgtctttattactccatttgttgaaagagaatctgatatggaactttttgcttggatgatgtgccacacatgtagtctactgttagaaattgtttaaaaatctgagtttcagagctgtctttccaactggttggttggttcctgggttttgaagagattcgttcctcctccagacttatctcctcgctctgtttgggaccataataaacctagctactgtttatgaaattattactatgtggtagccccttaaccaggtttctctctaatcttcacctccaccctttgaagtaggtgctatttggtcctgattgcagatgaggaaactgaagttctgagagactgagtaacttgcttgatggttgatattttggtggttctccctcgtggaaggtggaagagcacactgtgctctgtagttttctggatgtgagattatgtctagggtgactctagcacttggggttgacacctgacaaggacttgagtgagcatccaaccccctgattgatcagcaggggaagctggtgagcaaaaacgtcacaggactggacccaagtcagcactgcttctcattcagtgttctttcagtcatatcatataggctcaaatccttgacccttgcatcataggctctggcctcaggactccctggtttgtgactggcctgtgaattaacgttccgcttcagaattggaacttgaggttctagaagcaaggtgcttgcatttgaactccagctctgctgcttactagctgtgtgactttgggcaagttgcttgaactctctgtgcctcagtttctcctactatagaagtactcatttcataggattgttgtaaggattacttgagatacttcattaaagtcaaagcacagtgcctggcagagagcaaacacctcttcggctctcagcatcatttactgagctctcatcacttgccaggcatcttttggcaatggggatgtagccttgtacaagcgattcatgattcttttggagcgtacaatctagtaggggaaacagatgctagagaataatgaagattatgatttattaagtaattctagtgctatttgttatttatggggcactatttagaagttgctgcaaggtatctttgtttttagttctaattcttataaatggacaacattaatgtaagtaagtattttgggtaagaagtttggccagggttgcacagaaccctcagctttgagaagcctgtggtttagcatctcatgccagcaaccatctagatgtgtatttttgttttgttttttagagacagagtcttgctctgtcactcaggctggagtgtagtggtacaatcatagctcactgtaacctccaactcctgggctcaagccatcctcttgcctcagcttctaaagtagttaggactataggaatgcaccatcatgccctcctaaatttttacattttgtgtacagacaggatctcactatgttggtcagcctggtcttgagtttctggcctcaagtgatcctcttgcctcagcttcccaaagtactgggattatagacatcagccaccaagcccagtcagtcatctgtgttatatccagaacagaattaggtatggccctaccacttagatgcaagcagcccacccttgaagggcagaagggaagctgtgactgggcagaatccacaaggcagcaagacttggtccactgaaggaacagatagctctcatagtcataacaggcctgtaggaagaagacagtgtaggaaccaaatgctgttgtaaagatgacacaggcactatgtaaccgagtacctatttttaagtgacagtggtatattttaggccagttctatcccatttgtagtctgtctccattttccctcagtaattcttttctcatagttgatctttcctctgtttcaacctcttgtttgctttgccatttgatattaaaagaatctatatgcatatgcatttcttgacaaatgagtacattgagcttaattttctgatgagccttcataaaatattaccatgctgaaccaacccaaaatgtgggctgcctataccaaacatgctaattttagacagggtgctttcatcagtacataagatatgaatttttatttgaaagctttcctgaaattaaatagcataaaatcaagataatactccatatacacttcagtctttgctgtttaatagaatcacagaagcatacacatttatgtttaaatcaccttgttatatggttcaagaatctatgtctcagagagatcacttgacttgcccaagaccacagacttaatggtagggccagattgtataccatgtcttcttttttttttttttttaatttttttagaggtggggtctcgctctgttgcccaagctggaatgcagtggcacgatcatagctcactgcagcctcaaactcttaggctcaagcaatcaccctgcctcagcctcctgagtagctgtcaccataggcatatgccactgtgcctggctaattgttataataataattgttattgttattgtagagatgaggtcttactttgtggcccaggctagtctcaaactcctgggctctagtgatcctcccaccttggcctcccaaagtgttgggattataggtgtaagccactgcacctggcccatgtcttctaatttaggtcagttcactcttcactctgctgcttcttttatatatgtgcaacagtcatatccttttttgaaattataagattaaatcaaagaattaatgtctttggaagcaaggagtgttggaaaagttctccaaattccaccttttttccttaattcatttaaaaaaaaagggagaaggatgatttatttaccggaagggttaataatagcatgacgtgctaactgtatgcttagaaatctgacatacatattatcttattggattattcatgtgtttttaactcattaaaaccttgaaactctcatatccccattttatagatgcttaaactgatgtttgtcatcattaagtaaactgtccaaagtcatatagttggcaagtgaaaacttggtatttgaacccaggcttctcattctaaagcagaggtgtccaatcttttggcttccgtgggccacagtggaagaagaattgtcttgggccacacataaaatacactaacactaacaatagctgatgagcttaaaaaaaatcgcaaaaaaaagtctcataacgttttacgaaagtttacaaatttatgttgggccacattcaaagccatcctgggatgcatgcagcctgtgggccatgggttggaaaagcttgttctagagcttgtattctatgttcttccagaaagaaggacagagtgttgagtattccacaaagaaaattttgctgtaaaggcagagtgggagggaaatatcttattctttttcagtttactagctcttcactttataatttaaccttccatattaaaagcttctctaggaagtgagaattaatttgggggaaggaagcctcaattattcctgcttccagctggtacagatgcttggccacttcaggacaggtaggagggagaatgttggcatctctctactgagctcagaaactggagaagcatctaaattcaggaatgatgccaggtggggtgggggtgtgggagggaggaaaaggatgtggtgtttggggcccataactcaggaaacgtgatggcacctaatttcagagtggcatgaggcaagcatttaggaaaagaatagtgaactattgttacaggttttttttaaatgggtgggttgtttttataaagttttatgaacaggaaactgaagcaaaatgctgatccttttagtttttgagctctgccagcatcatttttatatttatttttgaattttgatgacaggcacttcctttaacacttctgggagtaaagtgtaacaagataccccaaactgcatttcataacagcagaatccaaatgaagagttgtagtttcagatcttttcgataacacggtgagacagaactggatccctccccagccaggggagaaagagaactctttcagtaactgaggcagtctgcagaattttttccctttcaaaacattctagaaaatttgcctaacatgtggaaaacctctaacatgcattaaaatgggatagactgtggcaaagaaaatacagatcaaattctcctcctcccatgaatcataaaaacccagccttcccagctattgtttctcctggaagatgacttcatcttaaagaaagtggttctatctgttgtgtgttttggatgcactaaaccaatgtttcaggcatctggctgccaactttggagatgttaaaagcctgttttgttcctgcagggcactctttcattgcctaccttataaaagttatgtcttattgcattttcctggcaccagagcaatccttgtacctacccattgcatttggtttttctgagcctgcaggcagcactgggttattaaagttcaaggaggaatccacatgatgttggctttacaattttaattctctcttaccttctttcctccctacctcccactcaatgacagatgagctttgttcaccatgtattgtctctaaaccagaatgagctctcaaaattatctcttgtaaggctctaggaggggagaacatgactcccctttggtggagcagctagcagagaagtttccttcttcctttggcttctttgaataaaaagttcttgagtctataatttatcatcagccttgaacttcagataagcaccatgtttaatcttgcagaaacatcaggcaaaatctgccccctcccttaaaagtcagccccttggggcccacctcaagaaaacagagttttgatacaaatggcattaggtgtgagcatggcaagttaagaggaaaaaaacatttttgtagagtttaacctggaatcaaaaacctagagaagggaatgaaagaaataacctttaaagggaaggaaaagggcagatgagcatgttgcacagtgtctttgaaaataagctatttgatgtccctttgtcactagtttcagccttcctggcaagtccaccttgttcaggaattagtgtgtaaacagctggaaggaactgaaagctctatcatatctgagaggcccccacagtctaacactgtaggagccgtttctcaaagtggtttggactcttcaagaagctaaacattaaaattaggggcctatttgaattacctttcaaaatttcaaacagcccactatagtattctgcatattattttttggtcccatctcagaagttttaaatatggtgtattcctccttgcaaaaatcttctctggatttgcttcctccgtgacgtgttctttgattagccccatttcaatttaattttcatttcaacaaatatgagctgagagtctgctatgtgccagcgtaataggaggagctggggctactgtgatgagcaagatagatatggtccctgtccccttgtagcttgcagccaggcagtggagacagacataaaatcagtcaatatgagcaggctgactactggggaagaagaggtacttggcaccttgagggcacaaaacaaggattacccttgcctgggggtcacagacaaccttgaatgagaggaattagctaggcacagctatcagttggttgtacttattaatgctagagttgaagaatcaaatgatagtgcaatgataaaatctggggaactagtgactaagtgcttctgttcagtcctctattgccaaggcttttggtttaatcagaattgtgggcacatgcgaactatgtttgctgagcttggttttggctctgagatggaaaaaaaatcaagtaaagcagaaactgtcttaattcagctcccacttaaccaaagcattcagttaacccacaccaactagcccctttgtgaagcgtgtctaatacccacagcacacagaacactttcagctaatatgctgcttctagcatacgccagccagtttccactcccaccagatgagacacatatttgccaggagtccccgaacctgtttctactagttgaacttgttctgtaattaaagtcttctgcccatgcccccacccccaccatctgccccagccccagccctaggtcttttttcaagtaaacatctcaagccaagtgccctcctcccattctctgctctacagctaattttttaaaaacgtaaatgctgtcatgccctctggctatgaagataagcatgttttaaattggaaccttggataccagattgtaaatcaagtcccaagagccagaacacatctcctagtgggtggcttacttggtagtttactcggagtatagatttgtcaatttttcatcatatccttgaggcacccatctgtatatagcatggtgtggcacacagtagttcctcagtgcacgtttgtttggatgaacaaattaagaggctccttattcccattctgggttttgatgctacagccattgggctaattaccccctgtgcacctcaggactgaagatttgtggtcagagcatttctagcctgtggctgggggatcattattgggcttgctgatcattctgattcataacactatgtatgttactcgaacagtgctttttgagggtattttacagatttctgggtctgctgccaaagattccaattcattggacccaaagtgggccttagggatatatatggatttgataagcttcttagtcaatttcacagcaggtggtctctgggagtgtccctgactcctcagaagtcatttctctataaatgtatgggttttcaaattcaggccagatgatatgaatactgccatattttgttattttacacattttcctccacatgttaacttctcttgaattgccaagggtcttacaattgatcatataatttaattgacaatatttttcttttcttttcttttctttttgtttttgagactcagtctctctctgtcacccaggccggagtgcagtggtatagtctcaagctcactgcaacctctgcttcctgggttcaagcctcccgagtagctgggactacagatgtgtgccaccatgccagttactttgtctattttttgtagcgacagggtttcagcatgttgcccaggctggtctccaactcctgggctcaaatgatctgcccgcctcagcttcccaaagtgctgagatgacaggggtaagccaccacacccagcctattttagagagtacataaaataatagcacatattacagtcttaggttcgacaaaatacggtactttgattactgagtttgtagttgatggaggagaaaacacctctaatatccaaagctggaatgtatacattttaggttctaatttctctgaataatggttactatacgaaacccacataaaggaataccttagttgtagtctgaggggaataaataactaaataaatatatggccaggcacggtggctgacgtctgtaatccctttgggaggtcgaggcaggtggatgacatgaggccaggagttcgagaccagcctgacccacatggtgaaacccagtctttcctaaaaatacaaaaattagccaggcatggtggtgcacatctgtaatcccagctactcaggagtctgaggcaggagaatcgcttgaacctgggaggtggaggttgcactgaaccgagattgcaccactgcactccagcctgggtgacaaagtgagactctgtcacaaaggaaaaaaaaaaagtaaagtaaaaaatattttaaaaattaaatataacatatttattgaatccttaacccccaaatatgaaatactctcaaaggcagactctccagaaaattcaaagacactctagtagtacacagaaaatgttttattacttctgtgggcagaacaagcctgctgatagttataagttcaaattggagaaggtcaggtttcttactgcaaaatcttcagtgagacaggtttttgtttatacaaaccgtgcatccagaaacaccatatatcaagaaaatagtaaattaaaccccttagggttttcatttaatcactgagtttgcatttctgccccccaaaacaaatatagtggcaaaggttgtcctggggaagaataagacttgaaaaaaattccctcttccctggtttcttctttattatatttcattgaaattttaattttcactggtgttttaaagtatatttgtgtacctgaagcagtttaagacagttttctgtcccctcactcccttactcctatattcctctttattcttttgtctgtcttgtgttttatggaatttgttattcagccaacggtcaggtttgggcatcagggaagacttgattcattgccctgttctggggtttcttggcactcaagcatttcttctttgccccaccaagcctaagctgatatttgatactaatcaatgatcaaagtctgaagtgaaaataccttgaggtcaatacccacagattcccttggctccaataccatatttcaggaccactctctctttaccacagcgtttctcaatagtggcactattggcattttggacctgctaattctttgttatgggaagctgttctgtgtatcataagtgttaacagcatccctggcctttacctattagatgccaatggcaccctggccttgtccactgacaatcaatcaaaaatacatccagacagtgccaaatatctgctgggaggtaaaatcaccattggttgagaagtattgctcttatgaaccagaggctagcaaatgtttatgatgtttcagggcaaaacacttcaatattattatttttttgaaaaaacaaaaaaatttgctaatttcatagctaattttttatttttattttaattaattaattattttgagacaggttctcactctgttgcctaggctggagtgcactggcatgattatggctcactgcaacctcgacctcctgagctcaagggatcctcccacctcagcctcctaagtagctgggaccataggcacatgctactacgcccagctacttttcggatatttctttttttgtagagatggggatctcattatgttgttcaggctggtctcgaacgcctgcgctcaagcaatcctcctgcttcgtcatcccaaagtgctgggattacaggcgtgagccactgtgactggctaatttattattactattttttttgctttatagctgataatccacaggattagctcagctgggagagagagatactctcctttaaccagtttttcagaaaatgagaccttaaagaaaatgcaagaattaagccttccagctttagactatccggggatactttttttttttttttttgagacagagtctaactttgtcacccaggctagagtgcagtggcacgatctcggctcactgcaacctctgcctcccaggttcaagtgattctcctgcctcagcctcccgagtatctaggactacaggcacccgccaccatgcctggctaattttcgtatttttagtagagacggggtttcaccatgttggtcaggctggtcttgaactcctgacctcaggcgatccacccgccttggcctcccaaagtgctgggattacaggcatgagccactgcacccagcccagagatacatttttgtaaatctagactggagtcagtggacagctcctcaggcaaagggagaatagtaatactggtatgagtttagagatgatggttgcttcatttgtgccatttttacctatctagcagtaaatcacagtcctgatctgccagaattcactgccagaacttctttaggttccctccccatcaaaactgaaattagagagaggagaggggggcttggtcattaactggaaatgtcacccaaatggaaggggaggggaaaggtgttgcaacactcatgtgcccaccatatacctacacatccatgccactttagcaggtagaagagatgacttcagataccagggaaagcaaacagaggtacacatattggaggcccaggctttcggggatcagctactgttccttgagctccttattcaaatgtaaacacataggttacaattgaaaggccacattttaaaattggccttattctttgagcaagtatgtattaaacatctgcctggcatagaagttcaggaatgggtggagaagaggaggggagaaatgtatctaattgaacacctgactgtaataagcattcattaattatttgataaatgaatgaacggatggatgaacaagcctttaaagaaaaaggaactcaggcctggcgcggtggctcccacctgtaatcccagcactttgggaggccaaggcggggcagatcacttgaggtcaggagttcgagaccagcctggccaacatggtgaaaccccgtctctactaaaaacacaaaaaattagccgggcgtggtggtgtgtacctgtaatcccagctactcaggaggctgaggcgggaaaattgcttgaggccgggaggtggaggttgcagtgagcaagatcacaccactgtactccatcctaggcaacagagcaagactgtgtctcaaaaaaaaaaaaggaactcgctattccttatgttaaaatataacgctaataggacaaagcattgtcctgttggctgagaaggctgtcacagccatgttagcttctggttttatcctcaggctaggcctgctctgctcccagtcatgggactgggatttaaggagttgacagatggtctccaagccatgcctggttgtctgcaagtctaaaaggagctaataaccagtggtgggcttctgtattcaggcctaccattccaccagcagcccaaatgacccccgctcaacacaggcaagaccacaggccctgtgcttggcacagttcctgcaaatgcagaacagccctctttatttcagtctccaggcttctggctggcaaggaacactgcccggctgtgaagcattttataggattataacgggctatgccgaaggcaagttctgaaagacactttgtgccgtttctttgagtgaagctgcctgttagagcagtgttgttcctaagcccgtaaacacacacacaggcagaatggggagctctgggctcctggggccacttagcttggcggcattgcaggactggaccagcttccctcaactgtgacactaaccttagggatatgcttggaggccctcctgcaggggtgcctgttttctgacagtctttgttcacggacacccccagatagtgtctcaggcagattgcctaaaaccccaatctgtcaatggtggagcagtgcattacatatggggaaggtgctgaagtcagggaccaaggtggaaattgcatgaggtcagaaatactcctgaaatagctaatcctgaccttaacctatatactgatggaagttaaaaaaaaatactcctgaaaaatttgttaaatgcctcaaggaccatatacatggcttgtatgcaccccaaattgctggcttgagtttataggctttgttgtaccaaaaatatctgtatttaaacaccagaatcctattctggatggtgagacattcgtgctataagaagcttggaagaatcagaccacccaagagaattccagattcccatctttccttttgtagcttatgcttttttatagcactatttaaattgttacaggccattagtaatctctctgcctctgtctgtctctctttgcctagcatgtatagtggaaaagaggtatgtttgtcatatatatgttgtgtagccctgtgtatttattgatttttatggctccagtatattttaaggaaagcaaagaaatgttttaagagaagatggatacggcagccttctcatcaatcaatatgactgttcattgctctgcaatagttgtgcttcaacctaagttgcactttaacatttcttcggaggccaggcacagtggcttatgcttgtaatcctagcgctttgggaggccgaggtgggtggatcacttgagctcaggaattcaagaccagcctgagcaacatggtgaaacctcatctctacaaaaaatataaaaattagctgggcgtggtgacgtgtgcctgtagtcccagctacttgaggggctgaggcgggaggattgcttgagaccaggaggttgaggctgcagtgagccaagattgtgccactgcactccagcctgggcaacaaagtgagacctgtctcaaaaaaataaaataaacatatttcttagggtttgtttactgttacactggatttatggtatgtcagactccctgcttggccctaaggatactgcaatgagcaacccagtcccagggctatcagacgtcgccagggtgactattttcttcaccaagtgctgtaagtatattttccaacttgagaacacggcccagcaagctcttctgggagtcaaagccagtggctttgatggcaaatgtgttctagttgagatagtggactgtgagggccagaagagcaggcagagaaagaggaataagaagtggctcgggtacttgggcacaggttcttggtggccagacaagccctgagtgacgcatgtcactgcctctggccctgcctttggctgcatagttaatcaggggctacttggagatgaggttactctcacacccccaccaagcttggctaagcttttggagcacttgtgtgagctccccatcagcacagctcaggctaaaaggataaaattgtgttcaggaatacaaataggaaaaatcagtggttctgaggtgctctttcctgccccatacctcttctgagacagttttcttcctattgcttcaggttatctatcgagggaaaaaaactcaggtgctctcttcaatttcagttggaacctccacccattcaggagcttcatttacatgtgtggtaataacaggctggttacacagggcccaattctttctgcctccaaaggcagtttgtctgcactagctgggtaggaaagtaagtggatttagtgtgagggtgtggatttgatacctgggatgaagagctatgtattatgaggtgtcctgcctgagaagtaggaactgctgggttctgacctcagctagaagcaaagagcacgcaaacagggactggatatcaccattcccactatcccctgcatccccaggaagtaaaaacaaaagatagtgtctccatagatcaccacctgatgtagtcatgactttccacatgaggaggaaaaagattcaacagtacagtctacaaaataacttttgagagatgatcattttagggctgggcatggtggcttacacctgtaatcccagcactttgggtggttgaggcaggtggattgcttgagctcaggggttggagaccagcctgggcaaacatggcaaaaccctgtctctacaaaaatacaaaaattagctgggcacactggtccaggcctgtagtcccagctacttgggaggctgaggtggaaagatcacttgagcccaggaggagaaggttgcagtgagccaagatcatgccactacactccagcctgggcaacaaagcaagaccctatctcaaaaaaaaaaaaaagaaagaaaatatgataattataatattttaaaaaactataatttcccaagaagtgccatgaatgaaggtatttttctttttttctcttgagacagggtctcactctgtcaccaggctagagtgcagtggtgcaaccatagctcaccacagccttgaactcttgggctcaggaatcctcccacctcaacctcgggattagctgagactacaggcatgcactaccatacctggctaatttttaaatttttttgtagaggcagggtcttgctatgttgcttaggctggtcttgaactgttggcctcaagccacactgctgccttggccttccaaagtgttgggattacaggtgtgagccactctacctagccatcttttcttttttcttttcttttcttttctttttcctttcttccttcctctatttctttctttttttcttttcttttttattttttctcagggtctctgtcacccaggctggagtgcagtggtatgatcttggctcactgcaacttctgcctcccaggctcaagtgatcctcccacctcagcctctggagtagttgggattacaggtgtgcaccaccatccctggctaattttttgtattttttttgtagacacagggtttcactgctgcccaggctgtatttttcttataaaaaattttaaaacatgagctataagcttaagtcccttttgttcactatctttaattctttaaacccaggtgcctcccttcagccacaggggaactggtaaaagcttgctgtggattcttgtagacagtgttcaatgctatttacccacaaatatgtctttatagaaaatatatgatattctttggtaaacttgtatttttttttaacacaaatggtattgtattatgcttagtctgcaattatttttaaactgagtctaatacattggagatctttccatgccacacccatagacccatctcctttttcactgctgctaagcggtattacacagtgaagaaagtttatttaagcactccctattgatggatatattaccattgtttccagttattttttattttttactgccccagacagggctgctgcaaacaaccttaagatcaatcgccttcttgggcatttataatgtcattgtttctccaaaaaggatccagaaaggtgtggtagtgccaggtcatccatgcacagctttatacttgaaggacactctgtcagattgccctcgagtgtcaggcagcctctgaatatgctagtcaaatttaaaagttggtgcaaagtgggaaaggtctcgagggaattttccgggggtggtggaaatgtttcgtataccgactgtggaggtggttatacgggtgtttacatttgtcagaactcaacaaacggtactcttaaaatgggtgcattttgccatttgtagattatattccactgacattcatttaaaaaaccaaacaaaaacaaaacaaaacaaaaaaaacgtgcagtggcctgggaacagggtaagagagaacaccacccctttctaatgtgggcttttaaaacgctcgcttttccccccaggctccttcctgcctccaggtgtcactacagcctcctttctccccgttgcccggtttcgccccagcctcctttctaccagcagcctttcacccggagagtgccaaagagcccgaaaggagctatcatggggtctgcctgccccgcaatcgcggcccacgctctgcgggggcgcccggagtcgaataccagcggggagagagaggtccctctccacccgcgggaccgccccacgcccctcgcagccccaggaggtgtccgcgctgcggcacgtgggccctcccggcagcgtggggcggtgccgagccggcggcccgccccctccccacccatcaaggcgtggctggcacggtcccgcccactcggctccggagcccagtcgagtcctgcccggctagaagccggctgtcggtctccgtgtcgccgccgccgcccggcatcgtggagctggggcccccttttgcctgggagttttgtagtcgcctagggtcagcggtgacatcccaaagggcaggcccggcagccgccatggtggccaaggattaccccttctacctcacggtcaagagagcgaactgcagcctggagctacccccggccagcggtccggccaaggacgctgaggtagggccgcgccctgcacctggacctctatgggtcatctgcctgtctcgtctgcctccatctcccattctcggcgcccgtccagtgtcactgtctctgtttccatctctcactctccgtgtgtgccactttctctctctacatctctcccacagtcttctttgtgtctccccgtcgccatctctcaccctgtctccttttctctcgctttttctctgtggaccaagcactagctgcctcctctctccctgtccctctacctgccggtctgggagcaactgcctccttgcctttgcagggctctcagactgtccatcttctgtctggactctcagagggactttctcctactgtcagcaagccccagtgtcagggaagtgtcagcaagccccagtgtcgctaccctttaagcgagttttttttgcctgggttgtgagagcagagggacgtaccagccctctcacctgtcagacttggccttgcagccctttggcagcaaaaacaggacacagcgcctctgcctatcacctgtggccagtgagggtcattcagccggggggctggggctaaatgagtaaattggagtgtctcccacatggatcttgaaaatgaattaaagtccttagggtcaatggaaagctgccttggaacattggaaacatttctctttctgggaactttcctgtgccttgcgggcgatgtgaaggagtgctcccaggttatgtttagtctgccttttcctcttgcgtgttatttctctggcacatagctcactggccttaaaggttgggttcagctggaggagaaagcatccctctctttgagggtcttagggaatacagtcgctttcgctagattacagctttgctgtggtcaagctgcggtggaacccacaggacccagctagtcattgccgctcatgcgtgtatctgggagctttccactctcccacacctcactctgcgaacatcaaacatcaccaccaccactggggaaaggctgaaggcaggtgtgcatccggccttgtcacagcattcttgaggttccacccactcgccttccttgggtctgctcagctgtatgcacttggctcactgaatcatgtatattcgggagcacaccatcaaagattcatttcctctagcaagagctgctccaggctgacaggactccaagcagtctctggttgtattcagctttctatacgctgagcacaaactaacttctccctcactcaaacccaaccctacactccagctcagtcgaatattatcacaaagagtttttgttgccagcagctgtgaaagtgtgatggccctagtggcatttgcatagaattcaggttggtcaggcctggaatggatataatattttttcagtgggaacttcctaatttaatcaacataggagcagcgcaattggtgcccactcaaactccacttgtaaggaagaaaggcataaccaataaattaataaattgaagtgggccaaagaaaagaatagtgaggatagctgaggactctaaccagtcccttcctactattacttagtcctgtgtttttgagtagtttagctaaaggcttaggtaaaacttgcctgcttaatttcattttattcttatacatagaatatagatatgtctatatatcacaaatatgaaacttatcacatgtcaaatattaattttcttcattggtagctggatctagactataaaatatgacttattttcctcgtatggggatatcctgatgtgagaaataaggaaggggttggaatagttttggaaatagttggtaaatatttttcagatatcactattggggtttttgttttttagtgtttgatttaaacactaaatcaagtatgctttatacactttgaggcagagatatcttttagcttcatcgatgagcatatcacttcctgataatggaaattggcaaaattggaaaaagaaacctaagtgagtttagtgggtagttttctggtttccttatcagcgcaaaaggcagccaacccttgtaggcctagcttctccataagcagttaactaaaatatattttccaccagtaggtgtcgtcagtattcataaattaaaaaatagcattcgcttgtcagccttttgaaaaacatgattatataattgtttataagctaggcattgactgttaattcctctgaaagtatttttttaagagtgattgttttctttgtggaaagaatgtggttataataaaaagaaaaatagatctatccagaggcctttctaggaaaacaggacttgttgaccttcaaaggccgttgcaacagagcacctgtgccctttaaacatttaatggccgtgtgtaatggctgttccttccgaatttgccttgggtaggacagtgcacacagcatggcactgggaagtgccttctagcattgactcctatccttgcagcaagtgtactggggaaaatcacttaggaaaaggctcctggggaacaggcaagtggcattgatgtgcatttgataccgtacactgagtaaaaaaatatgcaaaaataagcattctcttaaaagcaaataaaatttctactcaagatttaagtgatttgtaattttttatttgtggtagtttccagtgaaagcaaaaaatgatatttttaaaatgtatttttattttctttaaaagatctattttaagcttttgaaaatattctacagggattataatattgcatgtctgttagtataatactgcctcttaatctgctatttcttatgacatgggggtttgaattggttggcaaatgtttaattttaatatccataatcagtgaggtcctgctggctgtaatcattaattgtgaaatctaaggagcttagttcatggctctagaatttcacagaaaaatgtgatatgatacgagcattaagtttatttcttctgatctttgatgcagctttgttcagtttatctgtttttgtatttattggtcatctacttcccatgccaaaagggactggtctacatagctgcgctaaacacctgatcaaatcactaaaagaaaatgtgttacctctaatgaattatcctgattgtaagttaaaaatcaatatttccccgtagtgaggtttgctttttaaaaagaaggcttaaaaaaaaaaaaaaaaaaaacgaagtaaagaaaaggaagcaagctcaggtaaggtgcacacattggctaaggaagctagagccttgtgagaagcttttaagagttttaggtccagttcatttttaatcaaaatacaaagaggtgtttctgttatttttgtaagaatatatctgacaacttggtggacaacttactttcagttttaaaatttaccatcttagatattggtcagattaggcctgatttagttaatggtatttgtagccattgcttttgactctcagcagttttaaaaatttgtagtgccatagaccataggcctatctcatgaatagctgaatactgccctgggtctccaaagtataggttcttattttgacttagccagtagccttgcatgaccctgagaataatgacatgcacctagaaatgacagagctctgctccttttctatgtctaccatgtctagtgtctcacttgagaccccacacttgtaataaggttaacataaagcttgtactgttctctccactttatgaataaggacactgaggggaagcgatttgcagaaagctgcaaagaaaatcagcagctaagccaagatccaatgtcaaatttcctgatggattccgtccagcatttaatatcagcatcccttgtagcacctaagggtgtttacctttgtgggataaaaggtggggtggtagtacaaaacttaacagacatgcaaaatactttaaaatattatcttttaagtataaccttgagcaccttacataactgagaaggtatcctttaaggcccacttctaaagggcaaggtgaaccctatgctcctgccacgatttatgcctctatcagtcaacatgtgcattttaaaattgtatgcacctcgggctgtacttcttgaatgccagctgaaaagccagagggttactggtttctagtaatctatacatttcttggaatctgtatcttattgtattgaacagatagtatacctgaacacacatgaaactagtcataaggagttattgcagttagaatcctgtaatttcttcagatgattaaatagactccaggaatcatatgacctcagagatcttgctggatgggaagccacacggagctacccagaaaaaggccatcacttgctataggatctggttatggtcattgagccatcattccgaggctgttcagttggaaaattattttgggaatcttggtccttaagaatgcacatgaactagcaacagaagaggaaaatatgttgactttacatgtgtacatttaatgctgttcaagggcattgactagaataagactgcctgagtctcaatgctgtctccaccacctgctagttgatgtgaccttggacaagctactgtgcctctccaaacctgtttcctcaatggtaaaatggagatgatgagagctctaactcctaggaccatagtgagggtcaaacgagatgtttcatatacagcgctaaccatagtgcctagcatgtcgtaagtgctcaaaaaatgtcattattattaagacctttacatttcaaaaaaaaagattcttaaaatggttttaagaaacatgatgatcaccagcctaatttcctgaatgttgttttacacacagcagtgcattaggggctttaccgtaagtcctttcatcatcacagtaatcctatgaggttggtattaatgccctgttttgtagaagaagaaacaggctcagaacagggtagtggctttcccaggatggctttaatgctgggtcaaggagatgagactaaaatcccagttgaccctgaagtctgtacttttccaaccacatcacattgcctctaagtgactaaatcattggtcttctcacctcataacacgtgaaggatgaacccacctgcccaaaaaattgcctgatgctcaaaggcccatttttttcctgagtgtctgggtaggaaaccccaccattagtcaatacttctggcagcccacttcatagaacggctgcaacccacgggagtgggatttgcaagcccccatttgggagggttttagtaattttcattttgtgtttctcaagaccaaggagctggtctttggcagaattctgcatgcttagctgtgtggaggtgccaccgtcagttctgttagtcattttgcttatctatattaaccacaagccttctgtgtaaaccaatcactggaaggcccaaataccatctggatatttgcaaattgtgtcattttctcgagacaccctgtgattgcccgtaaaaatcctggacagatgccaccgttttcataactactgaaagaaaataaattactgatcacaacctaattttgcaaagccctgtgtaaatgtaattgttattgatgatgtgtgtatctggaagggctactttgtcatgtatgtgtgcagttgccttccataatttgtcagccttgataatgggtagaggtcacacaaaatgaggaaattgccgtgactgcgttgccatttattcttatgttggctcatggactgtcaggagtgaaagccagtggtttctattgccttcctttttttttttttaattagttgacaccaataactagtttagaagaggctgtgtcatgcccagtgtggtggctcacgcctgtagtcctagcacttggaggctgaggtggtcggatcacgaggtcaggagttcaagaccagcctgaccaacggtgaaaccccatctctactaaaaattcaaaaattagccaggcgtggtggcacacacctgtaatccaagctactcaggagggtgaggcaggagaatcacttgaacctgggaggcagagattgcagtgagccgagcgccactccagtctgagcaacagagcaagagtccatcttcaaaaaaaaaaaagagagagagactgtgtcacaggctaatcaggaaaggtttccaaaccttctactggctgggaaaggagtggctctttttaagtctagaaacacttgtgcccggactttctgtttggaccattgtgtccttttgagagaaggtagccctgattgttagtaaatttcagttaattgaagctgaatgagaaaccttaacggtaagttcactagacttttttcttctttctggctcttaagatgaggaggaaaggagtagcaaaacaggctctttttttctgaggatttatgaagcaaacaaatccagcctccaggaaatgacccagggtcattgcatcagagaacttcagagtgggaaaggcctgttgagaacatgtagcccaattcttatctgctgccagatccattcaatctctgcttaacacctccagggacaacatttcaggttgtatacagttggccctctgtatccactcgttccacatccacggattcaaccaaccattggtcaaaaatatttggatcccaggactttgggaagcagaggcagcaggattgcttgagcccaagagtttgagaccattctgggcaacacagcgagaccccatctctaaaaaaaaaaaaaaatcaaagaattcaccaagcgtggtaacacacacctgtagtcccagttacttgggaggctgaggtgggagaattgctggagccagggagtttgaggctgcaatgagctgagattgtgccactgcaaccctagcctgggtgaaatagggagaccctgtctcagaaaaaaaaagaaaatatcagggaataaaacaataaaaaataacaatacaacaatttaaataatacaaataaaaaacaatacaggataacaacgattatcacttacattgtattggatattctaagtaatctacaaatgatttaaagtgtaagaggatgtgtgtaggatataggcaaacagtatgccattttatatcatggacttgagcatccttagattttggtatctgagagggttctggaaccaatcacccttggatactgaaggatgactgtactccgtctgtgttcagtatagatgatgagaaaatcctttcttagttgtaacattgcttcctgcagcaatgttcagtaatactttcttttttttttttttttgagatagagtctcgctcttattgcccaggctacagtgcagtggtgcgatctcagcttattgcaacctctgcctcccgggttcaagctgttctcctgtctgagcctcccgagtagctgggattacaggcacacgccaccacgccctgctaatttttgtatttttagtagaaacagggtttcaccatgttggccaggctggtctcgaactcctgacctgagataatccacccccctcggcctcccaaagtgataggattacaggcgtgagccaccatgcctggcccagtaatactttcttatgtgttatccctgtaagtatttgaaaaccactctctctctgcacctctcccactccacactcatgtgcattctctcctctccctctctcccctcagatgttttccttctcctggcctggtattcctggttcccttaacttttccaaatgtgacatactgtcctatctctttcctgtccttgcttatttcttctggacatctttagtgtgcctgaaaaacttgagtattaataagtgcaaggatactgtatgatactatgtcaacaaacaggatttcttttaggcttaatatgcttctttagacaagagaagtacactaatatattgaaaaagatttttgaaataaaaatgacagactaaagattaacatctttgtcatataaataatttatacagatatttaaaaaataccctaagatattcattgacaaataagccaaagatactagaaggtagttcatacacaaggaacagtaaagatttaaaatgttcactctagtaggaattatagaaatgaaaaaggcaataataaggtgctattttatacctaactgatgttgcaactatttttaagacataataaaaccaagctgggcatggtgactcacacctgtaatcccagcactttgggaagccgaggcgggcggatcacctgagcttaggagttcaagaccagcctggccaacatggtaaaacccagtctctactaaaaatacaaaaattgctgggcacggtggctcacgcctgtaatcccagcactttgggcagccgaggcgagcggatcatgaggtcaggagatcgagaccatcctggctaacgcggtgaaaccccgtttctactaaaaatacaaaaaattagccgggcgcggtggcgggcacctgtagccccagctactcgggaggctgaggcaggagaatggcgtgaacccgggaggcggagcttgcagtgagccgagattgcgccactgcactccagcctgggcgacagagcaagactccatctcaaaaaaaaaaaaaaaaattatctgggcctggtggcgggagcctgtaatcccagctacttgggagactgaggcaggagaattgcttgaactcgggaggcggaggtagcagtgagctgagatcgcactactgcactgccgcctgggcaacagagtgcaactctgtctcaaaaaaataaaaataaaaaaaaaaaaaaacccaatgccgtgaatgttgcaggaaaataatacacttattggtggggcacagtgtctcatgcctgtaatcatagcactttgggaggctgaggcaggcagattgcttgagcccaggagtttgggaccagcctgcgcaacatagcaagaccttgtctctatttaaaaaaaaaaaataagaaaaagaaaataacacactttctgtgcatactaaaagacaaaaattgttcagatctttgggcgtagtattctagctctagtggagaaaaggctgtgtttccaaagttgttcataatgacattatttgcaataatagccatgctttgtattcgtgcattttacagttttaggcactttcatattctttgacttacttgagtatataattgtcctcattttaaagacgagataccaagggtcagagaggtccaatgatttgcccaagatcacacagctgggaatggcctagctggagcttgaagtctgatggtttggttccagtctagcatcctttcctatttaactggccagaaaagccaacaacctctctgtcctacaatagagcaatagctccatgaccatggcctctggcacaggggtcagtgacatcatttgcagccattactcactagcaaacagaaataccctagtgttcctggaacaaataaagaggaaaaaaagttgagcatgattatatactcattataaccaatttaaacctatatgtgtgcatatgggatgtagagaagaggggacaggcatgttgcaatcaagacaccttcctcctttttcattgtgctcaataaatctagagcaatgccaccctttgttcagatagtagtcagttattttcttttcttttcttttcttttcttttcttttttttttttttgagacagagtctcactcttgtccagtctggagtgcagcagcaagatcttggctcactgcaacctctgcctcctgggttcaagcgattctcctgcctcagcctcccaagtagctgggattacaggcgtgagccaccgcacccagccagcagtcacttattttcacatgcattatctcctttgagccttgcattagctgagggagctggacaaggcaaggactgtccttttttttttttaattttgctattttgtttgtttttaggttttctttttttagtttttcattttttcttcatttttctttttttctgaagctgtcctttttgtttgtcaactgaggaaaaagagattcagagaaattaggaggcagggcccaaatgttggtccctccttgcccagccttgacctcttggcgtgccacaatgttggcttaagccagtcatggttctgggtaggtgataagcagcactgtctctctgggggtgttctaagtgaaccccgttaaagttagccagaacactgtgcagagtaatctccaactgcaaggccctactttaaatttgatgtgagatcactgttaaaacgaaaagcccacaaggaatggatagataaaaacttctgtatacataggtgatgtatttcgtttgttggtttgtgttagaaatagggtcttgttctgttgcctaggctggagtgcagtggcacaatcatggctcactgcagccttaacctctcaggttcaagcgatcctcccacccacctcagcctccagagtagctacagctgtagtcctaggactacagctaggactacaggcgtgtgccaccatgcctggctaattttctttcaattgttttatttttctagagtcagggtctcattatgttgcccagactggtctcgaactccggggttcaagtaatcctcccacctcggcctcccaaggtgctgggattacaggcataagccaccacttctggccacgacatatcttaaaatgatgtctttctgaactctgcagacctaatgtttgcagcagaggtgataaatagtaagaagaaatacagcatttcctgagggcactctttctgtagataccattagcattagaagttggcaacctgattgaattaaataaagctgacagcctatgtcagaaccttgaaaaaaaaatgtgaaaaggaaaaaagaaaggtgaatgttttggacttgccatgggctgtcagatttggaaatgtggagtcttcctagaggaagacgctacagaaagaaaaagggaacaagctagtggcagaaagagatggagttgggccagatggccgaggggggcaaaatggtaagtcttccctgtgggtgctttctgaacccaaggccagggcaagctcccatttcaagtgtgctatcttatgttggcatactaacatttcataatcgcaagtcacgcaggcatttcaagaacgaccccaggcaaatacagagaagataactaaaggtcactggggaagactatttttaatttttgacttcacacaggttggggaggggtggaagtggctcatcaatatcatgttaggttttggcagtcttggttcattttctcagccatcctggtgattgtgttggggatgtctgggtgtgatcttgcagaaggagtcagaaaccactgtaaagaaggaaataagctgttagaagagggaaaactgatggtttcttgtgtgtaagccacagatgcatgatgaactgtcacctccacctccttcctcctcagatgtttggtggtgacttatctgagagctttgaaggagagagcatcagaaaagacatgttgcattctcttattagtctctgaatgctttatgcccaggttccaaaggcctagaagagtgagcttgattctggcaccaacatcgaggaacaggagcttgcttcggaagtctcttaaatgcagcatttatttctaagctggttcttataagagcttcccaagtagctggggacagggcaaaggtaggcttagcttcttggaatttcagagtctgtttctggaatgagaggactggattagttcattgtttcccagaaggtgggtttcataccacttgggcagctcaaatcttataaagacaaatcacaaaataatttaatcactttcccttttaaattatctgatccttctgattatttcaagtttccacttggaattagtgtgtctttaacacctccccatcacttgataatttccctgtgtaactaagtgtaggcctcagggttcattttttaaagttagtttctgtttatggcaggtgatagtgattttccatttaaggcagtgatagagtttatttttacaataagtttttaagtaaaaaatgactaattaaggaaatagtacataatagctcaggtgatatgtacatatggcaaaaaattatcatggcaatacagagagtttggaaacagtgaacaaggcatgttctgaggggctttctaggattagaattctacaataagttcccaagtttgacacagtcacttgcaaactaaacttgaaatttggacatttagcataggacccaaatttcagatactaagtagataaaaattggctttaatgtgttataggaaatgaatctgtgctacgttagccaacttaaaaaataaaagtagatttctgttctcagaacataaatctttttcttttcaaagcgtcaaagaacatgccaaagtgccagctaaaatgattcaaaccatcctgttccttttttccttcactctggtgggaaggattgggtgagattacactttaattggagtcagccctagaatgtactggttaagaatttggatttggaagtcagcctgaactgagtttgaatccgcacttggccacctgtgagctgagagatcttggacttgtgtctcatcctctaagccctagtttcctcatctgaaaattgggaatttgcaagggaattgtgaagatgaaataggcatataaagggcttccaccaaacaagtacttaataggtcattagcagcagcagcagcagcagcagcagcagcagcagcagcagcagcagcatctatcttgaacgtagatcagttgagtagaagctataggtggttatacttagcaaggcatctgctaggaggtagctccttcctttgtaggaaataaagagatcagagttagcattgggcattattatttttaaaacaaaagatgttccaagcatactggcaagcttcacattcatttctgccaggtagaataacaaaaaaatctagtgtggctttctggttgttcccagaatgactttcagacaggggttggtgtgtgagctctgggtagagaggcaccctggccagaggagtagggagcaagttgtcctgaggccggctcccacctgacatgcatcatctgagaatcctagccaagtgccaaccacggacacagacccaaggcaagcagatgagggtggattaggttgctttgagctcttcatgccctattcatttgcagggtgctttaactataaatagatcctttgttggaaatgtagggaaactccatagtgtgatggatatgagctggtaaagagctagacaactaaaaaatgacccctaatgctctttaattgtccataaatatttattgagacctggctctgtgtatcatgttccccctggtttagaaaagccatgctttctgtcctcaaggaacttctacttcagtttgaccaagtcattaacaacacgacaatacgggtagtgactgtcaaccacgaggagggggagaagcaggcaatttcattggggagcttggcagactatggagggggaatactgagaagtggtcatccaataggctccctgatgctggatgcccgccaccccccagtcctcaagtgtgcccttagcagagggcagcatcttctgggggcacataagcgggacacctttgaacctgggctcactaagattctgagggaggagtcaagaggagctgctgattccagagtgatagggcttgaatgccaaatgaacattctgtcctcctccacaccctgcgtcagtgtctacttcctttctgcctctacagcctattcgtttcagggttcctccctggtttaggaaactaacaatgctgtggttaattaagaacccaggccttgctgagttaatagccttgggctcaatttggactgtgtgacttcaggcgaggcccttaacgcctctgagtctcagttgcctacactgtgaaatgggtatattaatagcactaacttaagagaagtcaaggaaataatgcacagaaagcactttggcacagcctagcacaaagtcctcctgtatattgctattatattattattattattattacagaggaagttgtatatcctgggaagccagtgtcggggtggcggggaaagttttcaaggcaggtagatttgaattcagatttcaccactgccagttaattactgggtatgacttggaggaagtcatctcacttctctgaacacctgcttcctcctctatgaaacaggataacggggttgctgtatggcatagatgagagcgtttgtgactccatggctctcagtgcctcctttcctttcctaggcttccctcattgtttatatagtgcttcagagtcacaagagtcacacctgcgtcaggtgtagtaggatgactgctctgtttctagaaaattgctagagtctatgagtaggcaagtgccttggcagggtataatttatttaatcgcaattgatcgaagctttgcagggtcaagtggccctctgcacagtcctgctttgcaaactcaggggcgcccctcgcttgactctcaaatgttggggcagagggaaggagggcctggcatgtaaaagaagaaccttccacttcatccttgtgcccttcccaacctggcagtgcttgggaaacctttaccaaggaaattattttgccaatttagactcccagcagtcttcaaaggaatcctcccctctgtagatggcccatattggaaaacacttgagaaccttgctgctctctgctgcaggcatcctttgcctcaggaataaataccatttttattttaccaccagaatgtccttgtcttttctggaaacttttattgacatcccttaccactgactctacaatggctagccaactttttttttttttttaacaaaacccaacaaccaaatcacaggtttgtatttattctttcattttaagtcagttgccactgtctacccattttccccattatctctttggaattgaaactagctgagagtgatgctgggagcagagctgagtctctgagctccttgccttctttgttgtgtgctgcatcatttttttatattcacaggcttctgcattttaataaactgtagataatgatacatctggttgcatattaattgctgagagttcaaaataacacgtaatcactatgtttcaaggttgcagatgtacagcactgagagccagtgtttgttatgaacctttggaaaaatccgttgttactgggtatttttaaattcttgtcattaaaaatgcactacaggatggaaagtgtctcaacaaatgaaatcagttttgtgttgtgcacacatgcacatacacccctcccaaagaataacattttgaagctattcatctgctcatttggggggtgtgggggcaacagaaatgccagatgaatccattatagattacttacctcacagtttcctgaacagcatgctttgtatcttatttatctgcatacccttgctcagtgagtggtaagatgtcagctgaaagccaaaaacaggaaagtttaagatttttaaaaatttatttccaatttaatcaatcccatgtggttgtttgactagtagctttttccattctgaataatcagatttcaatgtattctgttttcggctgggagcagagtgctctaaaacacccgggtgctgtgtcccctggttctaagtgtggacatgtgctcctgaggacacacatggaccaaacatttgaagggataatttgtgctagaagggacagctgggagttaaccagggagcatcttgaacatattttgtgtttctttctggaggtcacatctctgcaaggcctgtctgctcaaaaccgttgttcttgtcaaaaacggaaaccaactagacatcaagagaaggggatccattttcttctgcagacccagtgcccttggtcagacgtccctgtagtttttacccagcaaccagttaggatccctggtccctgtctagttttcagtcggatgacagacctgactgtcagctttgcttgcctgagatgtgtttgatcatcccagattcagctggaacagtctgtccttcctttgggacactgagattaagatctgagcaccctttttcatctccctacttctttttcctcttctgggaagcaagataatgctgagcttcaaagaacgacagatggatgagaaagagagaggacttttctgtggttctgtgtggtcctttcttggttacacattatttttgtgaagtttcaccttgcacatccgacatgggttgaatgaccagagttcctctcattgcctaattccagacagtattgggatctggcaagactggagaccagctcttctagcccataattcagcagtgttggtggcagtgggcgggtgggaggataatgcaaacctcaagacccatctataaggacccaagattaggacttgggtccttatcttgagattttactgctttcctttcttccaatatagccttgaatcctgccagaccaccgctagttttgccgtatccagccagagcttgactaaacagatgataaaaccacaggaagaaaaggaaggcaggaatatggcatcaaaatacatggtctcgtagcagcctcagtggccagagcagttattggtatgattctggcaggtgacgtggaactctagctttgtccctggaaggatcaaggcaaaatccagtgctgcagggaatagaagagggcaggggcgcaggctggcagagagaccatgcctctcccaggacaacagaaataaggacaatactctgatatttactgaggactaacaggcgggtgtctgccaagcatattatacacctagtctcctgtgatcctcccaacaactctgtgagaaggtaggagagtcatcttcacttcacagtagaggaaactagcttatagaggttatattttgggcccaaggtcgtagggtattgcactctgaccagacaggttggctcatattttatccttagatcctttgcaaagaatcaatgcactctttgggccagagtgataagaactttgtcacttgctgcagaggcattcagattattcctaagctctgagagagcccagaaaatgtccttaaagaagcaggaatggaactccagtggcatccttttcctccttctccaaccccacccaaggggaagcgagggaatcccttttacagtgataaacaaatgcagaacatatattccacccaaaggtttccaagaagtcagtaggaaatgactgactccggaaccccaaagtcacagagactgtcctctggaccccgtggctgtgaccaggagatcttttctacctctgggtgcctcgttgtgtgaccaggagaccttttctacctctgggtgccttgttggcatcatccaaccagggatgtccagccccattttccagaccggcggatgggtgtggcattataggcacgttatttctgtggcattcttgccaaaaatgcataacctgatgtgagaaaacatcctccgggcccatggctggccttcccataagggccacagagacttgatgctgctggcaactctcctaatttttaaggaggttgaactctttaaagttctccagctctgagcatctggccctttctgcctcagaaggcagatgtggagccagggaccgcagagagagctaaatatttggcttcctctttctctgaaggtctgtagcatcatgtctgggcatgaccaagatgagtttcaggcagtgggggctggtgtttgctaaaaggaacttaacaggggtgtgggtgtgcagttctccctctgcccaaggttaagtaatagtaacatcctgtgtaaagagaattgaatgtggttttctgctaaacttcaatgttttagggctgtttattagatgtgtttaatcttgggccaatttaaccagtagcagactaataaaataacagatttgggcttgctgccaggacaaatgttgacttacccttataatgttgactaaaacgagtaactttgaaagttattgcagagtgaaaccttagccagaaatacagcgtctgaaacagtggttttgttttattttactggctctgcttagagattatgtttgtaacctaggctgctgcctgcttcacctctcagagtcctgtattttactgaattatttcccaaggctctttttttcagcccataaaccttcactcagcaaaaatgaatttccccatggcaggcaagtaggagaggttacttttccaatgtgggggcaaaaactcagtggtaccaagaagaatgaaggtaatgacttgcttgagtcttctctcagaaacaaaatggtatgccatgaacattcaccctctccaaatttgtagtaaaattaattgcttctcccgggtgtaccggaagaaatccatctcgcttgccgcctacccccacctttccttcattttgccatgcagtttattacaaacactagagagctatagtattttgctaccatgtgttttggacttgaaggaaacaggggaggccaggaggaaatgaagctaggaggactacagaaattgtcataaagtgtgatttctttctacccctgtttttttaatttgtgttttataggaagctggtttgggcagggcctctgagcatggtttcagaggctcctgccagcattgtgtgagctcagccaactgccaactgtcctccttatacctctcccttattcaaggctcccccgaaagcaaccacctcacagggagactttggccaagaagccataggtgctgaatctgcttttggtgctgactggctcaggcagacagagcttgatatacagagaataaacgtcatccctctaacattaatatgttcagttttatgtacctgagagttgatggtttaatttgtgggtttgcccagactctcttgcgacttctctcatcatctgctctttagcacttccatgagacggggcaagagattgttggagtctcaatccagcagcccgaaagcctgtctgcagcttgggtttgagactgaactaactcagggtgttttgtggattttagttatccaggctgtccctgttccctcattaacaaaaacaaaacaaaccccagcttttttttttttttaagaaggaaattgggatcttttcctcatagcaccttatcttaatatggaggaaagagttgagccattttatcaaaaaggaaatcaaatcccccttggatgcctaatgtgaggcaactggcaaccaaactcacggccggagaaaacaaacacaagaatgtggcttccatgtttgagattagccaagacaaagatagcagggatgcctcccggaacagttcctggtggtttgtcaaagtccacaaagcttgcagtccctttgttgaaatcactgataagcatacaagaggaaaattatagttctgagtttgaagaccttttctcaccttgggggttaaaaaccaataattctgaaacacatttggcctaatcaatgaagtcaggtttccgttgggatttgggcctcattatttgtctttcatcttctgggaacagatgacaccaggtcagttagctctgtgccaggggaaaaaaagaacagaaaaaatatttcaatggaaattttagaattaggaacaattatttcattattattatctttttctatttccaaaaaaataagatgaagagtcatttgcaagctccaaggcagctcccctttctgtacccacagtcttactcctcctttgctcaggcagctctatgaaggcctcctcagtgctgcatatgtgccctacgttcctgtgttgtccaccgcaccatgccctgccttccagccaccccacctgctccttccttgccagctccacctgacactgactctcttgactctttgtggctcaaccttctgattctccctattcagctgggagacattccccacaacagtgacacctgtatacttcaattaaggccactttgcacatactgagtaaacactccctaaattgggctaagaagaatgcacaaagtcacaaagtcctccaaactatgtgttagttacaaagagaataatattaactttacagtggagaaatccagcagacaccacctgtgttagtttcttatgactgctataacaaagtaccataagctaggtggcttaaaacaacaaaaaatttttgtcttattctggaggctaagtctgaaatgaaaatgtcagcagaggccgggtgtggtggctcacacctgtaatcccagcactttggcaggccaaggcaggtggatcacctgaggtcaggagttgagaccagcctggccaacatggtgaaaccctgtctttactaaaaatacaaaaattagccgggtatggtggtgtactcctgtagtcccagctactcgggaggctgaggcaggagaatcgcttgaacccagaggtggaggttgcggtgagctgagattgtgccactgcactctagtcccagtgacagaacgagactctgtctcaaaaaaagaaaaaaaaaaaaaagacaaaagaaaatgtcagcagagccatgctccctctgaaacctgcagaggaatcctttcttcttccaagttcctggtgtttgctggcaatccttcatgttctttggcttgtagatacatcactccagtctccacctctctcttgtcacatggccatcttctccatgtgtgtctctaaatttccctcttcttataaggacaccagtgattagatttagggcctactctaaactagtgtgactcttcttaacttgattttatctacaaagatcctatttccaaataaggtcacattcacaggtatctggagtaagaacttacacttatctttcagtgggggcataattcaatccataagaccatcttaactacgtagtcaaagttaacatcaccagtaataagacttagcaacatggtgtaccacctatatgatataccaggaaggatacatctttgtgttttttcttgccaaaaatgcataacctgaacttaatcgtgagagaacgtaagattaatctaaagtgagagacattctataaaataaccaaccagtactcttcacaagtgtcaattagagagctctagtattttgctataagatcatgaaagacaacaagacagaggaactatatcacagatgggacagaaatataactttggattctagattagatcctggaacagaaaaaggacactagtgggaaaacagaaactggtggaatcccaataactctgttaatagtttagttaatagtattgccccaatgttaatttcttagttttgataaatgtactgtggttatgtaaaatgttaacatagaggtagtggtgtaaaggatgtatgggaacactctactaattttgcaactcttctgtaaatctaagattatttcaaaatcaatgttttgaaaaagagtatgctcatattaagggaatagataagctcacctgttcttagaggcaaagatggcagggggaataatctttagcaaaaacataccaatttgtgagccctattctaggctctgataattatcttgctattcacaaagtactgtgctatgtgctcatcgtcattatctgtctgtttttgggcagaataatgaagcagaggtgtatagtccagtacatggtccacattttgcctctacctgaaatacgtgatcttgtgtatttgtgctccttaaaccttggcttgctcacttataaaatggggataatgatactagctttctcataagatgttctgaagatgccaagagcaaatccttataaagctcttcgcccagcacctgcacagattgtaagttccctgtaaagcatagctcctacccacagaattctcactgctgtattacgaggttatttccccatttttcagttgaagaaactgagtaagtaacttgcttaagacaagattagtgaatatgagagccagactaaaatagataaatctataaaaatatggctcattctcaaccattttgttagaaaaacattaacacaagagggaaaatctgtaggaattcgttgaaagaaaaggtacaaagcaagctgtcaagtgcccccatgctgggtggagtggggccatttgaagtaaagcttatagctgggaagaggcagaagcaggaattaaagaattgtccatggcgtgaacccgggaggcggagcttgcagtgagccaagatggcgccactgcactccagcctgcgcgacagagcgagactccgtctcaaaaaaacaaacaaaaaaaaaaaataaaaaaaaactttttattttgacatgcaccataggcaggcatgtaccaaatacatgtaccatttgacatgtattttgtcacgtacctgtgccctgcacctagctttgacaactaccaacctgtgaccagtcctgttttcctctttttccatccactttctccactgtcattattttgaagtagatcccaggcattatatcactttttatgtcctttgttcatatatatatattaaaatggtcaaggaaagttggcattgtgtttagaaagttaagagaataaaatgcaataaaatagggtttactcacataaaaagtaagtcaaatgtttcccctgtttatcaggggaggaccctgcatgtccagctgcagggagaatatgcaaatcaagcttatgccatctactggagcctgacgatgactaggtgtgcctgtgggagagtgcagtgcctgggagtgttgtccttgggtatgttacagtaaaaaagctgaggctgaggaccactgaccaggacatgactggtcagcaaacaacagtcagcaaactatggcctgaagaccgaatacagctgacttcctatgggcctcaagctaagaataatgtctacatgttataatgattgaaaaatttcaaaagaataatattttgtaagcggggcatagtggctcaaccctgtaatccccagcactttgggaagccgaggcgggagaattgcttgaccccaggaatttgagaccagtctgggaaacatggcaagaccccttctctaaaaaaatttttaaaatttagccaggcatggtggtgagcacctgtagtcccagtttcttgagaggctgaggtgggaagatctgcttgagcccaggaggttgaggctgccgtgagtcgtgatcgtgccactgcacagcagcctgagtgacagagcaagaccctgtctcaaagaatattttgtgacatgaaaactatgaaatttgaattttagtgttcataaataaatgtttaatatgatatagccacacttatttatttacagattgtttgtgtccgaaagcagagatgagtagtcatgacagaggctgggtagccccttacagaaaaagttagccaggccctggggtagggcatgggctctggagtcagcctgactgggtttacatcctggtcaccttgttttagctgaatggctttaagcaaattgctcactacgtgccttagtttctccatctttaaaatagggattgtagtagtagttaccttgtgaggttgttagtaggaataaatatgcaactatatgtaaagcactgagctgagttcctgctaccagtattagctcattattattatttgtttatgctagagtttctcagtcactgtaagattgtaacttcctatttaacatgaggacaatgaaagccacctagaaggttcctgggtggattaaacatgacccttgggagtacagtttccacacaccacctggcacacagatagaaccctgaaaaggctttcctggaatttccaaacatttgaaagactttttttatttggctccatcaactcatgggtaagagtatctgctagcacaatcaattctcacctcttccttgctcctggccagatgtaaagcagctgagagccacactgccctgcaatgcagcagcctgagtccttatgccagtggctacatttccagcctctcctgggtggtgtttgaggctcaataggggtagagtctcagggcagctgcagacatgacatagatgatattcctactattcctcaccccactctggctgcaaaaaggaagtgcagggaaaatgagtggggagttcctgtatgccagtctgtttcaatggaactatttttggaggaataaaaaagtatgctagattatattggtacgataggcattttcttacattgcatatagtctgctttggcttttacctgttgaggggaagaatgaggagaggataaaaatcattgtatcccctagagaaggaatatcaaaatccatttaataaaaaaactcatactaagaataaaattgcatagtgttttattctcctttgttcataattaaacacaagatattttaaattgtcaaatcagtttctttatgaaaaaatatgacctgtatgcctttattctctcctttccttcttcccacccgtcgcttcttttcttctcttcctttttttctttccttgtcctctgactaaatgaagaacaaacatttgataaaagccactgccaattcatgataaaaattcacagcaaagttggtacagaaaagaactttctctgcgtgttaaagggtgcctctcccatgctctcagcaaatatttaatgatgaaatcttattaataatcactgtagaaccaagaattaaactagtatacccactgtcttggcttgtaatcaacaatatacaggtggttctagccagtgcaataagacaagagaaacaaaaatgttataaggcctggaaaagatgaaacaaactgttattcacaaaatactgtctatacagaatgctcagtgtctttttttcttttcttttttttaaactttagtgagatacccttctgccctatcttaaaatcacgtggtggggggtggtgtctgcacttgaaacaggacacttggttcctgggtttagcattgaccttgcccagcttggtctggcagctgagttgttggactaggaagcgtccctgcaggttgtgttctgttacctctctgtaaagcctgaaagcatccctacgattgcatttgctagttctcagtagagctatttaacaagaatctggaaacattttccctgagggctctctttagacagcagtaaaatgtagctggagacatattgagtaaatggaaaagaaaaatctaatgaggccaggaatttttttaatcttctattctcacagaaggcctcaaggagaacaccataattcatattttactcatgtgggttaggcataaagcctcccccatagatccaataacctgtaagtgttctggttttgaaattgcacctgcttacattgctggatcatagcactaaatcacacagcaacggcttctggttcaattgttcattacttgggaatgtcagattgccagagagcagcctgatgtttacatccaaatcggcaatgccttaggaaatcagttttaattacaatctcacgtagcagcactgcactcaaccttcagagaggctgggatttgtgttgaacctacatcttatagctgtgcagaaaatgcctgtccgactgggtcatgcaaaatggacagcaaagtcagcagaaccttagaaaagatgacacagcaagtggaacacagctggatcatcccccgtcctgtcaagcgtgcagtgctctctggcccctttttaaaacaagggaacccagttggcgtttgcctttcagcttccccattctgatataaaaatctgtgacccagcagctttaaccataaaaaagagagagagaaagagaaagactcagagtcagcgggcaggattctctgagaccaggtcctgctccctcagggaatctttgtcacctcacttgctgtaatgcagtttgtgccaccaacctggcattttcagcccaaagcaggagccatttagacaaattcaggggatgcttaagaggcagtgtgtgtgtgtgtgtgtgtgcttgcgcgtgtgtgtgtgtgtgtattcagtacgctagtggtgcagctctgacgtaaaaaaatgttttaaaccctcctctgagcacaaatgctcaagagcctggcactggacagggagcatcctgaagggcattgtcacctgaagcagaagagctgtcagatctttcccttcagcacttaaatcattgtcacgcaatggctttcatcttgggagattcatcctctgcattttggaactgagccttcctagtgttctgagagttttctgctgtctgttcagcttagcacgctaagaagctggagaggtacccagcagcctggttgcattctccgtcttggaaaagtatttaactgctttgagaaatcatggaatcgtttctggccacattgtgagattgtattgaattttctttttaagtttttaaatttttatatgcaaatgctggaaagcttggagacagtctatttcaaagaaggctgttgatttctgagactggcaggggcataaaatgacatgagagtgtctcagcaggattccaaattcacgaaagatttttccaggcacctactatgttcagaacggggatgcagaaatatcctggagaatctgaagttctgccttaaccctcgaaactttgaaagcaatggctgaaaaggaaagatgaatacctagaggctccctctggaaatgattgaggtttgccaccacaattggctactttggctttgcccatcaaaatttggtatcttcatgtgctgtctagcatctactacaggtcagatggagcttaggaggacaagggtaactcttctctttgtctttgtaaaatgttttgtctatcatcattctcttccccatagcctgttttttttttgttgttgttgttgtttgtttgtttgttttttgtttttttgacacagagtctctgtcaaccaggctggagtgcagtggcgcaatctcggctcactggaacctccacctcccaggttcaagcaatcccacgcctcccgagtagctgggattacaggcacctgccaccacgcccagctaatttttgtattttagtagagatgtagtttcaccatcttggccaggctggtcttgaactcctgacctcgtgatccacccacttcgccctcccaaagtgctttgattacaggcatgagccactgcgcctggccaggctgttatttttatttatgtaattcttgtctgcaaagtccttggaatgggtaggcgccctcccacctatcagcctggtttgaagtaacttgcagatttgcaactaatgttttatgtggaggtgattttcaaaacttgtggctatatatagtatagaaaccgatgtccgtggtagggctttttctctatacattttcttttgccgtctggttataatttataaatattaatatgtgcatttcaaatatgctgtagatacaaagatgctttcttaagagcccagtaatagaacttcttttttaaattttttttttttaatttaatgaagtaagaaaacaatcttggtgctttaggaaagccattgcataagagtggctttaggcaagatggggaaaaggtttttaaagagatgaaaccagaagcaacaaaagacaaggtcattgggtgagaaatcagacactgcttttctctacagaaggggtggggagactggttctactaagtggaagcttctgaattaaaagctggcagatgctgggggtgagggataaggagcagatccctgccccttttctgtcttcccagatactgcctctgttgacatcccctgcctgccatttctccttccctgcctcctaagccaggtcatctccatacagccagagtgagacgtgacactttatattccatagatcagtgtacaaccagtaccttgtggagtggaacacagttgtatgatggagttatgttgtctttgcaattgaccttgacattttacttttttttttttttaactctataggagcctagtaataaacgggtcaaacccctttcccgagtcacgtcgctagcaaacctcatcccgcccgtgaaggccacgccattaaagcgcttcagtcaaaccctgcaggtaagaagggcacacagggcctgtggttgcagaaaatcatggtgtacgggaaggaacatccccatcctacctagaatttcccctggtttcaaagtgacctgaatcaatgcttatttcaatagaagagtgcaagtgaggggacttggaggaagaaagatgtttttcaagttgcagtcaagggtcatgcagagccagagctgttgtggttgggcctttccccacaattgtatttcagagttatgtgccccatccagacatactctcacgcgatttttttcctaaaatatctatgggcctcctgaggaaaccagcacatgatgttagctggagggcaacagagcctagtagcttcaaccagggtcggcaaactgcattgggtggagaaaatccagttcaccacctgtttttttatggctcacaagctaagcctgatttttactttttaaaattcttgggggaaagtcaaaagaatggtgctgtttcgtgacacatgaaaacgacatgaaattcaaatttcagtatccataaataaagttttgttggaacatagccatgcccatctgtttattgtccatggctgctttgtactatggcataattgagtagttgtgacagagaccatattgcccacaaagccaaaaatatttaccatctggccctttacataaaatgtttgctgacccttggcttagaatgaggacctaaggacctcggagtggaagtaccttgggttctaacctcggctcaccttgggcaggtgacttaacatctctaggtcttgcttttattttttattaaaaaaatgttttttccatacttcatcctacagataggtcttgcttctattccatatcagtaaatttgccatgatgccaccaaacgttcatggaatcattgtaaagatttacaagacagtgcatttaaagggcatagcataacaccttggcccttagttagcaatcattaatcttcaaattcgttaactaagtagtaaatattagctactatgatagttttttagttaacaagtagttatagttgttcttaaactgttgatgaagtgtatcttttaaagtgaacgttgagatttatccaagcccttggaccaatttgataattatacaaattttcttttagattgaagcccacaaaaaatatgccatgaaaaggctcacctggtttagctgagcagcagtcttgagtctgccatgtatttgtcctgaatgcttttgcttggcaatattttgtatctctgctttctgagtctttaagaaaactggggaccagaacccaaggcatgcctcatgctgtgaaaatccatgacttgagaactgtttgaggttctccctcagccctttctgtccttgcctgcctaccatacagccaatatgtcatgactccacatagcccaagtggttcttgctactttcccatagatgcccttcctctccattgcttttcccctgccctgcccgttcctctgttaactctgttgcagtttctcctgaatgaatacctcacgtaattagctataggtttgggtctgtttctctcagcacttgggccgctggatccctggttaataccctgatcccttttgtgggagaatggaggaaagagaaaataaggtcatctgggagagcaagatgaagggctttgaaactagtgaagaagaatgtgtttaccttttctcccttgtgaccagttcttcagccctctcgacaagttcatcgcaggcatcccctggaagattcatcactgccctagtcccgcacatctggtctctcactgagttactgctttttgaaaattcttcagaatgtctactgcatttcaccctttcctctccatcccagtggctgtggctcaagttcactctgcaattatttccttccttgattgtcagacctccaaattaccagccatctcttcccattattgctcccaggacagtccaccctctgcccaggaaggccctcattcattcagtcagtgttgagtgaatcctcatcaggcattaggctcttcttgccctcatattgctatgttccagatataacagaattgccttttggtaggtttgctgcagtgctgtgttcccacatggcagtaatgagctagacctaggcagccagccaaccatcacctacaaatgtccccacctctcccaattgcccttctaacacctggccctttactctctgtcattgccttgcctagttggtaggctttttgtgtttgtgctcctgggcctaggaagagcacaatctgtgcctcccactacagcccagccctggctgctttaagatctgttaccataccttcaaaatctttcttttggcttctcaggcaaaatttctttcttctgtttctggggttccttcacaggtaacagtgcaggaaacatttgctcacctcagaaatttacattgacctagagaactagaacagaaagaaatcaagccatgtctgaaatccagcagactgaggccaagcaaggatgagaaagccagacccaaaggaggatctgacatgtggaaattggtttttaaaacctcaaagatttttttggcaaaataatttttttttttttttgagatggagtttcacccttgttgcctgggctggagtgcagtggcgcgatctcagctcaccgcaacctccacctctcgggttcaagcgattctcctgcctcagcctctcaaatagctgggattacagtcacccaccaccacgcctggctaattttttgtatttttagtagagatggtgtttctccatgttggccagactggtctcaaactcctgacctaaagtgatccacctgcctcggcctcccaaagtgcaaaataagtttttaagttaattttttcaaatattgtgataaatagcttactctaagctttatatattggccagaaacaacccagcagaaacagaagagttattcacaatggtaatgtacatagatatggagagaattgagcgatgtgcttatgtttgagagtgtccttggggggacagtgaatggaaatacacccctcaagttgtatgcagagttagcagccatgtttgcagaatgatctgcaaagcatggagaatgccagcttgtccccacatgtcttcttgtaactcaccttggtgcacacggtgcaacttctatggcattatttccagccctagcatctcaataatagtttccctcaccagctagactgagagaaggtgccaatttatattttattttatttcattttattttaatttaatttaatttaatttaatttaatttaattttcgagacagagtcttgctctgtcacccaggctggagtgcagtggcgtgatcgtggctcacctccacctgcgcctcctgggttcaagtgattctcctgcctcagcctcccgagtagctgggattacaggtgcccaccatcacacctggctaatttttgtgtttttagtagagacggtttcgccatgttggccaggctggtctcagactcctgaccttaggtaatccgccagctcagcctcccaaagtgctgggattacagacatgagccactgcacctggctggatgctaatttaatgtggcctgggagcagtaaggatgagggggaagagctggccccaaaggggtgctcagtgggctcacttcacatcctctccgattttgtctaagtcttggttccctttccaataagggagaaacagagaacaaagagtgtatcagctgccccaaacctctcagcagccatccattacccatatgtgtgtattatttatgccttttctattccaaaaatgactcaaggctgtaattgagcagcttggttctctgttgcagtattccttttccctggcttctgacaccttagagacatatatattcctttggatattcaattatgtctctcaggttggattcttttaattatagaagagatgacttaagcccaaataaggtgctctaatcagtgctggaacacttagcagaccttcctctggttcctcaggagaccacaagttagcccaggaggatatcaggagagctctgggctggcagccacttccaaaaatgttaaaagcccagtcacacatgtgagtggtccttgcagccacagttcagcaagacactgcaggatttgttctctcttgcttcctgtgcccatatgggctgggggcttgcaccccaacacaaaggcagcatttgtggacgctggggagggacagcctgactgcatggctctctatctgcttctcaccaggaaggttagcactgccggtagactcaagcacagatgtctggatccctctgagcctataaattccctccctggcctgcctgagaggaaaatctggcccagctctgaaaggggacctcatgcgctcctctggtgtggagtgaggaaggcgagctcgcctttggccagtcgctccctgagccctgcctctccctgtccacagctgttcacggctactggactcatttgagctgagttcagcacatgctatggaatgttgtgttcatgatgttgtgatgtagcccctcattctctttggacttgcactttttccttttccattataaaagtgaatgttcattatggaaaaatgcagaaaaggagaaagagaaaaagaacatgtatagtcttccaactccaaaacaatccattaatagtttaccagtttccctctagcactattctaggcataggtgcagagctcacgtactctgagcctagttttgggttcctcacagtctattcagccttatctctgtctgggtgatctgctcacttttaggttaaagcctcccacagtgactgtggatgatcagtttctcttgcatctctgtcagtctcagcctcacacatttccaagctatgcagttaggtgcacaaatgttcatatttgtcaccattacagcctcctgggggagttgcaccttttattaggattaaatattcctgtttatttcctttaacgctttttgccttggattttgtcgtcatcttcttcttttttttttttttttgcattttgcttaatgtgttttattccatctctattttcctcctccctttgttatttggctgggcaaggagtttttatctagcttaggggggagtattatgtcacagttattcttggaaaatattatctttatgggctgagtatatattattctacataaccagtctcctattaacacatatttaggctgtgaatatttttatattaaataactctatgttgaatctttttaatgcatttgtccttttttttttaaattaccttctattgtgctttgttttctgataatataacatcatttaaatattgaggccgggtgtagtggctcacacctgtaatctcagcactttgagaggctgaagcgggtggatcaccagaggtcaggagttcgagaccaacctggccaacatggcgaaaccctgtctctactaaaaatacaaaaaattagccgggcgtggtggcacacgcctgtaatcctagctactctggaggctgaggcaggcagaattgcttgaacccagaaggcagaggtcacagcgagcagagattgcgccactgtactccagcctgggtgacagactgagactatgtctcaaaaatatatatatatattgaggctggggctgggcatggtggctcacgcatgtaatcccagcactttgggaagccggggcaggtggatcgcttgaggtcaggagtttgagaccagcctggccaacatggtgaaaccccgtctctaccaaaaaacacgaaaattagctgggcgtagtggtgcatacctgttgtcccagctacttgggaggctgaggtgggaggatcacttgaannnnnnnnnnnnnnnnnnnnnnnnnnnnnnnnnnnnnnnnnnnnnnnnnnnnnnnnnnnnnnnnnnnnnnnnnnnnnnnnnnnnnnnnnnnnnnnnnnnnnnnnnnnnnnnnnnnnnnnnnnnnnnnnnnnnnnnnnnnnnnnnnnnnnnnnnnnnnnnnnnnnnnnnnnnnnnnnnnnnnnnnnnnnnnnnnnngcattttttttttttttttttttttttgagacggagtctcgctttgttgcccaggctggagtgcagtggcgcaatctcagctcactgcaagctctgcctcccgggttcaagccattctcctgtctcggcctccccagtagctgggactataggcgcccgccaccacgcccggctaattttttaatattttttagtagagacggggtttcaccatgttagccaggatggcctcaatctcctgacctcatgatctgcccgcctcagcctcccaaagtgctgggattacaggcgtgagccaccgcgcccggccgcatgtgcattttttaaaacaaaatgactatcacactgtatatgctatttttttactccctttggtcttaacggtataaaataactctacaatagaagagtatttttcatgtcgttaagtagttttcaaagacttgatttttttttttttttaatagagacaaaaatctccctatgttgcccagactggtctcaaactcctggcctcaagcagtcctaccaccctggcctcccaaagtgctgggattataggcatgagctaccacacctcgccacagacctgattcttaatggactcataaagcatttcatcaaaagaatgtacagttgagttaatcactctcctgttgttgaacatttgtttctgttttttcatcattatagataacagtgctttcaacatcctgatcatgtgtatgtctgtatttctttctttcctttgattatactcctagaaatggaattctggtcaaagggtgtgaatactaaaggccgttgatacggcaaggcttctgttcttgatgtgtgtcagttttggatagaattgcttctctgttttcacatctaaatctagacttcttacatttctccttctcttttgctacagtttttctctttgctgtgatatccctcaagatagctcttcccaggggtcccttgggttttccatgcaagccaaggtggtgtcttacttatctctgtatccacagtgcctaatactacacattacttaggatgtgctcaaaaattagtacttgctattattatcaccgttatgactagaaaaggcagccattgctgctcctaagctctctgcagagcctggcagtggctgccagtgatggggccctgcccatcttcttcaactgggctgaaggagaatatgtgtcccctcccccagttgtagcccctccaggaagtattgctatggcaaagaagggtttctagcaaccactgcctctcattgctccatcctctggcccttagatcagggagttattttattcaacccagatgcagcatgaacatatgataaattagtggtctccattaatgttatttggatctactgtgttatttattctgcctagacttaatggggagagagtcaatacagaaaggtaggtagtcctgctctagagattgtaaaagttctacttgataaaagttgtctaaggtatattagcaagtagaggaagaaaattgggggaaagttcaaaaccactgtcccagttgataatatacacccatattagtatatggatagggaaaaaaaaccaggaacgtcaaattcttttttttttctgttgtctcttgggaatacaattatacttttgcagttcttttgtttattttgtgttctcctccttttttccccagtatgtaagaattacaaatgaatagaaaataaatgagttggaactattgattttttcattatatatttctgttatacttgaattttttaatatgtattacctttgcaaccaaataaaaatgaataagattagaaaatcttctatgataaaatatactacagagagagtttagcaatggcctgaggggtcgtcaaggaaggctgcttagcaagggtggagggatttgggttgggcctggaatggctcacagatgataaggatgaaagggaggaagcgtttcaggcttcagaagggaatatgggatggctgatgccatctagatataagaaataataagtaagaaattacccaagcatatgtgctgatttccatgtctggcaaccatgattaccttctccaaggacctcaaactttgtcccttggtccaaggtcataaattttctataactaacttatttggctgacatggagatgagcttgggggtggaaggcacatgtgtgttagggaaagcaaccagaaaccagactgtcttgtaatgggtatccaagggagaggatataatcatgggttcttagtttctctttctggttgggccagtaaagccccttccttatccctcttttccgcttatcactggaaacagaaactaaaaaccatggcttcaggctgctaaaagcctaaaacaaaacaaacagaacaacaacaaaataaggcaagttggacaagcttggagagtatagctgacaagttatctgtagtccatctcaagaggaactcctgattctctgctgttctttactattcctggagtggtagaatattactgtttattgttcctggaagccactgtaaatagttgatattgggccgggtgcggtggctcatgcctgtaatcctagcactttgggaggccgagacaggcggattgcctgagctcaggagttcaagaccagtctgggcaagatggtgaaaccccgtctctactaaaatacaaaatatcagctaggcttggtggcaggcgcctgtaatcccagctactcaggaggctgaggcacgagaattgctcgaacccgggaggcggaggctgcagtgagctgagatcgtgccacttcattccagcctgggcaacaaagcgaaactctgtctcaaaaaaaaaaaaaaaaaatttgttgactattgtaatttaaagcttgtcattttttatttagtaataacactcattagtgtagtatctatgatgaaccaggttctgcacaaagtaccttatgttcatggcctcatatcgtcttctccaaaactctgcaagataggattcatcaccacttatagggagagatctgaaagtttaaaattgtacccaaggtcacacagctggtaagtgccagagctgggattccgtagggtgttcagagtgcctctcctgccgtaggcttatcacaaaaagtcaaagtttggtcataataaagcctgaagtttggcaggatttaaaaatagtcaccagacttttgagttggagcatcccacctcactgctgttcaccttctgtggcagggagagtcatcatttccatttcagcttgtggaatatcttgtcattaacattctcatgcaaaagccattttatggtgcccaatgaagatggttgagctactgccccaagcctctggaagccttcctaattttggacttgcactatgcaaattgtataatattttctctacacctaagccaaatattttcttcagcttttcattcattctactcagaatatctccaagctacagaagggtttcttgttgtactgggtctttgaggtttgacatttattgattatgaattaattgggtgcccttttaccatggttttaatgtgcatcaatctgaatcagattgtaaatatgtggttttatgtttattgcaccatttctaactcagtgttcattgtctttcatgttcgtcaactgaccgtgtttcttcttagttaatatttcttcattaaagaaagtctggaaaataaatgtagagaattaaaagatgaaaataaaaatcagccaggtgcagtggctcacacctgtaattccatcactttgtgaggctgaaacaagaggattgcttgaggccaggagttcaagactagcctgggcaatatagtaaggccctgtccctacaaaaaaaaataaaataaaatcaaaaaattaaaaataaataaaattttaaaaagaaaacaaaaattatccgtagtcccaccatccaggggtgtaaaccttgttaacattttgttgtatttcaaattgggatctttcttctctcacttaactctgcatgtgaggctctctccttatcattaagcttttctcaaaaagaatgtttcttaacaactgtttaaggttcccttttattgttgcagagtaatttgtttaatccctattgtagaacattttaggctgtttccagatcttttataaacaacagtgtcctgctgagggcttttctttccctaggagttatcctaatggaagtccctctaggagccatttggcccaggtagttcagaaagatgtgtctgctgtttgctaatgaatgaaagcacgtataaacaagcactaatagtggcagtgtggtctgtggtatgacaatgataggtaactaccattcctgctgaccgagtgccagggacttggccaagcctcttgtgtactttatcttatccaatcctcactacaactttgtgaggtacttattattatgcaccttttagagatgaggaaactgagacccagagagatgaaaggtctctcagccattgaatcaacttgaagccatgcctgttttactccaaagcctatgttcttcacccaaatccatgttttggagtcaaacaattgcactcagttcctattccaacacttaacttgtgccactcacttaccactctgctactcaaattactcatcctctcctaggattagcatgagggtcaaatgtgacagagaccacacagctgggaagtgttacttctcacttaacattaatttctgtaatggagcctcataggagactcctccaggatgctgttggttaacattttcctgtcctggccattattgctgtacattttggtttaacccaccgcagtggcaacataggagagttttttcctcttacagtcccaccccaacctccaatccctgataataaaccatctgctacaaaatagcaatatggttagcatggtaagtgtggagaatttccttggcttgaatactttattggagcatgttatctgtggctgtggaaaatggtttttggaaaagggcaagggaggactccgctgaacaggcggcattaacaaatcagatctgtcccatcatgtctacctgctgggtttacatttcctctgacacgtgtaaagcgcacatgccacccccgtcccccaacccccggcagacagtctgttttgcatctgcagcatcttttccacatatccagcttgggcataaacttgagcaccatttcctcaatctgcattatctctgttttatggtcattgttgttttagctgccagcaattatgagattgcagtttttgactcatttgctaggccagattccctcatggaaactcttgcttgtcctggaatatttttcactccggtcccagcatccccacacccagggagatctatgtatgtgcttctgtttttatgtggtcctgcccaaggccaggtccctcactttgaggtgggcctcttctagttaccgtggactggcgtttctcaccccaggaacatttggcaatgtctggaggtgttttggttgtcataactgggctggctgtgctgctggcatctggtggttagagggcaaagatgatgcgaaatatcctacaatgcacaggagagcctcccacaataaagaatctctagtccaaaatgttgtggtggccaggttgagaaactttctacaggccaagaagtaaactacagttcatttatttgggcacatgtaccccgctacactatgaatcttatcctagggcaattagggtaggatattggttaaatattggggcagggaggttggcctgaaatagaccagacttggattgtcattctgacagtcaccttaccaccgggttttaaataataaagcaccattcattagctgtgtgaccttcagcaaagtgtcaccttctctgagcctcaagtttccttgtctgtaaaggggacagaatccttacctctcagataagcagggctctaaagctcccctcacagtgcccagcacatagcaagcataacatttaatcattaagcaaaagttgttgaggtcttactatatcagttgctgatgaatccatcagtgaatagaggaggtagatatgcctgccttcaaggagtttaccttctattggaaggaaatagacatgaaagaaacaaacaaacctataaatacagcacatgttgaatataaaaaaaaaagagaagggcagagggtgtgtagatggacagtggcagggatgctgatagggatgtggctgttcttctctctaaagaggcatcctcttggagtttttttcttctagtagtagttgcctgttcctccctcaactctagttctctcatgtagtttttcccagtggtactgatgatgggttcaggggtagctcatggtatgtggtcagtgctgttatgaacacctgcccatcacccatgtgctgtccccagaccagaccagctgctgccccttttccccggggccagacggctgctgaccactcactggtttggtattcttttattattattcttttttatagagacagggtcttgctacattgcccaggctggtttcaaactcctggcctcaggtaatcctcccatctcagcctgtcaaattgctagacttacaggtgtcagtaacctcacctggacaaatggttggcattctttattcctcccttgggattcttctttcaacatccagtcccttctgagtggagtaagaaaaaatgtttcttttaatccagcctaattaaaggtgtaaatttgaaatttgattggtcagatatcagccattattcctaaaactgagcaaatgtattctctctctttccttaagtagatttatattcctagaaggcaggagctggatcccatctcattgaaacttccccaaaatgcatgtcttgcatgtaaacagtagatgcagtccccaaagtagaaagagctcaggctctgttggaaccagatctggttttgaatcttagcctccctcaacctcagtttcctcctcagtagaatgggaataaacccccaacttgcagggtggttgtgagaatcagagagaatatatcagaagtgctacgtgtaggcaaagcgcataaaagaccctctgtgatatcccccatagtaccctgagcccagcaatcactagggaaacgcaaagcaagaaattcatagtggtagagctcacctagtacagcttactgctctcttttttcccatgccgcagcagaagacaatctccaactctctgggaaatttttaaataaattaattaaaatatgctcaatcttaccttcaaaacacaaaactgaaattaaggtatagttgtttaacctatcagattgataataataccttgttgatgagagtgtgagcaaagtgtactattatgtacctatctgaggaatataaagttgaatagcctatttggaggtcaacttagtggtacatctcaaacattaaaatgttcatacttcttagaccaaggaattccacttaaggaattcctgccttttagaagtatcagcacaaatacacaaagcatgttcactgaggcactttttgtaatagccagacactggaaacaattttaatgtccatcagttgtggattgattaaatcaataggtctgtccagactatgggagggatactaattctgcagccattaaaaagaatacgtgaatttgaggtaatggaaatgttttggaactaaatagagatggtagttgtacaaccttgtgaatatactaaatagcactgaattgttcactaaaaaatggttaattgtaggctgggcacagtggctcatgcctgtaatcccagcagtttgggaggctgaggcgggaggatctcttgagaccagaagttcaagaccaacctgggcaacacagcaagaccccatgtctactaaatcaaaaatacaaaagttagccaggcacttgcttagcggtggcactcatctataatctcagctactcaagagattgaggtggaagcatcacttgagcccatgagtttgaggttacagtgagatatggttgcaccactgcactccagtatgggcaacagagcaagacccatctccaaaaaaacaacaacgaaaaagtaattgagttatgtaaatttcacctcaagatactgtcaagtagaaagagaaaacattctcggccaggcgcggaggctcacgcctgtaatcccagcacttcgggaggccaaggcaggcggatcacgaggtcaggagatcgagaccaacatggtgaaaccccatctctactaaaaatacaaaaaaattagctgggcctggtggcgggctcctgtagtcccagctacttgggaggctgaggcaggagaatggtgtgaacccaataggcagagcttgcagtgagccgagatcgtgccactgcactccagcctgggcgacagagcgagactccatctcaaaaaaaaaaaaaaaaaaaaattcagttttctatgaatgttaacaaatgcatggaaaaagtttggaaagagctagaacaaacttaacagttgttacttctaggagatagacttggggaaatgagggcatttgtacttaattttatatacttttgtaatgtatgagaatttaaagttagcatacattattttcaaactggtagggggagtttaaagttagccaaggactgaaaatataacaggataggaggttgattctctcaagtgaaagtggaaactttcattttgaagtttttgtgtgtgtttcctttctttctgctctttaattcttaactcagctgccatcagaactgcaaactgggttgagcaagttacttaatgactcactgcacttgttttgaccttttaatgcttgtggctaattgattccgagtgctggcgatctgtgtgcatttagttcctggttactgtttacaagggactgtttttaagagatcacaaggatttgtaagataccattagtgaactgtgtatttggtgcaagtactttcttgacctgcatagggctggtccagccatcatgagctcattagtgagcccaggagcacccccactacttgtgccagcctaaggggcttgtgttgctacttgcagagtgagcgtcctgcttccagaaggttgtggtaataccctgaagctctttggaagtttctttttacatttttcatttattcttacatatatatctatatatatttttttaatttagaactgaaatgaggtcttgctacgttgcccagagtggtctcgaactcctcagctcaagccatccgcctgccttggcttcccgaagaactgggattacagacatgagccaccaagccccgcctcattttctatttttttttttttcctttagagggagtcttgctctgtcgcccaggctggagtacagtggcgcaatctcagcttactacaatctccacttcacgggttcaagcaattcttctgcctcagcttcccaagtagctgggattacaggcacctaccatcacgtccagctaattttttttgtatttttaataaagacagggtttcaccatgttggccaggctggtcttgaactcctgacctcaggtgacccacccacctcggcttcccaaagtgctgggattacaggcgtgagccaccacgcccagccattttagacactttgggaggccgaggcggggcggatcacgaggtcacgagatggagaccaccctggctaacacagtgagaccccgtctctactaaaaatacaaaaaattagccgggcgtggtggcaggtgcctgtagtcccagctacttgggaggctgaggcaggagaatggtgtgaacccgggaggcggagcttgcagtgagctgagattgcgccactgcacaccagcctgggcgacagagcaagactccatctcaaaacaaaaaaaaaaggctaaaaatatataaaggaggacagaaatcactcataatgtcaacatgaaacaacaatagaattttgtgatgttccctttatatctttgctcatgtgcattttttgcataactataaaatgttcacatatagatttttaatcctgattttattttaggctacatagaaggggtgtttacattttaaattatctctgaattgtctagataatattccatccagcaggtaattataacttttttttttttctgagacggagtctcactcttgtcgcccagactggagtgcagtggcacgatcttggctcactgcaatctccgcctcctgggttcaagcgattctcctgcctcagcctcctgagtagctgggattacaggcacatgccaccacgccccggctaatttttgtacttttagtagagacggggtttcaccatgttggccaggctggtgtcaaactgctgacctcaggtgacccacccacctcggcttcccaaagtgctgggattacaggcgtgagccactgtgcccagccacttacaacttatttaacaatgcccttatgttgaatagttccttttaaaatttttctttactttctggaattttattgttgaatctcaaaataactgggaactaccttagaatgcctttgtgatgaaggctcatatgtcataagcaaattcaattcctgacctcaggaagtttctagttaagagcaggtgaccaataattataatcaagtatgatcattgctatatcagaagtatgtctgaattgctctgggggaggaggatgggagaatgttggtgaagacttcttagaggaggtgctgtttgagttacatcccgagggcagttaagagttagccagctatggccggacacagtggctcatgcctgtaattccagcacttcgggaggccgaggcgggcggatcacgaggtcaggaaatcgagagcatcctggctaacatggtgaaaccctgtctctactgaaaatacaaaaaattagccgggcgtggtggcgggcgcctgtaggcccagctactcaggaggctgaagcaagagagtggcgtgaacccaggaggcggggcttgcagtgagccgagatcgcaccactgtactccagcctgggcgacagagcaagactctgtctcaaaaaaaaaaaaaaaaaaaaaagccagctatgaagtgatggaaacacattccaggaagagaagattgtttgaagggagtacagagggatggcaaagcatgacatatttagggaatgacagatagcctagtatggttggagaaatggaggctcatggatgagtggcaggatgggatcctaaatatggagactgtggtcagattacaagagacttcctgtgccaagatgaggagttgaaacttcctgctgaaggccacagagagccatggcagggaacacttcctaaataacaatgtggttttggagcacagcaacctcattgctttggcaaagtctccaataagtgtgatgaaatcttctaggatgaagactgaaaatgatgcactcagctttcttctggatcatttgtatttgtcatgaaaagcattttggtagcatgtttaagtcacacaggtggacttctgcggcctctttgggaaataggaaaatacctcagggacaggaatcatgtgctgcaaagatggtatttagtatgtgtattagtcaggacttttcaagttgacagaaccccaactgagataatagaaagggaaatgtctttctatatgtaatgaaaatgtctaagggtggttctttctggtttcaggcacagtgggatccagaggctcaagcagtattggtaaagcttgctcccttcctgcctccattggtcactccatccttcattctgggtctctttattctctcctgtagcagacagatgcttctgtgtaactagggagagttgctgctggaaggccctgcttgtgttctctcttgaactcacaatcccaaaggaatactctttcctcctttctcccgtaactcatgtgacaaatttcagggaatcacatgcccatccctgaactaggatggtggaatactctattggtcaggtctgggggtgcccaccaaaactatatgtaataggatacccaaagttagtgggattctatttatagaaggaggagagtaggagtactggccaaatgtttgaataaataaaggccatccactattgttatctctggttcttttaaagaggggagatgtccactggaaaaaagtagagctcatcacgtatccaagaactgccttcatgcgtgagtttggcctgatatgtgcttgcactatagtccacttggtatccaggtcacacagaacagatactcccagcacatgttccaaagcagccccctgtccaattttccttagcacgtaggctcaagacaatgccccacttcccaaaggccttgtggcaatgtcctctttttctttcacatatatgatttatgttccgtcaacgacaggaaactgctcaaagatccacccagtcctgccgctgcccccgtgatggtttgtttttctcattgtttagcgctccattagcttccgcagtgagagccgccctgacatcctcgccccccgaccctggtccagaaatgccgccccctcgagcacgaaacggagagatagcaagctgtggagtgagaccttcgatgtgtgcgtcaatcagatgcttacatccaaggaaatcaaacgtcaggaggtaggctcggggcccatggagctggctgtgtgtctggaacaaaggtgcattgcagcgtcagccatgctggaatttgcgccttagtctccaaatcaattcttcattgcgtttgcagaaggataaacaagagtgtctgaccttggggaaggaactgagaaaccagaaaccagctgggagggtgtggcccccactttaaaaagaaactgatgtgaaaatatgaatttacaagaagatgaaaccaagtgtctatttaggattctgaagttcacaaaaataatcattttagttatattttgttagcaacttatagactattttaaaatatttagtttacatagctttgattcagcttcatggaaaacttcctttctatagaatccagttaatttcattcccggtaagttttctgtatcagttgccctaaatgactctgataatattaccctgtatagaagagcttgtttaagtgcttgtgccaggctgtgctgagcacttcatgtgtgcatcatctgatgagatccttggagtatccagctcagggttgtgcctccacctgctttgtcctcagtttaccaagcagccccaggtggagggagctttcaaagcctgaccgctgtttccctatatcctgaaacacagtagaccctgaaatatcgttacaaacttgtactcctttaataatgtaatgtttgctgacagtttgacttcccagatggaagtgaaagagtgttctgtgcatcatagctctttagcatgatggcttaatagagccaaattagaaacggtccatttacctactcttccacacagccagcgcctataattttatttgttgtacctgtggggctgagaagtggtttagaatgaattaacttcaccaggttgtatttggagtgataaaatgttggattcttcctacaatctcagcctcaaggcagtggataatacaaataaaactttctgctgagattcgccttctgtcgagtagaagaaaaagtggggatggcccagttaataatactgccacatccattatctagaagagcctctgaatcacttcttatgatggcctctcacaacaagggtaccaaatccatggctcacactgtaattattttacctaaaatagttccctcttgttcagctgcatcaaagttctgtaacatgaaagatgactttttggactagaaatgtgtagaaactttctcccacaaacagagaagcacaatatgcagcagttttgcaatatcttttcattgcaggtttaagcatagatgcatttgcttcaggttaacgtaacttaaaatacttaaatatgtaaatttggggttttgagtggtggagccagcactatttgaatatggtcttgtaaatgaagggagaattcagtgaatatgtttatctttccttgcaggcgatctttgagctttcccaaggagaagaagacttgatagaagacttgaaattagcaaaaaaggtaaatttaaatccagcagtcacttgagtcaagtcacattttttttcttgagtaatttcacaaccctaaagtggtgcttcatgagaactgtctttatgactaagactggtctgctaccacacaccaagcagtggggaaagtgtttcaaaacaagagggcagaatagctctccagacctggcacctttaggggtttacctctgtatgtctctaatgcatgtcaaagaatacttcagcctaaatcagaaagtgtccatggaggcctcgccttatgtatatttcattgtcctagaagtctcatatgtaggactctttgcccataggagagaatgtgtgcatgtctgaaacttgaactgagtcttagaaataaagccatttgaatctcaaaagtgaataaagtgaaatgaggcaattgcatactatcatataagttggggtcttttatataggaatttgttttctaatcaacattttgtgtggggaggaggaggacaacaaaccttcctcaaaaacattttcgttccagtggcacagccccccaactccatggcttggaggctaaaatccagactccttcatctgatattcacagcctcctcgaagaatcacagggttggaaggctacatcccttcttttaagggtttttagtctttctgctaagatgaaattccacctctagcattcctgagagatggccacccaagctttgcttggacacagccaagaaactgagttttaggcagagctggaggaggaggagatcagagaggacaaagaagttatttcactctgagagttatcatgctggtgtctaactcccctttcctgcatcaagatttgccaaactcaagcaccttcaggtgtttcccagccatccttttgcttatggtggccctaccttcctagaaacttttctctttcgtttcaaccattcatatccacccatccttcaggaaccagctcaaatctcagtttattcttacataacatttattgcctccttctctgtaccaagcagcttatcttcaaaacttcccttggccactccagctttaattctctgaccttctagagcagttttgatttgatggctttttgctgtcttgtgacatcagtctggtttttaatctttaatttttaaacataagccgggtccggtggctcacacctataatcccgacactttgggaagctgaggcagaaggatcacttgaggtcaggagttcaagaccagcctggccaacatggtgaaaccctgtctctactaaaaaatacaaaaattaggctgggtgctgtggctcacgcctgtaatcccagcactttgggaggccgaggcgggcagatcacgaggtcaagagatcaagaccatcctggccaacatggtgaaaccctgtctctactaaaaagtacaaaaaaaaaaagaaaaaaatattttttaaacatagatttagttttccatgagatcagaaactaaaatataaactagaaaatattttagtttttcttatcttccccattagctttataaaattccttgaaggtaggagacttttaagtctttgtgttctattttagtgccctgggtataactgtgtattcttgttgtttaattttctctagtaagaggtgataggattatcacctttgctctctttgttcaaatcagtagtaaaggataccaatcactgtttctttcctctttttctttattttaaatatgtactaattgaaaaaagaatctgctagtagctagttttgaataaagtgggatttttttaagaggcaggatcttgattttgaaaacattttaacagtcaaatctgttctatacctaggatttgtgctctttcctagatatatgacatactagaataaaaaagcttttgaaaaatctgctttggtttatcaaccacaaaggcttaaggcagtgctggtttctcctctcctccagccacacctctctgctgtttctgcagctttatgggagaagttgttagagagccagaagttttgttattggataggacctctcaggagccacttacatgaacaatgtacttcctctgattttaaacatgtgcttccatctcttgccgtttttgtgcaggcctatcatgaccccatgctgaaactctccataatgacagaacaagagttgaatcaaatttttggaacactggactctctaattcctctacatgaaggtataattttgttcccaggatgagtcgtgacttgtagccttaactgagttgtcttataatgagtgagtgattattaattgcctgcaatgtgaataacccagaacctacttccagccctgttcatatttgaatgcctaacaaataagcatctgtttgttttttgccagagctccttagtcagcttcgagatgttaggaagcctgatggctcgactgaacatgttggtcccatcctcgtgggctgggtaagaaagttctctggtctttattgaagataaatttcaataatatagatgggagtttcattttagctagactttttttatttttatttttatttttttacaaatgttggtttcacatcagaaaaaaaaatcctagtaaaattttaattaaatttaagttttgtatctttaaagcatgaaaatagtttttttcttattacaaatttattgcatttaaaagtaacagggccttttggaacaaaataagtaaaggtacacatgaaactattactagtttcgtatcaaaataaaactagttaatattccgtcaggccaatcgctaacataatatactccaataaaaatttattgacatatatccactaccaaaaaaaaaaaaaaaaaacttgtcatgctattaaaaaaaaattctcatggtcaaaatgcagttttataaacaagatcataagtaaaggttgctaatgtttagcatattaaaaaaaactttttaggccataaaaaaaatctcatggtcaaaatgtagttttataaacaagataataagtaaaggttgctaatgtttagcatatataccatgctaagtaatttataggagagctgggtatatggtgaccttcatcctaatataatccattccttttcctaattaaataaaaagaagtaagctgtgatcttagattaggagtcataaatttatgatcctggggctggatttgtgttttattgtgtacttaaagttgtttgtttcacttacgctagacaaggcgtgtgctcttattttgcctcagtccccaccgctccctattctacacatttatgtttccttctgtgagtgcttgaatggtccaccccagttccaggtgtttttcatttgttataaagcagataatgagaggagattactttgctgacttattccaggcaagattaggtctctcatcactctgttgctcacagtattccagaaaaataggcaggaagtaccacaacagctaatattagagattatttcactgtttggagagtgttgtgaaggttataaatcctactgttgctatgtgagttctctttattccgttacatctgcattttaatcttcctaaaacctttcagttaacatgccttgataacacatagatgtgcagaaagttttaacattgatcttttaacttacgtttctcaatgactgccttgatcaagatacttgatgagagtttcatgacttaaatagctttagttcaggagtcaattttagcaccaaggctgaaatatcccaagggtatccgaaaggcaagtaatgttctaagatgaataatttagaaaatatgccttaatatttcaagagagatcattcatcttatatttttgactttcattttattatgagccatcgtagatgttttaacttctttagcccacaaagaaatttctccaaagagagccagccaaccggagacagacagagacaaagaaggtataatgagtagagagtgcctcagtgtctcttaaacttcctgagtctgtggactgctttgatatgggggtaaatggagcagttaggccacactccagaatttgtaggataactcctctgcttttgatgagacagcagtacaggactacatggtttccttaagcatcatatgcaaattgtcagtttatgccagaagcaaaattgtaggaatttgccttgttagtaactttttgctgaaataaacatttgtcacgtttattagaaaattggtttgatctgggagcagctttgcagtcattttctgtacatacccaaaggaagtgtgaccatgctggcccattgctatctggatgcttcagacatcaaatgaggacttggatcttgaagagcagcctaaaattaaacaactggcccgttgttgccagacttcgtgagaaatggcccttatttatcaggcctgacaagctgttaaatgtttttcctcttttaactgcagatgtgtccgtctgagtgggaacagtaaacctaggggtacatatgtttgagttcttgtatttttaacagaacaaaataaacatcttagtggactttggatgagaagagtcccattcgacccatgaaaaattgatttattttctccgcaaaggaaaaaaggggggtgggggggaacccttttaaacaagtgagccttccaagtgggacagccctggccagtccttttgaccttagaatgaatcaattacttttactttgaagaccttaaacagagtggttgctttttttcagggaactaccccggttactgagaatcagtgtccccgctccctaatgggtcagcctgtttgagtaagccttccctagcataaagaaacaacttcccaagtgacttatctctatgccaacgttttttcaatgatgaaatactttataagctctccaaggcagaaagttctcatgttaatttgttgtctcactaaattttaattcccaggaaagagccagagtacatggaagcaaaaaaaaaaaaaaatagattttttcacaatattagggggataaaagaacttctttaaaaagtgagtttcccttataaattcttgatagtctatttaataaagagatggtgaatagttcagaactctgagggtaaaggggaagcaagaacaagcttcagactctcgttttgtctccagctgagcaagtagctttggttctctaaacgacagtttcttcaataaaaatattctagggcccaagcacagtggctcacgtctgtaatcccagcactttgggagcctgaggcgggtggatctcttgagcccaggagttggagaccagcctgggcaacatggcgaaaccctgtctctacaaaaaaaatattagctggcatggtggtgcatgcctgtagccctagctatttgagaggctgaggagggagaattgtttgagcctgggaagaagaggctgcagtaagccatgatcatgccactgctctccacctgagcaacaaagggagaccctatctcgaaaacaaagaacttcttgggacaagtaataatagctagtacttactgattctatatcagaagccaagctccatgctacacattttgtatgctttacctcattaagggagagggggacattagtatatacattttgtaggtggagacactgaggcttggaagagtcactgacagctgtgtgagttaggctttgaacctgattctccctattactgagtctgtccttttttccgagacagtctctctctgtcgccaaggctggagtgcagtgatgtgatctcagttcattgcaacctttggcttctgggttcaagcgattcttgtgactcagcctcccaagaagctgggattacaggcatgcaccactatgcccggctaatttttatatattttagtaaagacgggattttgccacgttgcccaggctgggctcaaactcctgacctcaagtgcctcccaaagtaatatgattacaggcgtgaaccaccgcacccggcctagtctctttaactgcattttcacctctcattctgaataagggagtgtctgtatttgagaaccagatcttgtacattattcaccctgtgtagttaaagatcacttggggcctctcctagccggtgactgaaccagatagcctttcaggtcatgcccaggaaatgagcaccctgtcaggtgagagcacaggaccagagccccatttggttgccatggtagcagggcagcaggatcacagggagcagtggcccattggacagtgagcagcagtgtggtcgaggttcctcactagtttacatccaatggttactgctgatttgtttcttcctaatgaaaacattgggcatttccagatctttttaaaaggtgaggaagtggaaattaaatgaagagggcctgaggccctttttaattaactctgaaagtctaaattacaagccacagtaccacgtttgggttctctctctctctctctctctctctctctctgtgtgtgtgtgcgcgcatgtataagtaccaattatcattactttcaaataataatagctagtacttacacaaatataaggttgagggaaaaaatgtctgcaactctttaacacaagtagagatttttaataacatgtaaggaaggtagacatttcaaaggaatgttaagctcaatagtaagcttgtaaaatattactttcctggtatcctttttatggtttcagtcactgaggaaataatttcaataagaggtgtaaaagctgcagcagagtatttaaagtttcagatgctgccatactttatttatttttatgtatttatttatttttttttttgagacagagtctcactctgttgccaaggctggagagcagtggcatgatctcggctcactgcaacctctgcctcccgggttcaagagagtctcctgcctcagcctcctgagtagctgggattacaggtgtgtgccaccatgcctggctaatttttgtatttttagtagagatggggtttcaccatgctggccaggctggtcttaaactcctgacctcgtgatccgcctgccccggcttcccaatgtgctgggattacaggcacgagccactgcgcctggccgccatactttatttttaagcaaggttcacaaaccatcaaatattacctaatcttgtaatccattaaacatgcatttatttgttcattcagaacacagagtgtctgccatatagtaggcccaatgcaaagtagtgaggatacagaaatgaaagacactcctttgccagtgtcttgcactgaatccctctgaagagcaggtgttacaagggactagggcttcctagtacaagagaaagaaacaaaagcagttaggccattggctgcatttgattgcttctggtaactttctggaggctgatagctcttagattagaacaccaaggcagaaaaagtggatgagaagccttttccgttgaatctctgacatggtatttgcacagtgtgactgatgggatgtgtcagagaaattagcattttgctagaatgaaggcagtgaaggttaaatgttccaaagtctttaagcttaaattgttcattacatagtattgtacaggctcacgcctgtaatctcagcactttgggaggccgaggcgggcggatcacgaggtcaggagatggagactatgctggctaacacgttgaaaccccatctctactaaaaatacaaaaaattatccgggcatggtggcgggcgcctgtagtcccagctactcaggaggctgaggcaggagaatggcgtgaacccgggaggtggagcttgcagtgagccgagatagtgccattgcacaccagcctgggtgacagagcgagactccgtctcaaaaaaaaaaaaattgctttgtgaaagcaagccagagcctaagaaaattgtccactgcctgccatgttgaagattccactagtttcctccagccatgcagataaaggaatgtcagccagacccagagaccagttaggtgtttgttcagtcccaataaatgatgccaccgtagcctcagagctcaattattttgacattccaaccttctctttctgtttccttcttagctcccttgcctcagctcctatgatagctactgcagcaatcaagtagccgccaaagctctgctggaccacaaaaagcaagatcaccgagtccaggatttcctacagcgatgtttagaatccccctttagccgcaaactagatctctggaatttcctcgatattccaagaagccgcctggtaaaataccctctgcttctccgagaaatcttgaggcacacaccaaatgataatccagatcagcagcacttggaagaagctgtaagtttgtctgtttccttctctctcttcttgttatttccaccataatggctggtggattgggtcagtgggtgaatggaagagtccctgggtacttagtactcaggaatcttgggttccaggcctggcactgccatcaaccatgttttgattttgcaagtcacttctcatctttctgcctcagtttcctaaactgtaaaatgcagtgcttacatgaaacacgctgtaaggtcccttagtaaaattcttaattttatacaggtgactctaatctggtgttacagttgctgtctgtgagggacaagatctttgtgtatattttaaattttgtttagttagaaaatagtaagttgccttttagcctagccccaaaactcatttgtgaagtggacatccatttaaaatctagctccatttagcccccgattacagtggcttgccttgtcaaacctcctgctcactagtgggatcctcactcagcaaatgtttgttgagtgtgggccaggcacgatggctcatgcctgtaatcccagcactttgggaggccgaggtgggcagatcacttgaagccaggagttcaagaccagcctggccaaaaaagcaaaaccctgtctctactaaaaatacaaaaaaaaaaaattagctgggcgaggtggcatatgcctataatcccagctactcaggaaggtgaggcacaagaatcgcttgagcctgggaggtggaggttgcagtgagctgagatcacgccactgcaactccagcctgggcaacagagtgagactcttgtctcaaaaaaaaaaaaaaaaaggtttattgagtgtgggctgggtaatctgggaaatatatatttttccctagcagcaatagaagacgaggaaaaatggggtgcacatcatgagaatattgtaaactgtgagcattccacccagagagcaccgttctggttgaggtactctgcatggtagagatggcagatggcaggccacggggagcgggtggcctgagcaaaggtataaggaaatgacaggacaggtcgtgcctggggaatatcatggatcagttggcctggggttaggggtcctctgagaaagcagcaggagagaagacagaggatgtgggttcagatctggttatagaggtttttaaatatcaatttaagagattttttcctttgtcatgcaattaattgaagttttttttttgtttgttggttggtttctaagtagctgggattcaggattcaaatcccagctccatcatttacaagctctgtaaccttggacacatactcttggtagaacaagggactgaggaggaagagactggtgatagggatgcaagttgggaggatgctgtccaggtgtgaaaacctgatcaaggaggtggcagtggggatagaggctagcagaccattcaaagggctcattttctgatttaatctgggacaataatagaaggaggatatgcataggtaatttgaaaatcagaaaccttgaacctgctgagcaaactgcctatttcctcccagataggggtttaataataagtagtagtaacaacaatcatggtaataattgctggcattgagtatctagtaaatcaactttatgtaatttgcctcataggttatgtatctcatttaaccgtcacaacagcctaggagatagctgttcttattaggaccattttccagatgaggcttagaggggttaaatagcttgcccaggtccacagccagcaagtgatgcagttgatgttcaaaccctgtcagtgtagactccaaatcctgtgcccttcaacttctttatgattctataccttgatgcagaaagcctgcccactactttgagtttctgttgcctttgtaattgtggagagctgtctggtcaccagcctcactggtgcagaactgggctgggtgcctccaagtaggatagaaaagaagaataaaggaccctcttctgattcatgaggtattcaatgtatctggcaggcccaacacagagatcaggcccccagtccagcacagatgggggacgcagtcgctggggttgaggcccatctcacttcatcatgtctgtttttattactgggaagagtgcgatagagttgcctcctttccatatttcatcccagcaagtgtgtggtctgcaggaataaaaacaacagggagcatgagctactcaaagtcatgacttttttgaagcatgggagcctgttctgagttactgtaaagatttctttttaatatggagcatgaaagaatactgttctgtttttttaaaaaatacccagtgagctaaagtttgaatttaaaaacagataagaatatgattgtgtgtaattcaaaatgatgtgccagtaaccagttttcctagtgcataaagtatgaagctgttttcaaaagttcactctgcatctagttattcaggcagatctgtgcatgaaacatggtatacctgcatttgaaaatgtctgcaaagcaagtcttccaaatgcctacttacacagtatacgcacaggattttttttttccctttacagaatcctcatagcattcattaccccacatgaacagaattatttagccctgtactcttgggtgcattatgaatgtttgataaacataaaacataaaacaagcaccaatatagcttgacaaatatcccatgaataaatttcccatcaatgaaaagggaaaaatcagagagcgctaagtaaattgcttccgttccaagagagttgattgcattcatacctatgattagatctaaaaagaggtcttgcctttaatgcagtgcctaaattaccacatctttattagaatttcataataatgctttgagggttgataaaaatttttctcaaaagagaacttcttaaaataggagtttggatattcagatattccagagaacttggttgtttagtgttttaaattctaagaatttttcggccagaaaatgatcctgcagagcatcccttccccccacctcaccactatttctcaactcctaaaaaaaaaaaaaatcactgaaatcagtgggaaaaacagtcctgcttttgatgcaacagccgtgaagactgctattcttggttcatggcaggagccagtgagtatcatggcacaagggaccagacagtcagggctttcagagtccactttgaggatgatgagtccagcacatgtgagcttaatctctgtactgttaccaggtatctctcatcatctccctttaccagtcccttccttcagtttgaacccagtgagagatgcaacaataaatttaatttaaatgggcaactactgtgactgttgactggctattggcagcctactgtatgtaactttatgcctccctgaaattctgcaaaataaatctctctcaagaaccaatgcaaagctgggcgcggtggctcacgcctgtaatcccagcaccttgggaggccaaggcgggcagatcaagaggtcaggagatcgagaccatcttggctaacacagtgaaaccccgtctctactaaaaatacaaaaaattagctgggcgtggtggcaggcgcctgtagtcccagctacttgggaggctgaggcaggagaatggtgtgaacctgggaggcggagcttgcagtgagccgagattgccactgctctccagcctgggcgacagggcaagactccatctcaaaaaaaaaaaaaaaaaaaaaaaaaaagaaccaatgtagaggccaggagcagtggctcatgcctgtaatcccagcactttgggaggccaaggcaggcggatcacctgaggtcaggagttcgagaccagcctgaccaacatggaaaatcccatctctactaaaaatacaaaattagccgggcatggtggtgcatgcctgtaatcccagctacacgggaggctgaggcaagcgaatcacttgaacccgggaggcggaggttgcagtgagccgagattgcgccattgcactctagcctgggcaacaagagcgaaactcagtctccaaaaaaaaaaaaaaaaaaagaaccaaagcagagagataagattctcatgatattcaggtagatagaaagacaaaacattatttttaataaatgaaagcagacccagagttactattataaatgtatatacatagaacatggaatgagaacactgattgtttccattgttttgtctctgtttttcaaacaccagcaaaagaagcagtatttgaaactaatcttagctgcataaggaactgccatggcatttgagttcattaatcttcatgtgatatgccagttgttcagttcctgagttaaattaggaaatgaacacatatttatgactatagcgcatcttctttctggtttcctggatatttgcaggcaactcagaaaattgactcaagcgctgattaattccggctgtccaggtacacctggtaacagttaactgagaagtcacagccactaatgctgaggtctttaagagtaaggaaaaagcatggatttcactatatattaaaaatatggaaaggtaaaaggataaagtagacataacacagttgctcagatacctcccatttgttttaagcttcttgaaggcaggaatcctctcatttctttgaatgctaccacttcgtctaacatggaacaggttctcaataaacagttaaagtaatttgaaggatgagtcatggctttagtatattttgtgaaattattttgtcttgaaagtaacagtgaataatcattcatttttgaaaaccaagaaaggaaaaaagaaactaagaaagtataccaaagtgttctgctatttattgttttatgttaataaaactcaaattacttttacaggatttacatttaatattaggttgacatcaaaggccaaaaagcttcttctataacactaaagagcctatattttttaaaataagggtttttttttttaaatcaaagtagtgagtgctaccaccaccatttgagaaatagagaaaagaataaagaaatatctgaaacttttggccaggcatggtggctcatgcctgtaatcccagcacttagggaggccaaggcaggcagatcatgcggtcaggagtttgagaccagcctggccaacatggagaaagcctgtctctactaaaaatacaaaaattagctgggcgtggtggcaggtgcccgtaatcccagctactcaggaggctgaggcaggagaatcgcttgaatccaggaggcggaggttgcagtgagccaagatcgtgccattgcactccagcctgggtgacaagaacaagactccgtctcaaaaaaaaaaaaaaatctttgaaactcttaatagctacaaaaatatacagattgtgcatctctccataagatacattcaccaaacttcagctcaaagctgtaagatcttctgtcaaacttgtgtggaagtacaaaagttataactgagtaacagtttttacccagttgcttttggcagacaatatcattttagtggcatatgaaaaaataatcacttggccagacacagtggctcacacctgtaatcctagcattttgggaggccgaggcaggcagatcgcttgagtctaggagtcagagaccagcctaggcaacagagcaaaaacccatctccatgaaaaatacaaaaattagccaggtgtggtggcgcacgcctgtggtcccagctatcaggaggctgaggtgggaggatcacttgagcccaagaggcaggggttgcagtgagccaagatggcgccactgcactccagcctgggcaacagaatgagaccctgtctcaactgaaaaaaaaaaaaaaaagaaaaataattacttaacaatcctagatacaatttattattattattattattttaagacatgataacttctgactgcgcaaaggctcttttggaaccttgcttttcagagattggcttttcttttaagtaaatgtgacgaagaagaggccttatcaacatttgccatctgttaagtacttttcagttaccaccacaagaacaatgggactgttggtcttttcacttttaggggacagagaatcctgctaaggaaatcattattttgcctctgattggtgtcatggagttttttaattttttgagacggagtcttgctctgtcacccaggctgaagtgcggtggcgtgatctcggctcactgcaacctctgcctcccaggttcaagcgattttcccacctcagcctcccaagcagctggaatgataggtgggcaccacctcgcctggctaatttttttttaatatttttagtagagacagcgttcaccatgttggccaggctggtctggaactcctgacctcaagtgatatgccttccttggcttcccaaagtgctgggatcacaggcatgagccaccgtgcctggcctggtgtcattgagttttcctcaactaatttctcatccctttgtttgctagcattttgtaacatttaaatatattcatatgacagaatgaccaacacatcagaataaatatccactgactacatctcaggcagtactcttgtttttatattgacaacactgcatccaccaccacttcggaatcttctgcccaaacttagtcactcacatgtgctctagatcctgggtgtgagtgtatttatacagaccatccccagcattatactggtgtcttttttcccattattttttctctgttctttataaacatttatattatatcactgaaaaagatatccaggccaggcgtggtggctcacgcttgtaatcccagcactttggaaggcagaggtgggtggatcacttgagctgaggagttcaagaccagcctgggcaacatggtgaaacccgtctctaccaaaagtacaaaaattggccaggcgcagtggctcacacttgtaatcccagcactttgggaggctgaggcagggggatcacaaggtcaagagatcgagaccaccctggccaacatggtgaaaccctgttctactaaaaatacaaaaaattagctgggcgtggtggtgcctgtagtcccagctactcaggaggctgaggcagtagaatcacttgaacccaggaggtggaggttgcagtgagctgagatcacgccactgcactccagcctagtgacagagtgagactccgtctcaaaacaaacaaacaaaaaatacaaaaattagctgggcattatggcagacacctgtaatcccagctacttgggaggctgaggcagaagaatcgcttgaacctgggaggcagaggttgcagtgagctgagattgtgccatctcactccagcctgggcaacaagagggaaactccatatcaaaaaaaaaaagatattcaaaccatttgttcaaacccaatctgcaaatattgttcatacattagattgagtacatatagagagacgttgaagctattaattgtgtcacatcctcaaagacagtccctcttttggactcttacattctgctttgttttctgtccttagctaatttttttatatggctacattttcaacattgtgagcacgttttaagaaatatgcagcctggagttcaataggtattcttcctcccggataaaattattcatcaatattagttttatatataatacaaatatctttataagtatacaaataaatgtgtgtgtatgtgtacagatggatagatagatgcagtatgctaaaagtatttatgtttttttttttttctcttttcccaaagtagcaacttagataacagagttagatccaggtgtgtcctggtgtccttctaggctgagcccctaagacttggtgtgaatggtttgctgctttcctccatacttaattttcctctttgttttcatagataaatatcattcagggaattgtggcagaaatcaacaccaagactggtgaatctgaatgccgctattataaagagcggcttctttacttggaagaaggccagaaagactccctgatcgacagctctcgagtcgtgtgttgtcatggtgaactgaagaacaatcggggcgtggtaagtagttactccctttaagcagtcttatccgcctcccgtatccctaattcatttggtgtggagcctcctcttagaatttcttccctatctagggtcatgttcttttttgagatggagtctcgctttgtcacccaggctggctcactgcaacctctgccttcccggttcaagcaattcttgtgcctcggcctcccaagtagctggaactgcaggcacgcaccaccatgcccagctaatttttgtatttttttagtagagacagggtttcaccacgttggccagggtggtctcaaactcctgagctcaagtgatccgcctgccttatcctctgaaagtgctggaattacaggcttgagccaccgtgcctgtccttcgttctttcaaacaaaaattgcttttccagtgtcatttatatcacaggatcatatgtgtatatgtatatatatattcattcatattttgtaatgttaaggatcagtacctattcagaaagaattttggaaaccaacatagggttgccagctatttattttgtctgatcttggctttgagaaacaaatgcagaacagttaacatctgtcactttgatttcagaaaataaaggatgatcttaataagatattagaaggatttaatctcagagaaacagctcttcagttgaatgcatttaacttctttcttgtgcattgggacccatccacagactggcattttgaaaccaattttttaaaaataacaacctatcttctattggttgcatatttagctttgacctatagatacccatttcctggcttttattcccatgtagatactgaaatggttcctcttctgctatcatagcaactgtgtatatctcccttggagcacttaatatagtgatttgcaattctccatttgtctgtcagtatattccattataccatgttgttttggtggtttgtcaaccttagaacctattatggggacctggcacatactgggtactcaatgaatgaatgcttgtttaaaaggaaagatgaatttgaattatatgagagttcaaaattcattcagctcaccaagctatttgtatgtatagccagtagaaatttgtgtgtgtgtgtgtgtgtgtgtgtgtgtgtgtgtgtgtttaaatttctgtgttgagatagccattgggagagagactctgcattttgattgtatttcatcttcagtatctagccaacccttagaatgaaagctagaactagattgaagggttcttaataaagttttgataattcaagggacatccgtttagtctagactgagcagccatggaaatattacttgaaattagtgagtacatgttataacccattatcagggatgctgtggatccatccagtggatggtacagtgggagtaatgagacctgtcaagtctgttgcttgaagacgtgtgtctgtgggactagagagttactgattgctagaaagctgcattctgtttcttgcttattttcagaaagcacctgtggacttctagtatcttacaccaagctccttgaacgttctttctaggaagcccaatgagaaataggaaaatgcagtgctccacagggtgtaagcctattatctttctgtacatcagtgaaggactgagaactttttggttagatgtgcctaaggcataaagataaactctagtttttattgcaggcagatagatttttgagaacaaagatagttggggtgggaggcttgtgggtttttttttcacccggtagagttgtaaacgtcattgtgaataaagtcttgggtcagaaaaaaagcacagtagttgaaggcaggaaggagctgagaccaataagagaaattatcagtgaacattcataaatgagttttttgtttgtttgtttgtttgtttgttttttgagacagtctcactctgttgcccaggctggagtgcagtggcacgatcttggctcactgcaacctccacctccagggttcaagcaattctcctgcctcagcttcccgagtagctgggattacaggcacccaacaccacgcttggctaatttttgcatttttagtagagatggggtttcaccatgttggccaggctgttcttgaattcctgacctcaagtgatccgtccacctcggcctcccaaagtgctgggattacaggagtgagccaccgtgcctggctgagttgtatttttaaaaggttgcccagacaatctcagcccaccttggctagaagattgattgaagtagaaacagtgtaaaaatctgattattccaaatactgtacattaaaacagcccccaaaagaaaattcttaacacgttatttccacaactaccacaccaaaaagcctttaacttggttattttgtgctttatcctgtttttcagtcttcttaaatatacattttattccctctagccaagatttggttgggttttgtttctgtttgtgtgtgtttgggaggtagtagggataggggtgggagacctatgggtttcttttctcctaaatttaaaatgatctaataatattgaatgtgctcccactatcccaagtcaaaattctaatctgaagtttttaattcagttcccatttttgttttagatgcagggggtatatgtgcaggtttgttacaaggatatactgcatggtgctgagaataggcttctattgatctcatcacccagatagtgaacatagtaacatagtactcgataggaagtttttcagcccttgcccctctcactccctcttgccttttagagtccccagtgtctgttgttcctatctttatgcccatgtgaacccaagatttagctcccacttacaagtgacaacctctcctcttctggtctctcccctttaagactgctggattgacattcccaaatatttccaccagaaagctagaacctagttgcaaagttgtggatattttcacttcagttcgtaagcatttccaaagtgtgagaagagtctggcacttagcattgaatggagcaaatataccccagctccaccaagcacacctgctttcataatgggacctgaaacaagccttcatttttgcaattttctttttgccaacatcacacacatcagtcgtcaactttttaaccctcttcagagaaccaaggttctgattaacttagaaggaaaatattgatcatctttttttttttttttttttttttttgagacagaattttgcttttgtcgcccagactggagtgcaatggcccgatctcagctcactgcaacctccacctcctgggttcaagcagttcttctgcctcagcctcctgagtagctgggattataggcgcctgccaccgcgcctcgctaatttttgtatttttagtagagatggggtttcaccatgttggccaggctggtcttgaactcctgacctcaggtgatccgcccacctcggcctcccaaagtgctgggattccaggcgtgagccactgtgcccagcctgatcatctttctttgtggctgtggcagcatactctggtcccctcaggaatgagcactgttctgacttagagttcctgaataaagctgataatgactttgtggttgaaggaacaagtgtttttcatgggtttgggaagcaaagattaatattagctttgatataccagtctcattttttatagactattgttaattttgatcttttagaatttttttctttttttttttaaacagtcttgctctgtcacccaggctgaagtgcagtggtatgatcttggctcactgcaacctctgcctcctgggttcgaatgattctcctgcctcagcctcctgagtagctgggattacaggcgccccccccccccccccgccccgcccacctcgcctggctagtttttgtattttttttttttttttttagatggagtctcacactgtcgcccagactggagtgcagtggcacgacctcagctcactgcaagctccacttcctgggttcatgtcattctcctgcctcaggctcccaagtagctgggactacaggtgcccgccaccacacccggctaattttttgtatttttagtagagacagggtttcactgtgttagccaggatggtctgtatctcctgacctggtgatccgcccgcctcagcctcccaaagtgctgggattacaggcgtgagtcactgcatccggcctagtttttgtatttttaatagagacggggtttcaccatgttggccagcctagtcttgaactcctaacctcaagtgatccgcccacttcagcctcccaaagtgctagaattacaggtgtgagccaccacatccggcctgattacttagaattatattgagtaatataaactaaagtcaagagagtgctaacttttttttcccttcatcaccttcttgattctatttccctttctcgtttttttcttataggagctggggcaggtatgtctgtacaagttgtgaattgcaatgtgaatagggcccccaaagttggcaaccctggctgtaggtgtctgtaggcagaagggctttctccattgagtccctagggaggtgcttctacaggaagggcagtggacatatctggaagtgcctccaacatgcccaactttggttctcctggaggtagatttgaacctaggagttcataatccagtgtgaacctggtacctggggacctctttatccacagaggtccacatatcaaccactcattacattattgcttaatgaaagcttgtggatttttttcttctagaaactgcatgttttcctgttccaagaagtgcttgtgatcactcgagccgtcacccacaatgagcagctttgctaccagctgtaccgtcagccaatccccgtgaaagacctcctgctggaagacctccaggatggagaagtgaggctgggtggctccctgcgaggggcattcagcaacaatgagagaagtatggatagcagtcggggttgacctgttgaatgtttttggccgtggtagtttggagggagtgggcagctggtggaaagagaaaagccacggtcttgaagtcaaactgcatttgtatgctatttcatcacttcctgattatgtactttgtttagtccctgtgattctcagtttctcatctccaaaatggaaatgcataggtacctccttcataagattgttataaggatttagtaagataatctaagtgaaactgtctgcacatagttagtgctccttaagttccctttctctgtctttttccattggataaaaacatgcttaataccagatagtccctacatggatgccagttgcgttatggtgggttttgcagctgaactggtaaacttgtccctaaagagacataagaatggtcaactggaatgtggattcatctgtaacattactcagtgggcctaatttaagacttaataaacaaattaactaaaagaagccaagatagcaatatctatcgagtatctaacatgatactcggtgaaacaagcaggtaacttccttcccctatggagcttgcattgtgatggaggagaaagatgataaacaaatgaatactccaggtgttgttaagaaaacttaaaacccggtaagggaataggaagggatagcaataggaggtctgttttatttttatttatttatttttttgagacagagtcttcctctgttacccaggctggtgtgtggtggcgtgatctcggctcactgcactctctgcctcctgggttcaagcaattctcgtgtctcaaccttccaagtaactgggagtacaggggctggccaccacacctggctaatttttgtattttcagtagagacaaggttttgccatgttggccaggctggtctggaactcctgaccccaagtaatccacccacctcagcctcccaaagtgctgggattacaggcccccgggcccagcctggaggtctgttttaaatgagatagggaacacttctctgagaaagtaacgtttgagcttcctgggttaacataggcatcatactgtcaaagtaattaacatgtactgccttctccctactgatcaatccctctaccctaggagtaggagtagtagaaataagagcttatgtttcttgagtactgactatgtgccaggcattgtataagcatttacatgtattacatttattcctcataacaaccatataaagtaggttcttgttttctccattttacaagttagaaactaagatacagaggatttaaggtacttgcccaagatcaaagggtggagcctaaatttgaaggacggagaatagcttctagccaaagatggctagcagtaaaacattttggcctcctttccctctgttgcttagcctctaagccattggaagtggtggtggttcccagtctactggctgcagggttagtgcaaagggactgactgcagatgcttctgtgaaccaagcattgcatgtggcacgcagggccctttaaatgtccattatattgttgttattagattaaataggccaggcacggtggctcacgcctatagtcccatctttttgggaggctgaggtgggtggatcacctgaggtcaggagttcgagaccagcctagccaacatggcaaaaccctgtctctactaaaaaaaatacaaaaatcagccaggcatggtggtgcatgcctgtaatcccagctactcaggaggctgagacaggagaattgcttgaacccaggaggcagaggttgcagtgagcggagattgtgtcactgcactccagagcaagactctgtctcaaaaaaaaaaaaaaaaaaagattaaataaaatgtcttccatattgtggactaccatttttttttaaatgcagatggctcctgttgaggtaattaaaatgtaatttcgtttgacaatgaaaccaaatttgtctacatatatcttctccatcattggatactaagtgtatagatactctcatatggagaaacatgggcatgttttaatgttaaaaagagcctcttaaactgaaaaaagctccagcttggtgtacttgttgaaattacagattatgaaacgacttttagatcttctgaatcagaatctctaaaaaagggcctggggatttatttttattgatttatttttattttttgagaaaaggcgtcactatattgctcaggctgatctcaaaatcctagactcaagcagtgctcccacttcagcctctgagcgcatctgtctttttaacaagctctcaccccaagggattttgttatgcagccagattgggtcaccagtactctgggctcccctaaatcacttgactttgtggttccaagatgatctccggtttctgcgggtttctgagagcgacgagggcagctgaacgctagacctgtgtcaatcccatctccctgatggtggctgcagggtggagctgagccatgccccagatcagtgggaaacgttttgttatcagcaatacctgccatggattctggggtttagtgtcactacgtgtgttctctttggcctgaggaaggatctgtccattgactttgtttttcatgtgtttttcctttctagttaaaaacttcttcagagtcagtttcaaaaatggatcccaaagtcagacccactcgctacaagccaatgacactttcaacaaacagcagtggcttaactgtattcgtcaagccaaagaaacagttctgtgtgctgccgggcaagctggggtgcttgactccgagggatcgttcctaaatcccaccaccgggagcagagagctacagggagaaacaaaacttgagcagatggaccaatcggacagtgagtcagactgtagtatggacacgagtgaggtcagcctcgactgtgagcgcatggaacagacagactcttcctgtgggaacagcaggcatggtgaaagtaacgtctgacagaagcatgtgcacttcgggaagcaggcctgcatcttacctgtacagtatttgcattccacagatggaacggtttggagaagcactttttcatacttttgtgaaagtatacatgttggcccagtctctcgtatctgtacctttgtccctagtactgtaactgccaatctgtctgtgtaagctggaatctgtggcaactattaccctgtgttgtatttcccaagtgtctggatggatggagaggtactcaaacaagttactttcagttgtcctgctggattttaaaaaaatagaaaaagaatctcaaaactactgttttacatagattgcctgaagagtccttcctcttgtgcttctgtaccactttcccagctcttagatgtggtagctaaaggcacggaatttagacggccttgtaaatagggcatgaggaactcatctgtgtattgggatggtattagagagagaatcaggaaagaccaactcatgaagtgaacttggtttgatcttactcaactagaaagcttgaaaacatccctggggattctgaaggcttaattttgcaaaggaggatgcattgtctgaactttgcaacttcatccagtgcaagtttgatgcaagaatgtattaggacataaaatagaggctgaccttaaaagggccaggacagaagcggctgccagctctgaatctttaactgaaatgcacatggcaccaggaggtgtctctcatagttggttgctagcctaaaacatcagaatagaacccaaagggcttaggaaggcctgccaggataacaagaaggccctgtattcattgtgtttcatctgcctaggcctactcattattttagagaatgaatgaagcaacaaggaagagagaccatgactctatcgatgacactgtttatagaaacacaggagaggaagaatttggaatgaaaagcacttcgtcagaaccttctgtgggagccattgagagaaaagcatggtccagtgccttctgagaaaggccagagctttgggctttcctgctctgcttttgggtcgtcagtttgccatctctggttctgtgctataatcagaattgtaattatgttctccagaggccaatttcattaactctgattaattagaatcagctagccagattagtaacctctttgtccagccttgatttacagtgcagggtaaagtgcagaccttaaaaacagctaagtacctagaagagctccctgcaagtgtaaatattaaggatgacctgtgcaaaattatacccacaccagcactagtggtaattattctaaattattgccaaaaagttttttttaatctgtctttcaagtttacagaaaagaaagcagtaaatgcattgatgtcattttattatgtacatatatcatgtgcattcaagctgtgtgacaagatatatcaatataaaaacaaggtatatactttattattttttgaaaacaaggatattgtgatcaattttaccctgtaaaacatatttctgtatttataggtcttaaacatgatgaattttttctattacaagtttatttaaaactgctttctcaagtcgttattgatacagcaagtgaacctgctgcagacagaagcagaggaaagccaagaacagcctttattggtgaagaaaagaatgaatgattctttgtaggcgccatcagccacttttagaagccatcagccagtgtgttgggaaaagaggtttgtcaagtgttggcctatgggaaggtggtcaatgaatgttttgatgaaatgaatgtttttgtataatggccttaaacttttctggaagtatttcaaataaattacattattaagtcatcctccatgtgtacagtgtttgtcctacaaacaaaatacaggtttcagctgtgttcctggggaggttctttctgaaatttttgtttgtggttcctgaatacaaactttaaaataggatgcagattgatacaaatgcttttatttgatctatcaaaactttcacagaactcattttttttttctttctttcttttgaaacaggatctcactctgtcacccaggctggagtgtggtggtgtgatcatagctcactgcagcctcaaattcctgggcttatgcaatcctcctgcctcagcctcccaagtaactgggattacaggtacacaccaccacatctggctaatttttaaattttttgtaaagattgaagtttcactatgctgcctaggctggtcctgaactcctggcctcaagtgatccttctgccacaacctcctaaagtgttgggattacaggcgtaagcctctgagtctgtccaagaactcataattctaaaatctgttttctcaagcattctctattcattcacttatttatgtgttcacttttaataactctatctggaatccatactatgtataaagtcaagtggtaagtcatagttgttatagaaaagaaatgttgaatctcactgctaatataggtaactgttgaggaacttgaggctaaataaaagaaggcaaatttcactttgaaattcttactggaatttcagtctactttaattaaaatgattagtactctttctagactgagcacagtggctatacctctaatcctagcagtttgggaggccaaggcaggtgaattacttgagcccaggagttcaagaccagcctaggcaacatggcaaaacctcatctctacaaaagcacaaaaattagccaggcttgatggcatgtgcctatagtcccagctactcaggaggctgagtcgggaggatcccttgagcctaggaggcagaggttgcagtgagctgtgatcacaccattgcactccagcctgggtgacagagtgagaacctatctcaaaaaagaaaaaaaagattagtactctgtcccacaatgagtgaggttttttagatgaaaaggctaaacatttttaagctgttagtagccaattctcaatagcacattggcccaataaggctggtagttagtcttatctttacaataagctctcaccattttcttttttttctttttcttttttttttttttttttttttgagacagtctcgctctgtcacccaggctggagtgcagtggtgcgatctcagctcactgcaagctccacctcctgggttcatgccatccttctgcctcagcctcccaggtagctgggactacaggcgcacgctgccacgcccggctaattttttgtatttttagtagagacggggtttcaccgtgttagccaggatggtctcgatctcctgaccttgtgatctgcctgcctcggcctcccaaagtgctgggattacaggcctgagccaccacgcccggccagctctcaccattttctttaacatactgttaattcccaaatttggcaagatattcacataaataaatataagtccaaattttttcccaaatgcaaagtcgcttctcctaatttttttcttcctcctcctcctcatcttttttgtccgtcctcttttctcactgctgctttggctattccctctgtttttcactcctataattgtactgactgtcaatgctaaaggatgtatcttacagtatattagaagatgtttgtactgacattttgtgggttagtacaaatgagtgagggctaaatggtttttcttcagtcaattttcaagatgttatttcacatacaactagatgtaatccttgcagtctaaatgaaaactcataagcaatgaacagagccagaactagcaattttctgtaaaattagagcatggtttcagcttctgggttgtggtcaccgccactgactgctttagtttccattcccagcacagtctgcggcagctaagaatgcacaactcttcataaccacagccctgtttcaacaaagactgtgtggctgcaggaaactgcaacccaccatcttggtgaagagcctgttcaactttccatttacattctgtccatgtccgttttttactaattctcccaaagcctgaggactctcaaagatttggcaaagaaactgtctggccaatcagtttcactcacctggttccccttggcattgaggagagaagacactgaatacccccccttattgatgcagctgattcaattaattcacactagcttgtttattgacagaattctagaactacactattggaagggaagagggttacccaagcccaaacctaccagtaaaaatctgacaatcatcaaaatttaaaaccttgtccgcatgagcacacagtgagaaaaggtgaccgtattcactgtacctgaagggtattgagggaaacaagttggaaaaaaaaatgctcatgacatcatatctcctttctccaggcttggttcatatatcagtcagctgcacagacctacctagtcaaagcagttttcagttgacgtgagggaatagcaaggaattagaagtcatgcactgtatctttaagagctaatcacttagcctaggaaactggacatgcattccaaagcttgtccacatgcaaacatacctaggtattaatgaactgtgctctctcatctgtgaaaggtttgaaaatgacatcctacaagtgttttattctctgttgccagggacactggacccttcaagcccatttaaatgtgagactgtatgtgaaatcactttttaaaaagatactaagagctagtagttttcattgttatttaataatcacttttaaatttgtacatgttgcccaggcatggtgccttatgcctgtaatcccagcactttgggaggccgaagagggcagatcacttgagaccaggagttgaagatcagtctggccaacatggtgaaaccccgtctctattaaaaatatgaaaaattagctgggcatggtggcaggcgcctgtaatcccagatactcaggaggctgaggcacgagaatcacttgaacttgggaggtggaggttgcagtgagcacagattgcaccactgcattccagcctgggtaacacagtgagactctgtctcaaaaaataaaaaaaaataaaccgtacatgtgaaatttctcaaaagtgtggccttggcctgggtctttttcattcgttgtactatatacctggagagacttttcaatccagataatttggaattttttcttgtatttttttttcttacatattttcattcccacaattttctattttctctttcaggaattccagaaagagagatgaaccttctggattttatgccttaacttctggattgattttcaaatagtcttaatctctttattcttactttttatttatttatattttgttcaactctcaaggagatttcctcacctttgtcttcagatccttctattaatttgaggagagggttgccatcagtttttttttctactataagtttttctatcattctttctatacttaaagcacccttatttttatttaatgaaggcagtgtcttctctgaactctcagaagatgtcacagttcagttgaattttccttcatctttcattgtttatctgggaataataatggtaattaataggatttgggggaggattcaatgtagtaatacatccaaagtacttagaatgggccaggcatggtggctcatgcctgtaatcccacctgtaatcccagcactttgggaggctgaggcgggcggatcacgaagtcaagagatcgagaccatcctggctgacatggtgagactccatttctacttaaaatacaaaaaattagctgggtgtggtggcgtgcccatagtcccagctactcaggaggctgaggcaggagaattgcttgaacctgggaggtggaggttgcagtgagccgagatcacaccactgcactccggcctggcgacagagcgagactccgtctcaaaaaaaaaaaaaaaaaaaaccttagaatggggctatgccccgtatttttgtttacttctccaaatccactatgcaccctgattcactcttctgtgtgtacttcatcatgggctctcctgcctgacgtttctggtttggtttggcccagtgaaaatcctgtcattatatcagtgagagggagaagagtgagtttagagtattcattcctccagctcccacctggaggatttccttgggctggttgcatctcttatcgtgaggtcacagcttctctcaaggagtcctctctgaattcctgtaacccttctagcctagtatggtaacaaccccactgtcactagccccaggatattgtattgtccctacacactgcccaaactttgtgtactgtccctttattaaaacctcctaatttgaatatgtgatatttgagtatgctgctgagcccctgatagatactggttcctgatatagtaaacatatatgtctactattgtcatcatttatgttatttcaccatttgctttccattttcatatgttgtggtccaaggataaacagatctttggaatcatcaaagatgggttttgtgtttctattttttgttatcgtgatggattgttttctgggaagataaatgaaagcgtatttcaaaaacaaaggcaaaatactttttcaggcatatgaaagctaaaagaattcatcaccagcagacctccactacaagaaatgttaaaaggactttctttgaagagaaacagaatgataccctgtggacatatggatccaaacaacagaatgaagagcactaaaaatgcaactatgtcagaaaataggagaggcttttcttactatttaaacttctttaaaagtaattagttctaggtcggttgtggtagctcatgcctgtaatcccagcactatgggaggatcacttgagcccaagaggcagagtttgcagttagccaaaatcaagccactgcactgcagcctgggtgacagagcaagacactgtctttaaaaaaaaaaaaaaaaaaaaaaggcggccgcagtggctcatgcctgtaatcccagcactttaggaggccaagttgggaggatcacctgaggtcaggagtttaagaccagcctggccaacatagtgaaaccccgtctctactaaaaatacaaaaattagctaggtatgatggtgcatgcctgtagtcccagctacttgggaggctgaagcaggaggatctcttgaacccgggaggcggaggttgcagagagccaagattgcaccactgcactccagcctgggcaacagagcgagactccatctcaaaaaaaaaagaaaagtaattagttctagccatgatggagtaacaggcaccagatttgcctttgcaactgaaataaaaacaaaaagatgaaaaaacctataaagctatagctttgaagacactggacatcaggcaatgaaggacagtgaccctaagagaagaggtataaatgaggtgagccctgcaattgctccaacttccagtcttgaaagggatttcaggacacagcacagggagggtgtccatttgcattgctataaaggaatacctagcctggttaatttatgaagaaaagaagtttatttgactcatggttctgcaggctgtacacgaagcatagtgctggcctctgcttctggtaagggcctcaagaagcttccaatcatgacagaaggtgaaggggagccagcgtgtcacatgtcaggagagagtgagagagcaaggaggaagttccagactcttaaacaatcagatcttgtgtgaactcagataactcattactgtgaggatgacaccaagacattcatgaggaatctgccctcatggtccaaacacctcccactaggccccacctccaacattggggattacagttcaacatgagatttggaagggacagacatccaaactatatcagagggggatcccaggtagactccagtgaacttcctgagtggaagttttggagctgagagtttagggagaccaaggcagctacagtttacagaacaaagaggagagcagtccatggagagacaacctcagagattactgtagagagtccccctcaggtattaagcagagtattgaaaagtgcatacatgtgaagaaaatacccaaggctgaggggaaataccctaaaaaaattagaacacacatagtgcttggaatagtgcctattctcacaaaccagactagaagaatataattcacagggcattgggtaaagtactcagaagggtctagtttcagtagtggagaataattagtcctagagtaaacactgctctggtccaacctaataaatcttaaagaccaaatagtatcaaattgtttccaagtaacctaactgcatcctggagcaaagctcaacaatatttatgggaatacaaaattatccagcactgaatagggtaaaattcacagtgcctgccatctaatgaaagactacaagacatgcaaagcaggaaaacacaacccatagaagaaaaacataaaaaccaatccaaactgacttagacctgacagaaatgttagaattagccaacaaggatgttaaaacagttgttatagctgtattccatatttttaatgttaagtagaaacacgaaagagatgaaaaaagacccaaatataatttctacagatgaaaattaccatcaatgagatgaaaaatatggccaggtgcggtggctcaagcctgtaatcccaaaactttgggaggccgaggcaggtaggttaactgaggtcaggagttcgagaccatcctggccaacatggtgaaaccccgtctctactaaaaatacaaaaattagctgggcatggtggcacatgcctgtaatcccagctactgggaaggctgatgcaggagaattgcttgagcctgggaaacggaggttgcagtgagccaagactgtgctactgcactccagcctggctgacagagcaaaactctgtctcaaaaagaaaaaaaaaatacactggatgggattaagaatagtttagacattgcagaagaaaatactagtgaaaaagacagcaataaaaattattgaaagtgaaacatggagaaaagaggattttaaaatgaaaagagtatcagagaggcattgtgtctggaatttgtgggttcttggtctcgctgacttcaagaatgaagccgcggaccctcgtggtgagtgttacagctcttaaggtggtgcatctggagtttgttccttctgatgttcggatatgttcggagttccttccttctggtgggttcctggtctcgctggctcaggagtgaagctgcagaccttcacggtgagtgttacagctcttaaggcagcgcgtctggagttgttcgttcctcccggtgggctcgtggtctcgctgggctcaggagtgaagctgcagaccttcgcggtgagtgttacagctcataaaagcgtgtggacccaaagagtaagcagcagcaagatttattgcaaagagtgaaagaacaaagcttccacagtgtggaaggggacccgagcgggttgccaccgctggctcgggcagcctgcttttattctcttatctggccccacccacatcctgctgattggtagagccgagtggtctgttttgacagggcgctgattggtgcgtttacaatccctgagctagatacacaggttctccacgtccccactagattaactagatacagaatgtccacacaaaggttctccaaggccccaccagagtagccagatacagagtgtcgattggtgcactcacaaaccctgagctagacacagggtgctgactggtgtgtttacaaaccttgagctagatacagagtgccgattggtgtatttacaatccctgagctagacataaaggttctccaaggccccaccagagtagctagatagagtgtcgattggtgcattcacagaccgtgagttagacacagggtgctgattggtgtatttacaatccctgagctagacataaaggttctccacgtctccaccagattcaggagacgtgaatctgaattgggtggtcaatgggactgggcgccgtggagcagggggtggtgctcatcggggaggctggggctgcacaggagcccatggagggggtgggaggctcaggcatggcgggctgcaggtccggagccctgccctgcaggaaggcagctacagcctggtgagaaatcaagtgcagtgccggcaggctggcactgctgggagacccagtacaccctccgcagccgctggcccgggtgctaagcccctcattgcccgggccggcagggccggccggctgctccgagtgcgggccagccaagcccacgcccacccggaactccagggggcccgcaagtgcctcgcgcagcccaggttcccgctcgcgcctctccctccacacctccctgcaagctgagggagccagcactggccttggccagcccagaaaggggctcccacagtgcagcggtgggctgaagggctcctcaagtgccgccaaagtgggagcccaggcagaggaggcgccgagagagagcaacggctgtgaggactgccagcacgctgtcacctctcaatcccccctctaaacaggacaccccaactgctgttgggaatttggccgatgaccgctctagctacttcctgctggataggggcaaagaaggggccctgcagttgtagtgtccttcagaggagaggtctctaggccagggaaagtgccagcgggtcggtccaggggtcctcggtagaagttgttagttgaactcatttggggttccatttgtaagaccatccgtagcttgatggcctcgattctagagaaaacaaatttgacaagaaggttaaaaatacagggcccaaaggcgagtaacagcaagatggctgccacgggacctagaaaggggagaagccatgttgcccaactccagagattggtataagactttgaaaggcgttgtctgacttcagaagccttttcctgtaaacgctgggcagcatctcgtgctatccccgactggttagtgtaaaaacaacactcttcccctaagaaggtgcagagtcctcctttctcagcagtgaggaggtctaggcctcggtggttttagagagtcactgctgccaaagagtctatttgggattataaagcaaggatagatttcgttatttcttgcaaactgtctgagaggcagatatgggttgaagatccacataagtagaatatgccttggctgggtagatagacatttaccctggcttttaaaggaatagggtacactgttttttctttactacttacatctctctctttctctcttcgacttctcctttgtctcttcctctctttttaactctctctctgacttcctgtgtctgtccctctttctctctgactccttctttatctcttcctctctgtctctttctttgacttcctgtctctttctttcctttctgctgcctctgccagctgcttatgctgctgttctcccctctccttcccattttgatggctttgtcagtgtaagagcatgaggtaactttcagtgccctaatatatatgtagttggaatctctaaagacatggagagaggcaggaaacaaaaatcgaaataaagccaaaatttctccaaacttgatgaaaactataaactcacagatccaagaagcttaatgaaccctcaaacacaagaagaagaaaaatacaaggcttttttttttttttttgagacggagtctcgctctgttgcccaggctggagtgcagtggcgcagtcttggctcactgcaagctccgtctcccggattcatgccattctcctgcctcagcctcccaagtagctgggactacaggcgcccgccaccttgcctggctaactttttgtatttttagtagagacggggtttcactg

SEQ ID NO: 3286 - DNA, 3560 bp, Homo sapiens
ccggctgtcggtctccgtgtcgccgccgccgcccggcatcgtggagctggggcccccttttgcctgggagttttgtagtcgcctagggtcagcggtgacatcccaaagggcaggcccggcagccgccatggtggccaaggattaccccttctacctcacggtcaagagagcgaactgcagcctggagctacccccggccagcggtccggccaaggacgctgaggagcctagtaataaacgggtcaaacccctttcccgagtcacgtcgctagcaaacctcatcccgcccgtgaaggccacgccattaaagcgcttcagtcaaaccctgcagcgctccattagcttccgcagtgagagccgccctgacatcctcgccccccgaccctggtccagaaatgccgccccctcgagcacgaaacggagagatagcaagctgtggagtgagaccttcgatgtgtgcgtcaatcagatgcttacatccaaggaaatcaaacgtcaggaggcgatctttgagctttcccaaggagaagaagacttgatagaagacttgaaattagcaaaaaaggcctatcatgaccccatgctgaaactctccataatgacagaacaagagttgaatcaaatttttggaacactggactctctaattcctctacatgaagagctccttagtcagcttcgagatgttaggaagcctgatggctcgactgaacatgttggtcccatcctcgtgggctggctcccttgcctcagctcctatgatagctactgcagcaatcaagtagccgccaaagctctgctggaccacaaaaagcaagatcaccgagtccaggatttcctacagcgatgtttagaatccccctttagccgcaaactagatctctggaatttcctcgatattccaagaagccgcctggtaaaataccctctgcttctccgagaaatcttgaggcacacaccaaatgataatccagatcagcagcacttggaagaagctataaatatcattcagggaattgtggcagaaatcaacaccaagactggtgaatctgaatgccgctattataaagagcggcttctttacttggaagaaggccagaaagactccctgatcgacagctctcgagtcgtgtgttgtcatggtgaactgaagaacaatcggggcgtgaaactgcatgttttcctgttccaagaagtgcttgtgatcactcgagccgtcacccacaatgagcagctttgctaccagctgtaccgtcagccaatccccgtgaaagacctcctgctggaagacctccaggatggagaagtgaggctgggtggctccctgcgaggggcattcagcaacaatgagagaattaaaaacttcttcagagtcagtttcaaaaatggatcccaaagtcagacccactcgctacaagccaatgacactttcaacaaacagcagtggcttaactgtattcgtcaagccaaagaaacagttctgtgtgctgccgggcaagctggggtgcttgactccgagggatcgttcctaaatcccaccaccgggagcagagagctacagggagaaacaaaacttgagcagatggaccaatcggacagtgagtcagactgtagtatggacacgagtgaggtcagcctcgactgtgagcgcatggaacagacagactcttcctgtgggaacagcaggcatggtgaaagtaacgtctgacagaagcatgtgcacttcgggaagcaggcctgcatcttacctgtacagtatttgcattccacagatggaacggtttggagaagcactttttcatacttttgtgaaagtatacatgttggcccagtctctcgtatctgtacctttgtccctagtactgtaactgccaatctgtctgtgtaagctggaatctgtggcaactattaccctgtgttgtatttcccaagtgtctggatggatggagaggtactcaaacaagttactttcagttgtcctgctggattttaaaaaaatagaaaaagaatctcaaaactactgttttacatagattgcctgaagagtccttcctcttgtgcttctgtaccactttcccagctcttagatgtggtagctaaaggcacggaatttagacggccttgtaaatagggcatgaggaactcatctgtgtattgggatggtattagagagagaatcaggaaagaccaactcatgaagtgaacttggtttgatcttactcaactagaaagcttgaaaacatccctggggattctgaaggcttaattttgcaaaggaggatgcattgtctgaactttgcaacttcatccagtgcaagtttgatgcaagaatgtattaggacataaaatagaggctgaccttaaaagggccaggacagaagcggctgccagctctgaatctttaactgaaatgcacatggcaccaggaggtgtctctcatagttggttgctagcctaaaacatcagaatagaacccaaagggcttaggaaggcctgccaggataacaagaaggccctgtattcattgtgtttcatctgcctaggcctactcattattttagagaatgaatgaagcaacaaggaagagagaccatgactctatcgatgacactgtttatagaaacacaggagaggaagaatttggaatgaaaagcacttcgtcagaaccttctgtgggagccattgagagaaaagcatggtccagtgccttctgagaaaggccagagctttgggctttcctgctctgcttttgggtcgtcagtttgccatctctggttctgtgctataatcagaattgtaattatgttctccagaggccaatttcattaactctgattaattagaatcagctagccagattagtaacctctttgtccagccttgatttacagtgcagggtaaagtgcagaccttaaaaacagctaagtacctagaagagctccctgcaagtgtaaatattaaggatgacctgtgcaaaattatacccacaccagcactagtggtaattattctaaattattgccaaaaagttttttttaatctgtctttcaagtttacagaaaagaaagcagtaaatgcattgatgtcattttattatgtacatatatcatgtgcattcaagctgtgtgacaagatatatcaatataaaaacaaggtatatactttattattttttgaaaacaaggatattgtgatcaattttaccctgtaaaacatatttctgtatttataggtcttaaacatgatgaattttttctattacaagtttatttaaaactgctttctcaagtcgttattgatacagcaagtgaacctgctgcagacagaagcagaggaaagccaagaacagcctttattggtgaagaaaagaatgaatgattctttgtaggcgccatcagccacttttagaagccatcagccagtgtgttgggaaaagaggtttgtcaagtgttggcctatgggaaggtggtcaatgaatgttttgatgaaatgaatgtttttgtataatggccttaaacttttctggaagtatttcaaataaattacattattaagtcatc

SEQ ID NO: 3287 - protein, 526 aa, Homo sapiens [sequence omitted]

SEQ ID NO: 3288 - DNA, 1387 bp, Homo sapiens
ttcccaggagcccatctggtgagctgagagttagtgaggggcccaagagaatggggcttgctctgccctgtgctttagatggaccatgtttgatagaaatatttggcctaaacggcagcggcaaaacaactttcccatgtttccctctcctaaagcctggaatttcagagggcgaaaacggaaacagagcacccaagatgaagatgctgttagcctttgcagtctcgacataagtgagcctagtaataaacgggtcaaacccctttcccgagtcacgtcgctagcaaacctcatcccgcccgtgaaggccacgccattaaagcgcttcagtcaaaccctgcagcgctccattagcttccgcagtgagagccgccctgacatcctcgccccccgaccctggtccagaaatgccgccccctcgagcacgaaacggagagatagcaagctgtggagtgagaccttcgatgtgtgcgtcaatcagatgcttacatccaaggaaatcaaacgtcaggaggcgatctttgagctttcccaaggagaagaagacttgatagaagacttgaaattagcaaaaaaggcctatcatgaccccatgctgaaactctccataatgacagaacaagagttgaatcaaatttttggaacactggactctctaattcctctacatgaagagctccttagtcagcttcgagatgttaggaagcctgatggctcgactgaacatgttggtcccatcctcgtgggctggctcccttgcctcagctcctatgatagctactgcagcaatcaagtagccgccaaagctctgctggaccacaaaaagcaagatcaccgagtccaggatttcctacagcgatgtttagaatccccctttagccgcaaactagatctctggaatttcctcgatattccaagaagccgcctggtaaaataccctctgcttctccgagaaatcttgaggcacacaccaaatgataatccagatcagcagcacttggaagaagctataaatatcattcagggaattgtggcagaaatcaacaccaagactggtgaatctgaatgccgctattataaagagcggcttctttacttggaagaaggccagaaagactccctgatcgacagctctcgagtcgtgtgttgtcatggtgaactgaagaacaatcggggcgtgaaactgcatgttttcctgttccaagaagtgcttgtgatcactcgagccgtcacccacaatgagcagctttgctaccagctgtaccgtcagccaatccccgtgaaagacctcctgctggaagacctccaggatggagaagtgaggctgggtggctccctgcgaggggcattcagcaacaatgagagaagtatggatagcagtcggggt

SEQ ID NO: 3289 - protein, 434 aa, Homo sapiens
MFDRNIWPKRQRQNNFPMFPSPKAWNFRGRKRKQSTQDEDAVSLCSLDISEPSNKRVKPLSRVTSLANLIPPVKATPLKRFSQTLQRSISFRSESRPDILAPRPWSRNAAPSSTKRRDSKLWSETFDVCVNQMLTSKEIKRQEAIFELSQGEEDLIEDLKLAKKAYHDPMLKLSIMTEQELNQIFGTLDSLIPLHEELLSQLRDVRKPDGSTEHVGPILVGWLPCLSSYDSYCSNQVAAKALLDHKKQDHRVQDFLQRCLESPFSRKLDLWNFLDIPRSRLVKYPLLLREILRHTPNDNPDQQHLEEAINIIQGIVAEINTKTGESECRYYKERLLYLEEGQKDSLIDSSRVVCCHGELKNNRGVKLHVFLFQEVLVITRAVTHNEQLCYQLYRQPIPVKDLLLEDLQDGEVRLGGSLRGAFSNNERSMDSSRG

SEQ ID NO: 3290 - DNA, 59981 bp, Mus musculus
  misc_feature (1)...(59981): n = A, C, G, or T/U
tggaactggagttacagatgtactgagctgctatgtgcacgcttggaactgaactcaaaatctatttcttgacttttcacacatctccagtcccaggcactgagttcatgatttgtccatttgctatggtcaccaatccccatatttcttgaagaagtgtgtttgattcactttctgttctcccagtgagatcagtgccataagcaatgcctgctacctgaaaatcactcattagtactcaaagaaccaagcatttcaggaacttgcttctatttcccagtttgggaacagttggctttactggctttccccaggacaaaatctgcttcattcaagtcaaagacagttccatctgctgaggttaggtcaagtatgagcatatgctctgagacaacatggggagaacataaagaaagacttctattttatgctcttatttcaaggaagaggcacgcaccctcctgctactgcagccacactgagcatgaaaactcctcttaggatgggactaagactgctccagcactctatttgtgtggacaaatgtcctcacaacttcctttgatgttgaaactaatgaaattcgtactccagggataggcaccaggccctccaagttccataggcaccaggccctccaagttccataggcaccaggccctccaagtctaagcactgcacatggtgcttactgagcagccctccttctccagggctaaaccgtgtgattggtccaaatgtgctcaacttgcagaactggtttagtccccaaagacttaattttgtcttcaggcaactaaattttcctgctcagctgccacggagatctaaattaccctagaatgtcaggctagcctctagcttatgtacaaataaaggtccttttatgtgaatttgttttacgtttatccagcttaatccctcttttaaagtgaaacctaaagacacagcagcctagagagaaagagaggagtggtttttgggttctgccagaccagctgccctggtgcatggagacaacaccccgtgctcctcccaagtccctttccaatggctcatgggcctattataagcataatactgggtgcttgaaacaaagccacaaatgattccacagctaagaagtctgggttgccagcatttctggctgcagctgtcatgcttcagtgaaaacaccaaacaagaccaaagctgaggaaaggttttaatcgtgaagaccaaggtcaacatggccatctggtgatggttccaggtcagcacagctgtgtgaggaggaggctagcctgttttattttacctagccatcttttcttaagcattctctaaaataccagagtagcaatttaagaacactagatcaaccaccacattttgatacataaaactggaaggagaggctgatcttttattatataccaaacctttatgaaatacctgaacttccttatggggactgctgccaaacagatctataatgggattttcaatataccccaccctaccccaaagcacacatggctctttcccccttcatcctcaaatccagacatccctggctgagtttcaaagaattctgagaccacacaccactagttattcactttatcacctccctgttcgctcacacatgtagactgaggtcagcttctccacgcaatacactctccactagtcataaacctccctccttggtgtttctcaaccctccataactgttcaaatccctcccctggagcgtctccttaaacatgcctcctcttctaagacagacccagtcctgccgttgctttacctcaccagagggttcgtgactgtgctctgttgtacttttctaattatttcatttgtataattcttcttccatataagaatgaacaatgatgtcttttaatatttacacttaaagagtacctcactcgccatgaaacttgaaagcttgcctgaagatacttatcgttaatggagaaaaagcactgaactatagatgatccctacatcctaaacctttctgttggttctgctagggcacagtaggatgggctcttgaagatggagcactgggcttccttgttctagtctacactgttctctctgccttactctggattctgaggaacaactacgctctccatacttgtagacagacagaacctcagatttcaaagggcatatgacatggatgatcctttccacttccaacactgataggagcaaggggctcccatacattcttgttctcgaaatctccaggctgtctcgtgtcttgcagatacacatcgccattcctgatgtctcatctaaatgtccccagttacagctcaagtctgttccctttctcttgtttctccatgaaaccagggtgttctctgcggaaagctattaccacaccatacaactgttattaaaaaatgtacctatcaggctggagagatggctcagcggttaagagcactgactgctcttcccaaggtcctgagttcaaatcctagcagccacatggtggctcacaaccatctgtaatgagatctgatgccctcttctggtgtgtctgaagatagctacagtgtacttatatataataaataaatgtttaaaaaaaacttgaaatgtatatatcatcctgtctcttttgacaagttaaggatatagcttgcagtgatttaaaactggccttggttttaaaattcatggccatgtgccatgctatgaggtcgtcagcacttcaagtctccaaacagagagaaacaaaaaaaattctgcaatgtttgtttttaattttttaatcaagatagcatcaatatagattatgttgtctttgtgacagcctgtttcactcttgcagaataatgaccactatttggaagctaggttatgcttgtcagtttgaaattttatacatatacatatataatcatatgcatgtctatgttaccaaatatataactcgtgtcttagttttctttctgttgatgtgataaaatgctaacgaaaactagcttaggagggaaggatttataagcttacccctctaaggttgaggtcaccgtctatcgctgagagaagtcaagtcaggtactcaaggcaggaacctggaggcaggaactgaagcagagactatactgcttactggcttgctccctgtggttttctcagcctgctttctatataacccaggaccacctgcccagggtggcaccatccacaattggctcttctccccaccccacctcccgcctgccccttccccactccacccagcaatcactaatcaagaaaatgtctccacagacttgcccacagggtacttgaacccaccttatggtaaatctaaagacattcctcagaaaaaaagaacacatacttaaaactataatctaatggaaaatgctgagtttttaaaggacattgtcttagttagggtttgcattgctggaaaagacaccatgaccaaggcaactcttataaaggaaaacattaactggggctggctcacagtctcagaggttttagtccattatcatcatggcaggaagcaaggcagcgtgcaggcagacatggtgctggagaaggaactgagagttctacgtcttgatctacaagcagtagaaggagactgtgtgcctcactgttgtagcttgagcatagaagagagagacctcaaagcctgcccccaaagtaatacatttcctccaacaacgccatgcctaatagtgccagtccccttgggccaagcattcaaacacatgagtctatagggactatacctactcgaaccaccacagcagtttaacagtccaaaagatcagttttcagatgtatagtcaatcatgtaaatcatttgtaaaatctctcaaaacattaaagttccaaaatgtgtactgttttctagaaacaaatacagatgaagatcggtaatggggatgatgaagagacatctattatcaaatttaccaactgggaacatatctaagcttttaacatcaaacctatgaagtcggagtgaagtctgtgctgcctgtcagaatcaaggtcacccaagttcacgtgatccccattctgactggctacccagccccacaatatttttacagcatgacagctgtcatgaaagtggagtatgttgtatatacattggcctttgattagcattctaatgggggtttcctgtttaaagtcattagctcccaaatggctttctgccataagtgtccagtaagttgacagtgacactgctaatgttatccagtgtaaacaataaaatgatcctgcagcctatgtgactgcttggaaactgaaagtcctaatttattattaagttgtgaatcaaatcagtcttcgtccctcctagtgtaaaagatagaaacctgaaggatttggaataatgtcaaaatattccgagtaaattgaacaagaggcatttaggtactggttttaactgtggtgggggaggtgcctgcagaggtgggaagcaggtagtggatcacgagggctagaattacaggcatctgtaatctgctcaatatgggtcctgggaaccaaactctagtcttctgcaagagcagcaagcgctctgaactgctgtaatgtctctctagccccactgttacagtctttaagataaacagatttacatatgcatataatttaagatttaaaatgacctcatcagagctgccagtgcacactgtacattccttttctagggtccattctttagctggctctacaaaattggataaagagctgtacttaactcctggcagtccatcctggaggaatgaactgatgtttaaaaatgagccactggttacaatttacaggtttactattgctaatctgggcaaaatatatatgcatccgctgaacctacttatccaacgtggaagatgaggtggtaagggaggtcagaagatatatctcaggcttggctggtttacaacacgaaatcagggagaaaaagtaagatccatgtaccagcccctgatcctttttttccctggaggccactcagtttggggaataaagctaactatagagttggctctgctgctgggcgggggtggggannnnnnnnnnnnnnnnnnnntcctgtctggaaatttccaacaggattagaccttgtgttatctgtcctgcctttgtgtccttctgtttttgttcgttcatttgtttgtttttgctttttaacaaaatctcaatcatttaattttaccactgaagacttgggagccagatgctggagtaaaagcctgctagctctgaaaggcagagaaggcacccagctgaccttcatcctcagctgtgccagaatgaatgaatgccctctcatgcagtctcaaaagctcttccttcaagccaaatgtcccctcccctccttctactttctgtgcgtttctgtcaatccttctgactccctcttactctccatgatttttttcccttaataatcctatttcacttcttgtcaactgggtgcttgctctgcctcttgacctatggttgactttatttaatcctgtttacaatatttaagaaggaaggtcttggataaaaggtatatgctaaggttgaaccacacgctagtagcatccccccaccccccacccccagtaaataacacagtcgcaggtttcagtgtgatccagaaatcctaggctggactgttgtatggggcacatatggagcagctgcagggtttgaataagattcttagtagagaaattatttctagagcaaatggtaggaatcccgttcatgttgtgcatggttactgctgtggggtatccatccacaagaaaagaccactctggcatggggttaagaaaagtctttattagtggcaattatactgggtgtttgggatcccagtgtaacatttaggtttctcagagtgagcttttaataacaaaaccatatcttgagttgacaaacctcagttagtaaggacatttagctagaagcagaactacaaaagccaaaagcaaggttagtgcatttagagcctttctcagaactaagtcttggatggattaggtctttgtttcccttctgactggtgctaggatgtgccgagtttcacaacctgaattgcattatggcatcggtttgctaaggtctggggtcctgtacaacagctactctaggaatgtcgtttgtgttggatcgtagaacacatatctgatatcaaaaatatttttttttaaaaagcaatttcatctggagtgatgtcatacaaatagcaggcaaacaaagctttcacaagaattcagtgaggactaactggactaactctctcagtctgtttcagcctgtggggtattttgcatacctttagaattctatgtaaacctgaaattaatattttgtctcttattctaaaccttatgccatgccttcctttctgtaaccctgtagttaacaggctgagattttggacatatattcaacagtaaggttgtcagttcccttttagtttagttccttaactctcaagcctccacatgcttcttgaaatcccatgacattttaaaacagaaacatgtacacagagttcctgtctacaaagtcccctctgtgtgtgtgtgtgtgagtgtgtgtgtgagtgtgttggacgagcctggggcatgcatgtgcaaggttacatgtacacatgtggagtccaaaggtcagtcaggtgtcttccttcctcagtctctgccaggtctctcgtgaacctggatggagctcactgtgagagacagccagccccagcgcgcctcctgacttggctccgccctcagctctggattaaggtgctaccactgcacttggcttttccatttctgctggggactggatccagatcggcaattaccaactactcagctctccagcccagctagttacttcctagacaacttagttgatcattgttaaagtttagggactaacatttccgtcataaatacaggggcaacctttcacaatttaaatagtgtatccttttaaaatcttcacagctacaaaacagaataaatttcatttgtaacaaatcatagaacctggatataatcataataagaagtaagcaaggctgatttgccttggctagaaatttgaggaagacatctaaaacaactacaacaaacacgtattgtttttatgcttaaagtagagaaatcacaagtgtttaaaaaataagctttatgcagggagatggcacagggagatggcacaatggataaatcgcttatcatacaagtatgaggaccagagttctgattctcagaactcttgtaaaaagataagctgtcacagcagccacctgtcatgtcagcactctggaggcaaagagaagggctcctcagagcaagctgtccagctagagtagctggagtcagtgagtctggggctcagtaagagcttaccaagtaaataaactgcagagcagctgagaaatatacctgatgccaattttgggtctctacctataaacacgcataagtacatgctcacctctacacatatgtactcccacatgaacacacacacaaaccacaaatgtgtgaaaaatcattctcttactacatgaattacatgaagagagataagggatgtgggtctttactcatcaataggagtcacgggactcttaacaagagactgacccatgacttgcagaagtttcaccattttcacgttaaatgccatttcctagttttgttattgagcaaaatgctggccaaaagactcacagtattaaagttcactggcctttagcatgtgcccatgccacagcacattgtgggggtcaaagggcaactttcaggagtcagatcatttctgctccatcatttgggtggttattgaactcagaggaacctcaaagtaataaaattgatgctatgatgtattaataataaactggcttaggaaacaccaaggtacacagagtagaatttagctaaaggaactctgcctcgtgcctgggagagaagtgccctaacgaggcttgtgaggaactgtggaagaaaactctgtaccacagtagacgtttaggattactgagaacgtttctgctaattcttggtcaccaagactgatttccagttaagctctagtcccataacaaggcttacaactagccattaggcatatccccatatcaagaacatgcctccgaggggtggctcaagggagtagcacagggtcacaaccatcattaagtcctggtctgtcctcaagttctctgtgctctcaacaggaaacgtgtaattctgcctggtggacaagaacaaaaggaacactagtgtacttaaatagttcaggcaatatctttgctgagtaaatctcccatttgcccaagcaagggaccagacctgccgtctcttgtgtctgtttaaactttccaaagtgtaacctggggctggagcctgaaagatttatgtgaaatgcataagcctaaaatgtaagctaacaacatcttctctataaggcctcctccctgagcattagacacacacacacacacacacacacacacacactatcattaaaaaccatttccattattaatccctcagtgtgcagtgatttctctgtggctgggcatgggaatcctgttaatcctctgtgtactgaaccaccttgatggtccaattgagtcaaaattcttaattctcagccagcatgaaacgcaaagccagtcctagggggacccctttccctccagagttctcttctgtctttgtatcctgactcatcttcctgactcttatccacagccaggggagactagcacaggaatagagctgtactgggtaaagcagttctcactgtggccaagtgctgggacagttgctgcacaaatgacactgatcttgcttttgtctgagagaatcacgaaatgtccctgcgtggccttattttttcgtggtcttacaatggtctggtcagaggtgggtattatatatatattttttttaattaggtattttcttcatttacatttcaagtgctatcccaaaagtcccccataccacccccccctacccactcactcccacttcttggccctggtgttcccctgtactgaggcatataaagtttacaagaccaaggggcctctcttcccaatgatggccgactaggccatcttctgctacatatgcagctagagacatgagctctgggggtactggttagttcatattgttgttcagaggtgggtatttttaagggcttcatgcctcaggagggaatctcagcctatgttttaagatccagaccaacttctggttgctctatgtaatttctcaaaagctttgaccacctttataactcagacctccacatttatgttgcctgtgtctcacattgctccctctacaaaaacaaaatacaaagtgccactagactggataacaaaagacataaagtgcatagtctgcctagaaagaacacttcagaacaagcttcctgatcggcagctggccctttgagagaatcccctctccacctccctagtcagggcttaattgttttctctatagccccgaggtgagccctaggcaacaagacaccacttttgctcacaaccattctagcacttgggaggttcctgatccagtattcaaagccagccagggcggcatactttgaaggtcagtccccgctgggtggtggaccttgtgtcaaaaccaaaccacacccaaactaagtctcgttaatactctaaagatttatcctaaataacaaattcgtatgttgaactccaaattataagcataatttgggttgtatctttaaaaaattaccttaactatcaaattggcccacagccaatttgaaggctgctcgcccgcattaggaacctcaatgtatgaaatacacgcacgagcagcgcccgtagaatgagagtgagaaaaacgaggagctccacaccctccactgacagcagggcccgcgcagatttcaaaaaaggaagccgagcgggcgggcccggaaatggaggcaggctggtggccccggttggcgggcccctcggcgccacttccggcagggcgcgaccatggccggaggtcgggaccgcggggacttggcggccaggcagctagtgttcctacttccaggtaaacgcgggaggcgcgtgggcctaggtcgctggtggcggcagcggcagcgcgggttttttttttttcccaggccagcaccggtccgcaaggtcctagcgagcgcggacccggattcggtgccccgcgctttgctaagcatcctggtcacgtgtcacaacacgcgggaaaactccaaacccggaagcgacggcagcgtttgcgcggattccctggggcgggtccagccactcggcctgcggcgggcagcgggggtcccgggactctgctgtcccctgggagttactggatctctgtagctcagcgtctagaatcttaccagctccaaaccagaggtcgcagtagtcccatgctgagccgctctgctgctctggaaaggcaagggtggccaggcataagggagcctggatggggtttatgtgagcgtggtttgaaacaattccaggacatggtgacagtcaaaaatcccagaaccaggccactcagtgtccctgtagatgatgaccagctatcagggcatgtggtggcatgcgacagccattgccatatgaggagggcaagtgaaataaatttgggttagggaatgcaagccagaaacactctgtcattttacaatgatacatttgatgttagaatacgcgtgaagaaggaaacttcccagtcactttaattttgagttttagtttagcaaatgcagagcatttttacagcaaatatatttcaccagggtatagatatccagtgatgataatttttataatctttatgtaacgacctgacacttactttggatacacagcttctctcctgtgtaaaaagttaaacacattcaagtgtatggattttgggtttgcagctcactcaactgaaccctgtatgctgctgaccaagaagagtagctttccagctagcagctcatacacccgtcttctagagaaccccaggctttctgtcatcaaattagttttgcctgcttggacccctgtgacttttgtatctgtcttccttccctccgtaccacgtctgccagatccatccatggctgttccatgggttttgttggctggttcttaaaaattgcttctggtttgctgtatgcatatcaatgctactactctccggaggatggatggcattaggtgttcctcctggtttgcacctagtaggagttacacctctggcagcattcttttgaggctgttggtggacattggcattcatttcttcggagtgtctgtatcctggagtggaagctgcttttgggtgcttgttgggttagctttagttctgcagaatggttttctgaagtggttgatacggcttcgtcctgactccagctgcctatgatgagtccagttaagccgtaacctcactgatagtgcttggtaaagcagctagtgagaattcctggtgttggtgagccatcagaaggctagctgaacaccttagtttagctgggagaggggagagcctcctttcacccttctgttacatcagtatatttgatttttgtagtaggatccctaatcattctttttgcaatcaaacatgttaatactatatagtagtttgcaataatttgaggggttttgttttgttttgttggctgtttcactgacattaatttccttcttaaagtgtgtcataatcgtaccaagcacaaaactgaaaagactcgatgttgaatgcatccctcaaagagaaaggtgtagtagatctactgggagggaggggtgagacgcattgccacctggtttctgttcaaagctgaggtgtctgtcctctcacctttttttacccttcaggcaaggtgctctctcacctactcattaggctgatagtggttgagggttctaaaacttaaaacttgggcttcctgacttctgctcttccaggtggcctttagtgccacctgcaggctctaagggtccaaacacgtttgatagcagctatggggtctgccctccaatgtaagggcaccggcctcctgggagtgagacttcatttgtgaaggttctgagctagtctgtcctgggctaagacccaaaaatatgcttgctcttctagtaaagactcaagcaccgttactggctggtctaataccccccggaactgctgtatcgaggaccagcctggggagctggggtcctgggtaaccgcacctgaggcttgactgcttgagggttcactgttctgaaagtgagcagagcttgtatacattcagggcacaggcagctaaccttggcttgacatttaatttacattcaagttgcctctggtatgtcccgaaggttacatcttaaagttgattacagggtacttctcagttttgttttgttaagttgaagcctcctagacaaaggaaagctggaactcagagagtggactgtgctagcttccttttcacagacaagctggggtgttgcagcaaggtggaatgggtctttgcatctggaatgagcatactgcacctccgatgtaattgggaatgctacactgctgtttaattactctaagaccagttactttgggaacatgttataaggttccagaaggtcatattcttaatactggttttcttttgtcaatctgttgtacacttgtctggtctactgagctgggccagttgtgagagttagtcaggagcacatcagctcactagagtaggcaggagactgcctgcggctgttggggaagactgttaacaggattcacctcccaggaaatgtgtacattgaaaaccctagagttctgggggcgggggggggaggggggagagatgaaaatcacgtaggactcttgtatataggcccacatagcttgagtaaaaacgtccttaatcagcaccacccactcctacctccaccccaccctcccacccgtgagtgaagaagtttccagatcgaactgggctttagagccagtcctcagttctgttgagttccctctgggtactgcagagctccaaaggaagcttccttgtttgtcatttccacaggcaacccagatgtaatggccagtttgtttggaggataaaggacaggtagcctttggggagtccctgcctgccatcctagccattcgcgggcagtagcttttcagcctggggcatcgtgatgaccacaaatgacatctaaatacaaaacaaagcaagaattaaaactattctaagaattcccattttagaattatgttttcattaaaaagatttaaaaaaaaagaatcagttatggaagggaaagctagttttcctgtttcatgatggaggacctttgcgttagcattatttctgactaatggctttgtaaaaccgaagaaaccgatctttgttgggggttggaggcaagaaagaaagaaaagtgtgaaatacagggcaaaggaggggctcctctaggctttgtcagggaccctaggaaacaaatgactttttcctcttccccaagggttggcacatgaactcagggtagaaatagaagtgggcctttctccctttgtgtgcacacatgtttgcgtttagaaacaagcctgtaggttgaaagctgcccttgccttggcaggtagtagagaacctggccactccatgtgtggccttgagaatacgtctgctcagcttcttggaagattgctcatcatttcctgcaggccatttctgggttgtccagcatggctcacatttaacattttccacacgagtgaacctggctttgtctttatacagcgtttcttggtggggccccgctgacctttctcagatggctgtaggatctgcttctgactgtggagcacgttcaggagtgatggatggaatccgtcagttggcagtgggtaatctgttggtgtaatcttgtcctcttagtaatcattccaagagatgtggaacaataagcaacaacttatggctcccacagatttatcccctagggcagagtaaaaaactcataaaggaaagtaagccatggtcttagaatttgaatagcatcctggggacagcaaaggtggtcacaccatggagctttaccagggatgttaagcaactgctcagtgagtgttgtctgaggcctggctgtaatgaaggacacctggaaggtgtgttgtgtggtttgtgtgctttatcagctgtgtccttggacaaattgctgccttcgtgcagagtctgtcttcctcatttctacagtgggagagcgagccagtctggtgggctcgtgttaacttccacgctctgtccaccttaagcagggccaaagaacaccccagttccatttcttcttgcgctgttttccctaacactgtttttgctcttgtgcccaattctactctggattcaaggttccactttatttcccacaaggccaagttatgtgcactcgcccacctttactttctctgaatgctggtggctttttatctatctgcaatcctgtctccgctttctctgcgtgtggaactcctgaaacccatcttcaaagtaacctctccacggaagccttctcgttgggcctttcctattagtgggaccttttctactgctgtgggtgtgattaccagttttgtataaataattaggtgttgagcaatccaggagctgcagggaatccaggtttaaggtttttagaacttcctttgtgctgaagttgaaagggatgggcatgtgaataagtctaagctgcatggtgtccagtccccccatgaagaagctggctggtgcctgagctctctcacactagagcaaactctcatgagggtctatgtttgctaagacattaagtgggggtctcccacttaattgttttattttattttcctactagagcaaactctcatgagggcctatgtttgctaagacattaagtgggggtctcccacttaattgttttattttattttactttattttattgtgggggagtcagtagacaaggcctcacactatagcccaggctggcccagaactcatggcggttcttgtgttgccctttctctgttgctccaccatgcctggctacgtcatttattttagatttgactttgttgttttagctccttagtctcagtttttatccttaacttccagttacaaattttctatctaaaaaaaaaacaaaaaacttaaaaaaatgataatatatatctagtacagacattttagcattacaaaggaaagtaagacaaaaatgtattattgttcatgattctgtcaccccagaagccatttggagatctctttccagtgctttttttgtgttatagatcacaaaatgaaaaacattgttttcttcctttcctctttttcttttcttcattctttacaccttctccgtagtaacactaaaactcagagccactggggttgtgtgagaacagaaagccctgttggttcacccaagagctagaagccggcttggcattctcattgtggtggtacaatgagatgattctgagaagctttgacttttacaagttacacattggtgatgaggaggcacgattgtgttataacaaaccagggatgtttcatccagaagacagtatgtattttaggcggattatctctaaaatggatagattgaaaaacagatctctgcaagaatggtgaaagtccacagaatagtgatgggtgcgatgcacagacatctcagacatggtatttgagagccatcaaaacatgttgaatgtttgaggccagcaccctgcacactaacttccctctgtgctcttggcatgagcagggagatagtctgaatggtccaagcctgccttgtatggaaacttgtgttttccactgtggctgccgcatttgacatgaacttctctagggcctcctggcagcttcacagtttcctaggtggggttggccacatgctgtggcagggcagctgaatggagcacgagaggatgaatggcacttgggtgttgtatcgacagacagtctaggttttctgcctttctgagcattaataacttcttaaaccaactccactcctttctgcttcctgaactggagcaacagggaaccaccctcttgtcaattgttaagacagtcttctgctccaccccccaagggtcctggagcaacctcccaccacccatagcagcagccaggagacagccactgtggttcaagatgggagaggtgggcttaagtgtgtgggctctcctataaggaagagcttgtagagatagctccagaagcatccactggcaccactggcaccagaagcctcaacaccctgtgtggcctgtcctttaggtgtagacctcttgtaaggaagtcgagttgcccttcaggatgagtaggacagtgttggttccagaagccctatagacaccaaactcaaatctatgagtttgcataacctacatacacctacacctatatgctttaaatcatctctttatttctcaaggattacagtggttatagaaaaccttttgatctcctagctaaccttgcacaacacacctttacatgatattgtatttgaccttcacagtgaccttaggcagcagtttaaataaggctttattatcactgccttacatattgggaaaccaagactcaaaagtcaaatcagccggttaactagtagtaggatttcagtggcacagactgtcacccccccccccaagctcttacccagggcctttgcttttcattcttctgcctgcatggtggcattgcagcttcacaagagaggagggagttggggggaggatcccctctgttctgtttaatgaccagctctatttggtatcaggtaccttagtcagatctgctccatcttctcttccagaattgtcctgtatcccagatacctcaagctccaactgtacatgttgctggtcttgatggctctgagccaactgtgaccctgaattctttaccagcgtccttttccctggctggccaatcctagaaacattgctgttggtagggatagccctgaaaaaattgcagcctttgtttgctatggtcttggtggagactagttttccttttgcctccgaagcttcacaggaaatttatattcagagaaacccatcaatgggaagcatggtggcatgcaggcatgctggaagacatggtgctgaggaaggagctgagagttctacatcttgatctgcaggcagcagaaggagactgcttgccacacaagtgtagcatgagcattggggacctcaaagcccgcctacacagtgacacacttcctccaataaagccacacccattccaacaaggcctaatagtgccactccctatgggccaagcattccaacacagaagtctataggggcctttcctactcagaccaccacatgcagtggcagccagcctcctggaagccttgaaggagcacagatgggacagccaaagccttttcaggctctcccagctgagtctcactagaaagctggaaactgttctcatctctccagtctacagtgaaaaccagcagccttataataaaggaacagaccagatgtggtttgaagcttaaaaacaaacaaacaaacaaacaaacaaaaaaacccaaaccttgctctgaaagcattgttcttatttgtgttgtggcttcctgaaaaaactcaccttcaggacactgttattatctgacctgacttggtgctcagagcttgctactccctaggtcatttatttgtcaaaaacatcatagcttctgcaaggactgtacaagtctggcaaacagtaatctggacaaaaccttatagggaatgtgtagggaactaggtgtccacatggggccctgaggaagtctgatttacttaaaggctatacacacatttaagaccgtgcaagcccaggaagagcctgagagggcccctgtctctcatctctgatggactgatgctctgggaaaacaaagtgaaagcttgtcccaatacacacagagccccttagcaaagactgcagaagctcagtgttagtcactgaggtggctgaacggagcaatcataactagcagtagagtatacagacttgacagagttagtccaggaaagtcaccgaagtgacttaaaaccagcagcagttcctaggagttaggggaggacaggctaatttccagaattgccacattcattatattttatctaacataatgttgagctattttaaaaacacaagatatgcttttaacaggaaatatgtcctgagagtgagccaagcagctgatgggtctgccctagagacacttacttggtctaccaaggttttaatcagaacttaggaatttattctgagaactaaagcaaaccgactgaatcgtgaaggcataattgtgagacctcatagagtagaaatagacttataagaaagcacacagacgacgactgtttataaaggaccagacaagatgatctcccagcttccccccaaacaagacctaaccagcactgtaagtcagtcctacctaacaggttataacacaaacatgtcaaatgatcaaaactataccaaatacattctgcaagaacactgaagtgaaaatgcaagacaattacagaaggaaatttgggtggttcacaaatatacagaaattaaacaacacagccccattacaagtgaagccaaaggaaaatatgagggaaactaaaaaatactttgaggcaagaaaataaaacatgggcttatgaaatgcaggtgacagtgcttacccagtaagatacagagctgcacattatgaaattattaaagtagaaagaccttgggtccaggaacctcacctaccacagggaagctcactggctccacagcgaagcagaggggaggaagaaaagaaatacagagtcagacaccagaaacaccagcaaagcagaagtcgggtcctttcgaaagcagataacaaatcgttcgccaaactgaccaaggtggaaaaggcggacctttcattgctgctgaccttacagaagtggggaggggttatgggaatgacataggtattgcagatgagactggcagactcctgaatagaacaattacaaaatcagatctcaagaaagagatctgaatagaccacagaaaagagactaaattagtagcctgttttccacaggagaagcccagttcctgatggcttcattagagaatcctcttagacactgaaaaataaaattgatcctgcaaaaactaggaaaagaaggcatacttggtccgtggggcctgcaaagcaggcaagagcatcacagaggaagtcagtttatagtctatgcacataaatgcgagactcctaaacacctagaaacaaatccattgtggaaaagtatgtgtgagcaagtaggatttattcagaaagaaaagactgagtcacgttgtgaaatatgccctgcagatagaataaaaatcagacaatcatgtcagccacaggaagagcatctttcatgaccaaagtcctcagcagtttaagaaaagggagctgtctccatctgatacaaagccacagacaatgttgtggcaggcatatatctcatatgtgtgtgtggtgcagtgaaagtattttgagtaaataatgtatgtgattaaattttattttacctatgcttaagtgactaataggaaaatttaagttgcatatggaacttgaatttacagactgctcttcatttcctttggataatgcagtgctataccaggttgcactagctgggtccttccccggccaacagggactagatgatcatgaggtgagggaccagagggattgatgggcagggctaaagacaagggataagaggtgtgttggggaaaagctttgtttgtgtgatattcccagcctgagccagctcaggaaagagcagcataaagtgagtggaactacaacagctgaggacaaagtggctcaggactggagggctggtgctcatcttgctgtgcctgcatgcaatctgtcaacgagaaggcatttatggaaggccaactaggcgttggatactgtcccgttaggatgctaaagggagccaaaaagaggccggatcctggtggcatttgtcattgtggatttgttgttaggatttttggtccggcaaaaaacattgcctgattttttttttttcaaatttagaggaaatatatttatttctgaaacttctgcagtatctaaaagaacttcgtttttatataagcatctgagttctttagggagcacagcaattaacatctgcttgtctcttctcttttgattgctctctgattgctgtggaaaagcttttgtgtgatgtaatgccacctgttatcttggcctttgttgtctgtacttttggaattagatcccagaaagtctttgatcagaccaaaacacaggtattttcttctggtaattttatatttgaacattttagcccatttggagttgatttcatgttgattcagtccagcagcgagttgttgcgtgaggaaatatcattttccccacaaactagacatcttcatgcagcctgcctttgttcccagagcatgtcagcgttgtgggagtggcctactgactctctggttgtgctctgtagctgcagatgtcctgaagatcttctcactgctcgctgtggcaaagataaaaacactgttgcttccggagagcttctagaaatggttctgttctttagttgacttggccctgtaatgtttaattatttggggctctggaggaatggggaagctggaagagaaacactcaatacagttttctcatgataaaatatacagtagtcaaaatgcttcaagtcccgatgaagcgtctgccatgaggcacgaggaagtcatgtggggaaggctgttggctcctgtgcctcagacacagggagctgagtggagctcgctaggcaagaaacatgggcgtggggggcaactttgatattttagaaagttctatcaggaccaaactttctaacttacatttcagtctagacggtcattccagaaagagtctcacccagttctgacagttgaacccgcacccctctctttatgtaacattcttaaaacagactcggggagcacagattagtgcctgtcagggtgaggtgttcaggcgttcccaactgtgtgcttcgcgtgttctgtagcttgtgtttggtgaggaagcatttaggagtgacacaccttcttagttaagtgacccttcaatctttatagagtgactttttaaagttccctggtaaggtctgttagcatctgcctctcttcattcttcttcggtctttatgtctacgtgtggttcctgtgggcaacatacagtttcccccttgcttttgaattcggtctgagttcctgcttatccttgggatgttcagaccgtcgccatgtggatgtgtttactgatgtaactggggttgcatctgctgtcctgctgtttctcgtttatcatacatgttctttgtgtctgtttgccctctttcttttgagttaaatgagtattattttacaattcagtttcatcgccttactgtcttatttgtgacagtttggggattttatcattttagtgactgccatagggtttcttgtacacatttaattggttgtatctaccttatcacttcacagatggcacaagaaactcacaaggtattattcttacagctctctggacttaagctgatgtcatatatttttgtgaacatatgatgtaaacactactctgaattactttaacttaagcagtcaacagtccttaaagagattgaaataagaagaacaaccctcctttattagtcacacattctcctttttagattcctgcatctagttttgtgatctttctgccagaaggatctcccttggcattccttgtggagtgtgtgtgtgtgtgtgtgtgtgtgtgtgtgttcctgattatgcctttcagctcttgtgtgtctgaagttttgttttccacgctccttgtccaaaggtagtctctttacagtgacggtggtttagtttatggatgtttctggattgtcttctggcttgtgttgttttcacgtgcttagctgtcattcttggccttgcctctctgtgcatactatgatgctgacacacacacacacatacacacttcttctgttttttccttgtgtgttttggggtcaccaagtttcctggatgtgtgagtttatagttttcttcaaataggaaacttttccaaatagatatgtttatcatcttatttctcctcttttgaaagcatccatctcacacgtagtaggaggtctgaagctggctcatagatcaatttgtttatttatttatttatttatgcttttggaacgttttttgttactgaaacttcaagttcatttttcttttgctagtagttctttctgttggatttttcttctccagcattttgatttagatcatttaaaggttttctgttcccttaacattttatgcatgaggtatatttttatgccgttttcatttggttccatataatacaaatctcttttgtaataattgaccttttccccacctttcatcgtgggtcatacttgtccacattttttaatatctagtcatatttgattaagtgccaggcatgaatttaccttttacagtgatgaatgtttttgtattattaattattttggacttcaaaaataagttacttggtaaactgagttggatcctttagctgttgcttttaaattagtgtgacaagatcttagcagctgtcagttaggagtaactgttgcttccttccagggaagtacctgttgagtgttctaccatttcatgccctgggatcatgaagaatgaatgggagttgggatctctgcttttcatggagagtctcatgtgcatgtggaagggaagtgcagtttcccaatgattccccagagaggccctgctgcacacacttgggatgggacttttttatcagccttcttccacatggatgccatcaccctcctgtctttggagctctctgctctatcatgtcagctctaagtcagccaggctttgccttgttcctctgccccagggcctggaaaccctctcaaggaagtatgccagggcagtgagcccactgctgttagctcaagaaaaagttgtgttctttttatggctaagccagtgtttgaacccgcttgcaatatctctgtgtgtatgggatgcacagagcacggagaagaagctcagttcctcaccaagacctctctggctgctcttacctagatgggctgtgtgcagccttggccaccttcctggggtgctcttgtgtagatgaggtgtgctccttggcccatcttcctggggtgctcttgtgtagatgggttgtgttccttggctgcctggtttctttggtgtctgtgttgagttttgactgtggtgctcagtctatggaaggtgtcatccatcttggtttccatgttttaatctatgcagttgaaactttgacagtcccgtcctgtggaggaaacagtgcaggtacttgctttctgcagaataaggttattctattataattaaagtcctgaggtctgactctatgacagatgcagatgagtggatcaaagaagaatgtctgcagacagaccacagtgtatttaagcggttactttgaagattccacccagtgggttttgaagcagatgaccaactcattgaaaattagatttattaacagtatcttaacccagggtatattctgaatcacctaaatataaatttaacatatccatagaaaatataaaaaatacatgtgtttttgaggaagaagactttctaaagtatgacacaaaagatacaaacataatgaaaaatagggttatatgaagattctctatgcttaatatggcaaaagagagttataaaaatagagctaaaatacagttactgtcttttttatataaaggctgttcataagatttttttttaaatgacaaccccactgagaaaatgacaagggttgtgattaattggtgtcagaaatgaaacctagagaggtctagtaactagtgttttttaaatgaccttcataaatatatttaggacttattttgtatttcagtttgattatggcgagtgcctttgactccttagcttaaggttttttggttttttggttttggttttgtttttaaataccgccattagcatcttctaaaaggaggctaagactgaggagatgatcaagccctggccaaggtggcaaagcttaagacatctgactctaaagcctgccccgcatccctgcccctagaagcaaattaaacacacttcaagtctcactgtagcttacattgaaaatagttgcttactgagggtcacatggctcacaaatgataaagcaaagtttttagaaagaaaaatcgaataagtggaacagtggaaaacagggtgaagcgaggcacagcagagaaagtgcctttaatttcccactcaccttttcctttcagaacatttaaaagatgcctcgaagaagaagaagaagagcagcctcctgttcgtaaagctggccaacccgcactcaggtgggtctctctcccctctgtcctctccctcatcagtctttgagtatttgcagcactgtgcagaccatggagtgctcgcctgcctgtgtgaccccttgaattaacttaagacggcatcctgcagtgaaaagccaagctgattaattttccaggataaatcaagcagaagaatatcgttttctttagtttccgtccacagaatgttgctgttagaaatgctggcgacttagaaaagtagcgtgtttgtgctcttcctgggaccggattgatttcctttggctttctcacgccagctttcctaggcttgggcacctgacactagtactgtgttcatgttgtggtgtgcagtaaagaagcagagtgcaagtgcagacggttgcctttgacagccgtggttctgactggttccattttagctcttctttcactctgaccaaaaaggatactccccaccccgaacccatgttggtttttcttttattaagatcattgtatattgaaaagctttatgtcttattggtagataagtttattttaattttatattcagcacattttcagttctgctttctaatttcgaggcaaaagtattacagcgcactccatggtggatttccctcctaaggatctgcgtaaatccctggttcctctaaatcacggctctcctggggactgtgtaactgcacagagaatgagggaaagtccctggggactgtgttgttggaaagatgtgtaaagcagagaaagtgaaacagaacagaacaaaatcaaacgccctgccccttcctctagtatctttcctcaaagtgaagttgaatatgcctgccgagccacaggactggagcagccagagcagggcggagggatctgggagaagttctaggctgccctgttctaaccttctagcaagagaaggtgcgtcctcagcagctcagattccatctagatgcacacagacacaggcatgcctggtttattttcatggttgttaaagggacaacaagggctgggctgaacactgactgtcgtaggcagtgctctaggaaatgtacggctattttcatttttttttcagtcctcacaaagcacctctgtagctcctcacgtcacactcagcatgccacaccagggattccagagagtgctctgtggttagaaagcgatgtcatgaactgaggggtaaaacatctatgcatcccttctacccaccttcccttccccctggcacaggccctgagctaggggtaaaacctcagctatgcacaggcttcacccctcctgttcccatacatctgatttgctgagaattgaatcccagacctggcacatgctgggcaagtgctctaccgctgagctggcacctagctctccccaatttcaaaagaataaaatggaaaatcatatccagtggaccaggcttcaagaacgtccctccctttctcaatagactggctggtagcatctgagggtttgttccgagtctttgctccttcctgtgtatagagtgttacatgctggcatgggggcagacccaggctgtcctagctcacacatctgactgagccgttaggagacttgtgcctttcactctgatggtttaagttcagtgaggattatggagctgaactcaatgtctgtgcctcatatccatcagcttgccttggagtctgctagcatagagcatgactccgcatgtttaggttcctgtctggcgcattcctcggaactattggacagacttttgatgtgtgtgtctatttgtgtgtgtgtgtgtgtctgtgtgtgtgtgtctctgtgtgtgtgtgtgtgagagagagagagagagagagagagagagagagagagagagacaagtgatgaatactaaatcttcctgtgttacaggggaaggagccacatacttaattgatatgtgtcttcaacagctgtttgaaataaaagttttcaaggaaaaacaccattcttggtttataaatcaatcagttcaatcaggtaagtgacaaattatattcccaccattagctaaacaaacacttctcatctcatgtgggtctatgggtccatcctcctgctttggagtgtggaaatgggcagccttcctgggtatcagaaagggtttggatcaggtgaagctgagtcaggttgtcatgtgttaaactgacaattctgatttatctcctgaaacaccaacacatctctgcaggagctagacggcatgtgtgccattgagcacaggctgggctgattggaaacactgcctttagaggaattttcaacatattatttaacatattaacatattatttaaactgatacaatttttaaaacatactagaatataacaactttttaaacagatggtttctcctgatttcctgtcactgttgtttaataaacacatactttagaccgtccattcgtcagaagagaagttgttctgtggttcaatttggaggttttagtctacagttcgttgtgccagttggttttgtgttatgaattcatggtggcaccatgtggcaaaaccacttacttcatgaccaggaaccagagggggtggggaagaccccatggtccctccccctccaagggatctcatgctgccctctgggacctctatgggtgcctggattcaagtgcacatgcatacacacacacatagacacacacatgcataatttaaagagagaataaacctaatttctttttggaaatgcatgtagtgtctctatagctctgggggtgggaagtacactgtcccctctgctgtagctgtgcctactcaggtggtacatgagagctccggcttctgctctggcatgcttagctggccttggctgatagctgcagagcatcagatggagactggaaagtggaggggagcagtgatagagcctggacagtctggctcgcagaccactctttgacttttaaagagcagtttgatttcattctgttagtcccggtgaccaggaggttgttattcaaatcagaaactgggttgctttgttagatattaaagataaatgtgtgtctttcctgaaaccaagaataaaaggttggggagaggcaagagaactgcttagagctgcattgatgaccacaccattcctcaagtgtgtgggaaggggggctctggggctaggagaggaagaggcagagttctcacttggcctggggagcactgcttgctcttcactctgtcttctcaggcagggtgtcatctggagtgtggacagcacagggagccttgcttgtcacccacagtccacaaccaggagccacagtagaagctccagagcgtgctgggttttcccagggctccaccctcctgcacgggaggcagtgggtctgcagttttacaggatgcttgacctggcctcctgagctctctggctcaccattctctgtgctcccccacacttctactctctccagtgagacctataggaaatgattccaatggtgaaatgaaaagtcgttttaactctcttccctcgggatttgaagccatttaaagtaaaagctcatggtgcgtctagactgaggaaggcaatctaactgtaggaaatgagagcatttaaaccaaggtatttcctgagtttgctgatggaaaacacaagctgctacacgtgctgccacgggggcagatgtcacatttctgaatgtgggggttcaccacattcagttcactctgatgggtaaggtgaccaagcggtccttgtaaggcatacaacttctctttgttccttctctcctgcagggggccttctccactttgccacacccatggatccattgttcctgctccttcactatctcctaaaggctggcaaagaggtgagcttcccatggcgggtgtctgaaggggagcacagagacactgcttctctttttcaaggtgcacttcagttgttagaacaggtgccccacatgtagcaatgagggtcggagtgcccttccctccctggagaagcagcaccttgatggtgatcaagtctgatcaagttactgtgacttcagtggcctagcttgccactctgtaccacagtggtagccatgcatagcaatgaaaacctagcactaagtgcttagctgtgaatgttaagaattcagctaggaagggaagatttcccccgtgggtgagtgtctgagaaataggtaaactgggttctgcctaataaatgccgactaatggggagcttaggtgtgtgtggttgggacgtgaggacccagagcaaaagcactcctttctctcagcgctcagtctcaggctttccgtgatggtgtctgtgcccagaggtgtacaacagcagaaactgggtgagtgcacttccctcacagggagccctgaagacactgcattcaggctccagatttgaataaaatccattgcttttagtacctgagcagggatatcaggttttttacttgtttagttggttggttttggttttggttttggttttggctttggttttggttttggttttggttttggttttggttttggttttggttttggtttgtgcatgtttaagaagatatcttttatatgtatgtgtgcctggtacccatggatgccagaagagagcatcactgctctgggaactggagctacgggcaactgttagctcccagatggttctgggagctgaatccagatcctctgcaagatcatcaaatgtccttgacctctgagccgtctttctagctcccaccatcccccaaagccaggatatcttaagtgaaactggcaatttaaaagctgtaagaatatggtaaaagctggggtgctttggtgtccctgcctcaacaccaccagctaaggagccccatcttgctaaacatcatttcggttaccagcatcatgccaacctcatgggaatgcaggtagccttttagaattactatgaatatagatttgagcttggagttctcttaaaggagaactgggagcactcaagttcttaaaaatcagctcagtcagcttaaaatctttgagttcacaactttaatgagtattggttgaactgcttagatagaactatctatttcttggactttcatatttacttatacagtaaacgcttctggttcattgtatttggtctttaaaccgaattcttaaaatttattttataggctaaccgactttgttataaacactgacagtcacaaagctcgccttcttcctgctttgatctgtacactttctgctcctccctttgctcttacctgagagctgccatgacggtcagtacactgggatccacacacggtagtgaggctattaccactcatgcctctgagccacagagactattgccaggaagctgagggaggagtcagcttgtgcacaaggcggatgttctctaggggaaactaacagggagacgcgcacctcagcttagtacagggcactgcctcctcatctcctgttaagagcaagacccggtttcagtgctcctcagtctggccttctaggagctactaaattcaaggtgacagatgcagagtgaagcagaaacgttgccatccagagcccctgtgccttttcttcttaagtcctggatgtgtaacacttgggtgcctaatgtttcttccctacatttagatggcgtcgtgtctaatttagttattaaaattttgttcccacttttaaatttgacttgttctttttaagcacagcctttcacaccaactcttattaactttatatttaaaacatatttcttgttttgctcttttgtggacatgtagcaaagaaaataaaaatataataacaataatgaaacttctatcgagactatagtgccattcatgtcagtattatttaaaacagcgaagtataaaaatactggttgatcatgggaaacaaaactttaaaatagaaacctaaagaatgcaacactggggagcctgggctagatggaagagcatttcagtcaggcatttctggccttctagcctaatggaaaaatatagcaagttatcacgtgtactgtgaaagaaatgacaggattcaccttgaaaaccagagaaaatcgatcagtcacactgtctgtctctaggagttcagtctcagaagcagagatgcagagcaggacctgggcagacagtgaatctactcctaagcctggctccctaatcagactgtcttcatcagatacgccttcccctgccattagtgatgttaagagaaactgcacctgagaatgtctgcatggctcactcctaacagccaggctatgacagcttgtctgtctggcctgtcttagcctgcctgtgtcttctttttacttatgtctcagctgccttttcctttatttctgtctaatttggaagcctcatctgatggctctcggaggaatggatccactttgggaatttttctttttggaatagaggacttttattattattattattattattattattattattattattattcagtcctggagtgaagacagggaaacagatgtatattctgggcctgggctgggctccttctaggcctgtgtgacagtggaacttgtgccttgagtcctcagctggctctttttttatgtggaatagctggaccatcctcagatggtccccaccatcttttctgtcctgtttctctctttttttcctgggattttcttttcacacagggactgtgccctcgaaggagctagcttgctctttagagtgccctcctcacaagatgagctcaggctcgacccttgagcctgtcgcagtttagaggctccctcagtggaatgaggagctcaggttctaatataaagatttcctgtggagtgcttctttgtttccctcttctttttgtgtgaaagctctgtggctcagccgttggccacctgactgactcagatgtccctttcaggggaagtatcagcccttggaccaagtcgtggtcgatgacacgtttccagattgcaccttgctgctgagatttcctgagcttgaaaagtcacttcggcatgtgacagaggaaaaaggtatggtgtacaagcctttgaaatcaggctgtggccgtgcggatctgtctgtgagcttttcagtagggagagttaagggacggaggatattctggagaagctaaggtggttagccagttgtggacttggaagagcaggggagctgagcatgggggtggagctagaggggaccagctgttttggtgtaggacaatctgcatctggtgaggcagtggtgttcgcatgagggtgagtcaagaatgactctgggcctcagcctagcccaggagacatacaccaggagacagaatgtagaccagaggagcaggctgggagatagttataggtcctagtcacaggtgttctgaaagtaggaaatgagcgatgtgcacgttggtgcgtgtagtgatgggcttcataaacaattccattcaagtgtctcatgctctttgagacttcaagtactgtattgagtaagagtggagagagcagacacccttaccagacaccttacctcattcccagttttaggggaaatactttgaggttaccccatttagtgtaatactggctgtcatcttccatgcatgacctttgctatactgaagtatattccttctctaaattcttctttattcttcataaaaagatgttggatttgtcagaggccctttctgcatttgttgagatgatcatgtggtttctattcttctattctatatgttggtattaaacttactgatttgcatatgtttaataaagcttgcatgtggaatgaagctaacttggtcatgaagaacaatgtctttaatatgctgttgatttgcttcacaagtgttttattgagaattgttggggccgcgctcattgctgtctggaaatgttctttttgttgttgtagtccctgttcagtttgggggtcaggtgctggcttcatgaaatgactttggcactgttcctcctttcagtcttctgcaataatttgaggaacagtgacgctacttctttggcactgcatgaaaattcagcaactgatcgcctgggtcaggtttcagttgagagacattttattactgctgcagtcttttgcttataaattaatttttacttatagatctgttaagttgtgtatactgtcttagtttgattttggtaagtcctacggatctaaaactttatctatttctttaggattttccagtgtactggaatataggttttccaagtgaccatcttttgaatttccttggtacatattgtcatgtctcttttctcctccaattttattactttgggtcttctttctctttcttttaattagtttggctaagtttctgtcaaccttatcttttcaggtcaatttttatttccttgatcctttatatagttcttttagttgtatttaactaatttctgccctggtctttattcttcctttctgtctctgattttaagtttggcttattctttttaaaaacatgaggtactccgttaagttatatatttgaggtctgggtggggttgtttgtttgttaattggttgtaatggaggcatttttagctataaacttccctctagctgcttttattgggtcccacggtttcggtatatcatgttttcttttcatttgtgaatgtgttttgatgaatttgaagcacagtacaaacttggtgtcagtatcttaaaaatcaccctaatagtttcaaagctaagaaaaaaaaaaaaaaaagcgtgggcaccagacagaacatgctgattggccgtttagggttacagatggtctggcaactgtgacagttcctctggaaccaagaaagtgatgactccaagaagcatactctcgagggatgtgctaacatctgagagggctgctaactcctctgtggccacatttaggatccatttcggctctgagaggtgtatggtaccaagattgtcggaatcatctcatttcagatcctccatgatgctatattttggatggacagctctcttttcatgagtgacataaatggagcttcacataaccgtttctgaaagttaaagtaataatggttcttgccctcctccaagatactctactagaatctttgggtagtatatcctttcctaataattgccttttatgtagcaaaagagagtgataggcgggagccagagagaaaaaaaagggagggagggagggagggagactgcagagagcgctcaagggattttaggcattgcatgtgtataccttccaggttatcctcagtaattgtgttaagcactggctgctatttaagtttggagtcctctattataaattagtgtttggttctagtctctggtatttatttactcagattcccccgtctctatagccctagatgcaggttacagtgcctatggtgttaaatgttagcttgagtccagtcagtatgtaagaatcttctgtgttgctttctccctgtggatgagctcagccatggtccctttaaaagtggtctgtgctctgaacacagtcagtggggatgctctgattactgacttgaggtctcagaacatgtttctgggcaaagaggctcacaatttttagagaagacacagggaaggactaatagggtcatgaactcagcgttgactgagacacttttttataaaaaacaagccagagctgctctatgctgggcgtgtaattaacaggcagatactagaaattgaccatgcaattgccaagattctaacccaggggcaggggaagggggcctgagagcttcttggttatgagaaacctttagaaagcagaaatgaaaatgtgctctaggcaatttgttcagtaaatcattgggggaattcagatttgcacacggattatccaattactggatgtgttacttaatcgtaaaattacttttttcatctttatcatgtaaactcaatctttccagatgtttcagaccagtctaaacctttctaccatatgcaaatattgtctagctcaatgattcacaagtattaagtttgggatgtgcatgcatgtgttgttgggtttttttttttttaagatttacttatttactatatgtaagtacactgtagctatcttcagacacaccagaagagggcatcagatctcattacagatggttgtgaaccaccatgtggttgctgggatttgaactcagggcctctggaagatcagtcagtgcttttttttttttttaaggtattttcctcatttacatttcccaatgctatcctaaaagtcccccatacccacccacctcccactcctctacccacccactccccctttttggccctggcgttcccctgtaccggggcatataaagtttgcaagtccaatgggcctctctttccagtaatggccgactaggccatcttttgatacatatgcagctagagtcaagagctccggggtactggttagttcataatgttgttccacctatagggttgcagatccctttagcttcttgggtactttctctagctcctccattgggggccctgtgatccatccaatagcagtcagtgctcttaaccactgagccatctctccagcctggttttttgttgttgttgttgttgtttgtttgttttgttttctgtttttttagatttttcatatatgagtactgtatttacatcatttccacccaacactctcctcctacttctgtgtcccctattccctctcaaatttatacatctttttatatatggacatacatgtatacctaatgaatataaccagtttaagcatttgctattgttcgtgtgtatatgtggtgaagaccagtgtcttgggattggatagcttatcacaggaatttaaccttaaaatttatgatataaaaaccttctaaatagactagttgttttcacagtacattgtattttactttagaagaaataatactcagaacaagacgatttgttcagacattttcagcaaatagatgaggaataaaatctgtgaaactaaaattttatgagatcagaaatggccccaataccaaagtcaaagttgttataaaaaaaaaaattaagctaatatccttggccaccacaaagcctaacagaattttaaagatagttaaatataatacaaagtttgttggccattagaaaatttggataattcacagatttgtatattataaaagaaaaagtatgatcgtgagtgaatacagagaaggcagttggcaaatgcagtcatgagatacatttcacgtgagctgtctcactctggtaaagatgtctgcagcagactccttatagcatcctagtaaagactgaacgtgttctcctttagtttggataaggatttcatcttggcagaaatctcagaaggttcagtagcaatatgaggaagagagaaggcaggcaattgaagagtcaccgtgaaaatgcctttctttgtagatagtgttgtgtgagtacaaacccaaaaggacccacaaaacagtaggacttagagtaagcaaggtgttgggatgcaagatcacttacagataacagttttgtgtgtgtgtgtgtgtgtgtgtgtgtgtgtgtgttgtgaggttcaatgggagaggggcttttgaaccatatatccacgtgaaaataatggacattggtagaaaaggaaactcaaagtggcttgttgaattaaatgcaaaagtgaaaagtttttaacttctagaagaaaaaaggacaataacctgtaagatcctgaagaactccagtatttcttatgacacagaaccaccagtataaaaaagtgtatcttgtatttcatctagtaaatacttttttaggacacagttataaccacttgacagttttatgtgactcagtagttctactcctaattctttttttttttttctaggctttattaaagtgtgtcagtgccaaattttgagtgagagtgtggcctctctgttgttttgttttgaatagcaaccatcccaaaatagcccaaatagaacaaatccatggctctttctcttgggtcagcaaatgtagtcctcctagccaggaccacaccaccatgctaaggaaggagctgctgcagacagcagtatggatacatctctcaaaaactgttgagcatattctgcaggacccatttctatgaagctctagcactgtggttcccaacctgtggctctcctccaccctttgggggggggggtggtggtcatgtatcagataccctgaattgctggtatttacatctcgggagaaatatatgtaaggagcttgtcagtccctactgctgctgtttacaaatgccattgtcctttatttttctatttagtttgtggcaggcactgtactgtgatttgtgtgtgctatctcccgttgtgctcacagcagtcccttcaggaatcccacttctttatattggaggacggaggttctgagagtgatggttccaaggtgatgctgtgatttggatgtacataaacccagacgggcggctcagtctgactctacccaagatgtgtatgggagcctagcttaaggggctcaggaagtgggggttcttctaggatattggaggtcagaacaaaagaagtaaacagcagaggtgagacttgagcacggcggggggtgggggggtctggaacatctcttagggtgtgagtggagcttctaacaagtcactaaactgtatgccttcgttaggtggctgggtgttagacttgtgtacagggtgagagatggcctccaaggagtataagccaggctaatagccttccgtgggccatgtggccaggcagccctagccctagaggagcaagagttcttagactggtagaatgcccttccttgctgtgtttccagaaacatcctcagagatgctgtgtagggtgggcaaccctccctgtcctgcttcatctggtcctttgtgtcttcagccaaacgctgcagtggggaggagatgaatgacatgagtctcagggtcatttaatagacttcaataaactaccttagaaaagcagtttccatttcctaaggcccagagcaggagagcagagctcattctgtgtagctcccaggggtctgcgctggccgtaggctttccagtagtcataaacatgactcctgcatggctgtagagaaggcctggtgggaggaagagagcctcaaagtaaaatgtgtcacacgggaggtcctggtcagagtataaagccaggtgcattgtgaagaaaggaagtatcatttataagaggtggaattgtcatccctgtcgaggaccacactgaggtcaccatgactctaaatccccctgattatgttggtaatacatcaagaagcagatatgtcgtgctttccagcatcactgatcccacccggggaagcactcggtagatactaagattttttcccccctttgaatatattcagtgaacttcccagctgcctgtcttactttgattcccaccccaaaccttggaatttccattcttattgaaagaggatgtgttttattgagaatattgaagtgagttgttcatagaaaataagattgcttagcatgttagctggctgccttttacggattgttttcttctgggttgtttatgtgagtctaggagtcctttagctcctgctcgctcagtggtggctgatttccgaggtagccagctctgctcgggactttttttttaaaaagctatctcaagcatgttctcaggtttatagcttgagtttttggatagtacacactgctgtgagatgtctttaagttactgacttatgtaagtattttgcattgtgtttgcggcttgtgtttaatgcattgcactaaggttcttagttttctcttttaattcaatgcagaagtgaacagcaagaagtactataagtacagctcagagaagacattgaagtggctggagaagaaggtgtgtggcctcgcaaactaacaagaagaccaaatccgggaccattttgaacatgcagaaaaaaaaaatgcctatagagagccaaggttgagcagagcacggttttctttgattgcatgaccctgcccctgagtgtcaggagctcttgttagatgttgctcacataactggggtggagcaagttaattctagagtcgtttctcttcgttctcacagcgaccccctccaggttgtgtaggtctcagaaagaccttgtgttgagatcatgagcactcggctcctcccttcattaactgtgcagccatctcatcttctgacagctggtgtcttagtctctgttctcctgctgtgaagaggcaccgcgaccaaggcaactcttataaaagaatttatttaagtggggctggcttacagtttcagaggtttagtccattatcatcatggtgctgagcgtggcactggagctgtagccaagagccacatcctgatcatagacagagggaagcagagcctgggccccacatggccttttgaaaccttacctcctccagcaagaccatccctactccaacaaggccatgcctcctaatctttctaattctttctaagagtttcactccttgatatctaagtgttcaaatatataagtctatggggtcgttcttatttaaactatgatagctgacaaagataactctaggtgcttaaatatttcctggatatcaggtagaccaaagccatctgaaaagccagagcattctaaagttaagttgaaagtacatccctgtgtttacctcctaggtcaaccaaactgtggtggcactaaaagctaataatgtcaatgttggagcccgggttcagtcatctgcatatttctctggtggtcaggtttccagggacaaggaaggtaagcaacaggttgcagccgccgagttaacctctgcctgcctctgagggcttcagactgcaggagcttcctgttttcctgtgggctacagatgtgggcaggtgttccctgatctcagacaccgactgtttccagccttaggtcactactcgtggcctaatagtgaccaaacactcttgaatcatttgtttgatgaatagtgttttatattaatggtgacagtgtctctgaacactcttgctcaccctttcaaagtgtttataacgtgacaggtataccaggcatgtcgtaagaggcagggctgtgccaaattcctagctagcaaacagtgaaaccacaggactgctgacaggctcttggatagactgtgtggcctttggcctttggcccgaaggtcatcatgccttaggagcccagtggaaggtggctctttacatcccagcatctcagttctcctgggagggttcattgtgttgtagaagtgaaaatgaactcacttggcaaatgttccttctgggtttctatttctatctctcctcccttccttcccttccttcccttgctgtatccatctgaactgcacctagagtctcttgcatgttgtgcagactccaccaaagccctgcatcctcagccctcctcctgctttttaagaccaaagctcattagaagcaccttttcttacagattattaaggtacattagtttgctttttctaatatgggaaccctttatctctctgtgtgtagttaaagaaaagcagctatgcagtgcagttcacagtcttcagtggtgggacagaaatgctttcgaccttaaatccaaatcagtgtttacttgttctgagttacaactcccaatttctcacatctgccgtaaacaaaaggagcacatgggctagggatgtagctcacaaatcaagtgttctctacacataaggccctgagaggagtcccaggtactgtgggaaatgaaaaaaaactcaatacacaaaacagcacaaggaacagcgtttgcatgaggttgtcgtttaggtagggctttgcatctggtttctagcacctcacttgtagcgatagctgttgctgagaagggtgggcagcatgcttgctggactcagtacatcagtagccagtgtcaaactggttgctgggtagatagagcaaaggagcaaagcagccaatcaattagtaaattgtattttttaagtaggaagggagggttagaaattatttaaatagatgtaattttaaaaggtggaaaacagcggtcgcagaggggcaggtgacttctcctcgctgataagtcttgctctgagtgcagtgctggctgcaggtctccctagcagaggctctggctggcctgctcctactcttccgctatgaagctgtggcatccactttgcaccgttcctgtcaagtagatccgtccgtaatggcaggaacttatgccacacgatagcagacagaaagcagaatgaagccggaaccaacgccctcctctactgactaatgtctgccccaccttccatgggctccacagcctccagatcaataccacctactctagaaacaagtgcccagaacatgagagcctatgggacaccgcaggcgccagcctgccagcacagtgttagaagcagcaagtgagccgtgtcgtggctttcgtacagagtttgtccccctgaatatccagaatcacagcacatctcaaggagagtctgatgagtttcagttttgtatcaactaattaaagaccagactgtggtttctaaagtaatactgaccaacacggctcccttaccaggaaggcaggagtgaacctggactcagctttgtactcatgtgcccgtgggcttttcccatccttggttgcacacagcattcctcccgtgttccttacatgctgagctgtgattggcacctggcagcactctccttagctgtgttccgttgatgtcagagctgtagtttggttggttccaaacactagaattgttagtgattctacattctgcaagtccttgttcttcctgttctgttgctgtaggagagtgtgtatgtgggggtgtgtgtgtgtgtgtgtgtgtaaatgtttgaattcttataaaagcaaatgcctagaagatataaatcgtataagtgattctacttacaagctttatttctttgaagggagcatgctcattctgtgcagtatttagctttcttctttattaaagcaagtttgtgaaaaactagccattaaaaagagatgcagatagtttatgcagcttcaggtggcttacgatttttcttacatttgggactccgactaagaaagctggcctgggtgtgtttcatgtgtgcagtggtatttaggccatccactgtgcagtcacatctgtggcagcatcccacattgcctctcatccactgtatgtctccctcaccaacgggcaggtcttagtacccctgtttcaccagtgcaggtactgaaactaaagtttaagtgaatttccaaagccacctagagcaagaatttgcatttgaatcattttgactcaagccactctaattattactaatttttctttcattccctctcctgtttctttcagaggattatgttcgctatgcccatggtctgatctctgattacatccctaaagaactgagtgatgatttatccaagttcttgaagtgagtatcatccatctccagccctaattcacaagctcctctgggcttctttctgacaagagggttctctgtggcgtggcaggttgtgatgagctgtggtccatgggctctctcatactgggtggactggaaattgtttttaatggacttcaagtagaatgatttggtttggtagaaactaattgtagcaatttaagtttaaccttaaaattattattttgtgcagttttagaaaaaagacatgtattacaattttatccctatgacagctaattggttctttgtggtcattttaagagaatgggaagtgaaaggcagatggtagttttaaaaattgcatgtgaaagttgtatagtatatctcgtttacagttacaagtcttcaccaagtacctccacggtgctgagtgctcggttccctgcagtacctctatggtgctaagtgcttgattccctgcagagcagcatcctagatagtctctcacagatgcccacaggccagtctgtctgctcttcagttgcggttccctcttcctggaggattctaggttgtgtcaagttgacaataaaaactatccagcacacctacttcaaaaaattacagagcaagctagtttctgtactagttacaggtctggaaagctcgctcttactgactgtctttctgcctgatgtttgactagattcccatgtcttgatagaggccttagtttctcttctgttacttgcattgatcttttctttccactgaaatttgagttaaatattttgggtgaaagacaatgcaaagtaaactcttctttggtagagaaaagatgccgtccatgtggctttcccaacagttaaatactttccacttttaaataaatactgcattgtcttttatgaaggaagcaatgcccctccaccaaatgcaatcatggaggcaaaagcaaggcaactcacttcaacagatggctttccactgtgtctgtcttcccttagacatctccatccattcattcggtgaaattgctttcttcactgaggcgagcaggccagtgtgtggaagtcagaactctaccaaataagaccccttacaccttggcccagcttctctgttgtctatgagaagccatgaccatgattcttatttttaacttctttaggcttccagaacctccagcttcattgaccaaccctccatcaaaggtaagaaactgggactacaatatctctagggatttagaaaaatatatttacccattacttcagccttttctatctactttaaagtatgcagaatctatcttacatgacatggtatcacttgaactctgcattgtatgactgtcttcatttgtccatttttcctggctagtgaaaacaaattggttttagcaaggtacctccattaacatacataggtcaaggctagagagctgaggtgctgtccttgtgcagagaaccagagttcagttcgcagcacccatgataggtggcttgcaactccctataacttcaactcaagatgatttgatgaacttcttggcacaaccctttgcatacgtgcacatatgcataaataaaaataagtcttaaaaatatatgaaagatataattatttattattattattttctccttgaagtaacatctcaccatgtgactcagtctggccttgatcttagtccttttgtctcagcctcctaggtcttattagtgtctgtcagccatgctggctaaaatcttcttgcattgactctacatgaaagtcactttgccaaatgtaattgtctttggcacaaaggggcacagagcatgatttttctaacataaagaatcctttgaggaaaggaagacccaggctcttcactgagtttaaaatgagaattgtgcatgattgtcatctgttaatgtgttcagagagcacgaaggtgtttttgcacatgtacacaggtgcatgtgaaggtgggagtgggtggggcagtcctccaggaagcaccatccgccttgttttcctacttggttgtttgtgtcttattggcctggagctcaccaagtcaaccaggctggccctcagaacccaagggacctgcctgtctctgtctccccagtgctaggactacaagcattcgtcactgtatccactctgttatgaggggtctggagaactcgagttcttttattggcgtggcaagcatttatctccctggccttttggggacaccttcctttttcagatttgctaccctgactcctcccacagcttgtgttaatttccctgatccaagtagagaagccaggtgtcacactgtagcctgcctcacagctggccacatcttagatcccctgtgagccctccaagatgggaacaggcacacacccttgagtgtctgaaacagtagcagtgggtaccttgaggatggcatgctgtggttaactctccctagtgttcattgttctggccttcgggctggccagcatgctcaggaccttttcatgtcctggttgctgggccaggctggtggcagcttagaagcatttactgggaaggtggaagtcatcagtgttagtctagggcagtagctctcaaacttcctaacgctgtgacccttttacagttcctcatgtggtgctcccaaccatcaaattatttttactactgcttcataactgtaattctgctactattataaattgtaatgtaatgtcatgtgcttctgatggtcccaggcaacccttgggaaagggttggtcaacccccaaaggggtctggatccacaggttgagatccgctgctttagacagtggtgagactgaagcagacagtgagtgagtggtaagattgcctggctttggtgcttagtgggggcacagcccctgtggcacccagcaaggctgtgctgcaagaacatttctttcataagaccagggctggctggatttggcggtgggccttagtttgccaaaatgtttagatctcagcatcttatgcttgagcctcagtctctagattgttgccgtctactccatgtgtcctagagattccagtgttcagaggacacgctgtacttgacaatacactgtactttaacatggctaggcatagtggtaggtagctcatgcctttaatcctagcactaaggaggcagaggcaggcagatctctgtgagttcgaggccagcttggtctactgagcaagttggaggacagccaggactaatgagagaatccctgtctggaccaccccagccccacccctccaaaaaaacaaaaacaaacaaacaaacaaaccattaaacagcacaggctgtctctgacttctgactttcctgtttgtgtctaagagttggcagttttttatatgagtgctttgttttcaggagtctgtgcatgtagttataaagtgttgtatggaacttaacatctgaactataagagccgaagaccagagagcattggtcaagggaccactgcctccttctctccctgcaacacacctgttagtcaagttctttgttctttgtgtctttctgatccacttgttcaattctctggcagcaactgcgcagtccataatgattcagacttttaaataccagaataacagaaatactgcattcctttatttcccagtgtatctagatgaattattccagaattgattccagatgaattaatctgactagttaaaagctagtcaggtgcagaagatagtccctcctctctgctccctcccttccctcccctccctaccccttccctccctctgctacccacacccttcacttttctcccctcccaccccttcctcttcttttcctgttcttctttagtagatactttctctggctttcctgtggatgtgaacctctgaagctccttttctcttactgcatgttgaacagctgtacgacacgtccttagtacagcatataagtgtatcagccatgagcagtagatttctatgttggactttctagtgaagcgaggcatgtcaactgctttttactgccatccctctgtgatatgtttttaagttgcatgtatatcattaacatgcatgtatataatatattctgctggcactcctacaccctctcagcctcctccactaccaccagtccctacaccactctcacatctttttatttttattgcttcgaagcccaccaggtttaaccatttccttgccccacctgcactccccaaccttgtgggcatggttccctggaacctgggaagctcaccagttgctacatcaagcaatgacaacttactctttcctcaaagtccccaactgccattagttggcctgggtgggactgggacctacaagtcctactctatctgtgacttggtgtttactgcctatgtcatgttccattccctctgcaagcatgtggagctgttatgagtgacagtcataccctgcatgtaagacagtggttcatggccttacggtggtctagctctttcatctttttgcctccttttcagtgatgttctctgagctttacatgaatgtggatgtcccacagaaggctgagcacgcagaaccttgattcggcaccatgagtctacattaacctcgattactttaaagagaagtttctttggttaaggtgaaggacagtcctaatctagagtcatctctgacatgttcttagtctctgcaaggtctctgagcacctggacacccaccctgattcaatgagaaataaacacttgccatagagaagggacacaaacaccttcatgacttcatgttcaattttaatattgccagctgtcagctgggtagcaactggtgaggtgtacccaagctcttttggctgaaggcctttgtggttcatgtatacctctgtaccatacctggagggaagctgtattcttttatcatttgagacagagtttgattcaatagttgaagctggactgaagctcactcggtactctaggttgaccttgaactcatggcagtccatttgcctcgcctccaaagtgtcaggactgcaggcatttgcctccatacctggcatgcagctggtaggtcagttttgcacagtacacctacctttgcttttgacaatccctttgctagagatttctctgtagccaagaaaacccctctttctgtttcttatggcaagcgaggaatctcagcaattccgtgtgactttatcttgtgtcctgggggctgtgaaggagagagtgggttgggtctgcactctcaaggcacctctgctgctgtgtatgtatctggttttctagaagagctaaaggtctgtgtaaatccaagtcgtgactaccatgcagtctgccctctacacagcagcaaggcccatccacccttctgtgctgtctccgtgtagactgtggtgggacttcctttctacactgtggtcacctgatattaagggcacagcccaactggtcacagaagtctcatatgcataggtgcaaaaggaccttgtgaatggtgagaatatgtgaaggtttactgcactgggtctaatggacaggatgtgtgtatgaagactgagattaacacacacatagacacacacacatacatatgtatgtacatatgtatgtaaatgtcactttaaaaagagagatgaggcagggcagcaagagggctcagggaataaggacacttgctgccagccctgagtttgatctttgggatctatgtaataaaagcagagagccaaggtcctcaagttgtccttggtctttcccatgtgtgctgtggcatgcacaagcctacacgtgcacatgagtaaatgtcctttggttaggtttctttctgctttcgcttttccttgagatctaactccacatcctgtgttttcacttgggagtttgtttaggttccctgtcctgcaatgcctgctgtgtatggtttctgtgtggatgagtggaaaggagaaagcaaggcaggaagctgtgcaaagctggtgacagaataatgctgcccatgttcagtagtggccatcagagcaggccagggctggagagaatgggttacgcttggcacagagccccaacagggccttttgtctccaacttctgtgccttttatttagccccctcaactgtacccacctagtctgtaactgcttagaagcccaccgtgcctgatacatacaaagtgggtttatatcattgaagagctgctggagccatgtcgcgtacctactcaagtgtggccagtcatcaccaaggctgcatcttggaagagacatgtggcttagttcttgaagtgcttgtcaactgtaaaggagtttgtaaagtatgggtcccagggatatgtttgtttgaaaggatggtgagagaatggggtctgatacgcttcaatgctctaacattgcagaaactaaagttatcagatgagcctgtagaagccaaagaagattacactaagtttaacactaaagacttgaagaccggcaaggtatgtgtgtccaggtgtggtggcatgctggcaactccagtggcagtgtgtccccaaggatggctgcactgttgactgcacttacacgtctgaccaggaaaagtgatcaacttgcatttctagcagcataattcattgagaatagttcacaatagtgaacatgttagattgtgccaatctaagaaagccctgtcagacagactgggcctgaatcttaccctgtgtccatagaacagtggatgagagggaagcaacttcaattttttttcaatactcctgccaagaagattctcagaaattagagtaaataaaaaacttcccagtcccgccattcagcgttctcctgcagtgtctgctgagtaacttttcttgctgggttttgttacacgtatcctgagtcacgtgatgcatttataacctaggtcttggctctgccctttcatttagcattacataagtgtgtaccactaaccctccctcactacatgggggtgggacatggcacacagtcatgtaattttatcacttcctgtatttggacattccggttagtgaccaaggtttgtttatctgctctgaccactttattacccacggtgaaaaagactcagagttcagagtttcaggcaattgaaatagacagctaaaatactttccagaaaggcaaggaaactaactcccagatgctgccagcgagtgtccttcctgcatccgtgcctgccctgagtgctacttttatttttgaaatttttgtttgtcaggtgagacattcccttaactagaaaggtctgtttttccaggttgcccattgtctctttgcatttgtacaaactgtcagttgggacccttgcttgtctctgtgttgtgaaagcaatgcttttctgtttgtgagaatgtattccagataaaggctagtaactcttttcatgacacattcagggtacaagaaaatttccagcatatttttagccattttgcttgtttttttttttaacagttgtaattattttttttcctaagtttagatatatagtttacatttctgtacagtttccccattttttcttcatgcttgcccatcccaagaaacattaactcccatttagattttatcaatgcataatccttatatcatttttgttgttgttgtgttgttttgtttgctttgttttgttcaattttattccttgggctttgataacagaagaaattccaatgtaagttttgcctaaatagctctttctcccagcattctgtgaattcacagactgattcacaaagtcattgtgaattattcatcactggatgactgacacaggtggtatgccaccattgctgccgtgtctgttcatcactggatgactgacacaggtgggatgccaccattgctgccgtgtctgtatggttgttgcatttaatgcaccctcaaaatgattcccagagggaaccatccttggagcatgcagctcctcggagttgggtatgctttcctctgcaccccactatcacatctggatcctgagtgggcagcagggttgtttgagctctgccactcacgtgctcattgaaccaagattcaggcttgtgtatttgcatgtacgatagtttacaaatatgtaagtctnnnnnnnnnnnnnnnnnnnnattaactcccatttagattttatcaatgcataatccttatatcatttttgttgttgttgtgttgttttgtttgctttgttttgttcaattttattccttgggctttgataacagaagaaattccaatgtaagttttgcctaaatagctctttctcccagcattctgtgaattcacagactgattcacaaagtcattgtgaattattcatcattggatggctgacacaggtgggatgccaccattgctgccgtgtctgttcatcactggatgactgacacaggtgggatgccgccattgctgccgtgtctgttcatcactggatggctgacacaggtgggatgccaccattgctgccgtgtctgttcatcactggatggctgacacaggtggtatgccaccattgctgccgtgtctgttcatcactggatggctgacacaggtgggatgccaccattgctgccgtgtctgtatggttgttgcatttaatgcaccctcaaaatgattcccagagggaaccatccttggagcatgcagctcctcggagttgggtatgctttcctctgcaccccactatcacatctggatcctgagtgggcagcagggttgtttgagctctgccactcacgtgctcattgaaccaagattcaggcttgtgtgatttgcatgtacgatagtttacaaatattgtaagtctctctttatttttattaacagaaaaatagcaaaatgactgcagctcagaaggctttggctaaagttgacaaaagtggaatgaaaagtatcgatgccttttttggtgcaaaaaataaaaaaactggaaagatttgaagcatcgaaaataaaatccagtgaagcagaaacagaaacttgcctcttgcctattctgtcttgtctcttcttgccgctgccccgacctcccagaccctaagtcactacgctgagaatcaaggtactttcgcatcctgcagacacttgctgcgctgtgactttgtgtctgacaaacacaaccattgtgggaaagtgattgtgtgaactgctgtccggggactttgggacctttgccataatgaaaagccatcaagtgcatgggtcaccgagtcacagcttccccagggaggtgtgagcattgcccaggtgttccctgctctgtcctgcatggcttcagctgaaatgagctggacaacaaaaccacacattttggtaaattttataattagccatatcttcgtatgaattcatgttctttgtaaaaataaaaatcaataaaacaaaattgcaatcttgcccctttccattatgcaggtacaaccaggtaattttcttagaataaaaacattttcaagagctttaatcatagttttgttgctttttggagactttcgttttgtgagcatttccccagcatttctccagggtgttcacagaccagcttgtgaaggcctgggctgcgtgaggctcaggtggggagtggtgtggggtgcttgccttttacgcttgcagtcctagatgcagtccccagtactgccaaaaataaatacacgaatgctttttaaaataacagtataatttttaagtatttggatatttaattattgaatgacattttcctgtacaactcctgcacttaagactcaggggtcatgaggaagagggggcagaaaggttgtaagagccagaagagcagggctctgctctgagattttagcagaaatatctcgatatcagttataagggttgaaaaggttaaagtctccttgcattcctagattaagccggattggattgtgtttattctttctacacatagtactaggtcttactttctaatattgctgcagctttttatatccctgttctcaagggataccaactagttttctttacatataatgctcttgcctgcctttggtaatggtatagaactggcctgtcttagtttgccttctgttgctctaataaagaggctatggcttcgggagcagcttagggaggaaagcttttattttgcttgcattttcccacattttgtttcttccttatgtattcgagttcaccagtgactgctgggtcaggaatttctggaaaagtctttaattacattttaattttcatactagtacatcagtttcctctcccacccccttttttgtgccagttttaggagtgtgtccctttttccctttcttttattacaatatgttagttataagcagtacgaggtttctctccctgcatacaacatgttttgattgtaccctccctcatgctcccttgctcctcttcattccttggatctctttccttcacccggttcacccgggtgcttctgctttctcccctccttccccccttccgttttgtggcccgtgagtttaattgcatttgaacagtgacatcttttaaacttgtcaaatatcttgacacaagttgcccgtcgtttgtgttattttctgcatgtcatcggttgtgatgtgcccctctgcgtgtctcctaatggtcatttgcgtcattttccctttcttggctagcccggggagtgtaccagttccttttatacccccagcaccactgtcacgtggcttgtgcagtctgcagggactcatgcagtggcttgccttcctgttcgatttgttctgcagtggttgcagcaagctgactgactgttcagatggctgaatttggggttcatgatgattgtcagatttagagctgtttttcaaatatttctctgctgttttccttctttgctcgccagagcctcagatttggggactccacatgtgctggggccacttgacccatcccgttgacaccagtgtctcctttcttattattccttttctaattagacagtcttctggtttcagctgtactcccgttagtagtatttcatcctctattaacttccattagtgctatttttcaagtactctgttatctctaggcacccttaggtactcctgtctttccattcctgctgtttcttgtgttatcgttgctataacattagatgtcctcacctgctggctctgctgcctttgttatttctgggctggtttatcattttctctttccttttagtttgcaaacatgttgcgtttgtcctaactaccttttttacgatgatagtaattgaacctgggtccctgagcacgctaggcaagtctcttatcagtgagctacattccagcctttttttcttttgaaatggttttaggctgataggaaagaagcaaaaatagtatggaaagctgcagccctgcattcctcagtaataaccctttgcatagctatactgcagtgatcaaagccaggaaatgtatggcattctattaatctgtagctttctgacagttttacctttctagtactttctgttccagagtctatttcatgattttgtattttgtcagactccctctcttgacattttctaattttcaggatttcttcatggtcccccatgccccctcaagacccttggccttatttaagaataatggttggttattctgagaatgctccttgctttttgagatgccctgaatatgctactgttgtatcccttgtgtggtcatccatagaactactaacttcagtcttgtagatactggatagtttgtgacatgtaattactcatttaatctctgtaacaactagagttgtagaacgaggtgccatagcaactaggtgtaataagtcctattaaacataactaggagatgggcgtggtggtgcacgcctttaatcccagtacttgggaggcagaggcaggcagatttctgagttcaaggccaacctggtctacaaagtgagttccaggagagccagggctatacagagaaaccctgtcttgaaaaaccaattaaaaaacaaaatacctaggaaaactttggtccagtgaaggtctggtatgtcaaaggaattcttactatatatgagaggtctaggtgcttcttttgtatgtaaatatggctcataattttattcatgaatgttttttccaaaacatttaaccctttatagaacataacactttacagatgccctcagagtgagaaggttggccatggcttgctggctgctttaacattcttgtttgagaaatccctcagaaaaaggagtattgcctctgtgtaggtaatggaagtttttgctgggttttggctagctgtgctagaattcttgacttgcagccaacaagaggctcaaacaggatccagagtgtgattagtcctttcctttctggtgttgctttaaatttcctgtctttctgtcttgcctcaatgacactctcttctcttgccctttggagaccagctcccagcagcaggagctatgcactgctcagttctttgtcttgcacagtgcatgcagtagcaagatgttaagcacatggaagacctggtttgtctgaataattggaaggattcagttttcccactgctcaggttcgtgtactctttggggctgtcacactggaccaaagttttcctaggtatgtttaataggactttatagtttccatagcctccacatatcatcatttaagttaatctttacagctacccaaagagagccaaagagagattctgtccctgttttacaggtgcccaaagtgaggtcatgcagacaatctgtaacagagccaagatagcatccttttttgaaatgcaagctcaggcctcttccttttggcttcctcgaggttgctatcctgttctctgtatagctgatagccattgtgctagttggttttctatggctatgatgaacaccatgacttgagaaaaaagcatgaggaaagtttatttcatcttacaacttagagttcattttaggaggaaaacgaggtaggaactcaaggtaaggactgaagcagaaaccacgagtgcttactggcttgaactcggtggattactcaacctgcttccttatacactgccttcccaggggccataccctgccttcagcgggctgggctttgccacatcaataattcatcagcaaaattcactacaggcttgcctgctcaccattttctcaattgaagttcttcttcccagataaccctacttgtgtcaaactgacagaaaaaaataagtaaataaaagaaacctgcacagcaattaattgtcacatggctcttcctgaggagacatgaataaacatctcttcatccccaacatgacaccaacaacaaactaaggatatgattccactcatgtccagccttgtgagccagggcgtttgaggagttacttacagagctgtgagtggaggactcttaggaacctggaggactcagaagctctggattctggagctccctaaacaaaggcaggccggtcaccccagcagtagttacagcttctataactttgcctgcagccttgtgaaacttctaaattttaggaacttcctgagatttgctagttttgtttacttcaggagtcttaataaactcctccagagaggaatgtttcagctcaggagaaatagctacaacaatagccatttatcctaaagtattttttgaaactgctagttacaatgaaattgcatataaaattaaaatagtgttgatagttttcacaaaagaaaccaaggaataagcttatactttcttactctttagggacatgatctgagtacctactgtgtgtcaaacatgattctaggtatgagatatgaagatgaaagtgtgaaagaatatatatatatacttgtaacttacagcttcaggataaagtattggtagtcttatactccataagaagccagtttacagctgctacacatgtacagttacgttcttcagggatattagggacttctccctgcaagtctatgcctatctattttgctagataatcaggtgtatgtatgtgaggctcatgcttgaaagatatttgttttaaggggaaatggagggacaaaaaaacaaaattgaaattacttaggaattattcaccttacaatcatgttttcatgtgtttctgcttttttcctacaacgatggcatccactccacacgtgacacgaacattatattatatttgaagcattattctatagtgaatctttaaggaatgacttctctttagtcagctgggggtcagggagcagggttgaatctccagaagcacgcaccattgttaattcttgggactcaagcttttctgttctgtaactggtgcttggcctctcaggtgacccatttcctctcctctctagatggcaacacaaagacgaaaaagaggcaagtgacaagcgctgcagcctgcaacacccccccccttccccacccctatcttccccaccacaaggcatggctgcttccagtgcaacttcagatgcttgcctgctgcaaagttgtctgcacttccaagagcgctctgcaacttcacggttgtcaccatctgccagaagtggctgttaaaggaccagtgatgagcctgttgttttcttagatcaaccctggtcgtctctcctggaagctctcagcagagtgttctgtgctagagttcaagcgaccccagagtgtggatctgagaagtgtagctgcccccttgccctctgccccagcccagttagcagaagcatgcatctttccagtatagcacctcagactacaaaatgtctagaagaggcttcctgtgaaatcaaggtcgttcctccagcctggcttggtttgcttcccatgtgttgggggatctgtatggttgccgtaagcacaagcatcctccctcactagaggctcaggcaaaccaagtgtcagccttttaaaccacttaccccaaacccagcccttctctccttcttaccaacgtggcagctttatctaatgcaatagcgatgcccaaatatttataactttatggaattataaacatggctttatttttaaaagggttgtgcaatatgtgtattagtgtgatttcttagagccaggacagatatgaacgagagttgggaatgaacaccaaacaacagttcagtggagaatgcccaacggaactcttaaggaagcagcgcaaggtttaggacagaggtgtctgagctccaagtgactcttgcactgggcgtacagcaggacaggctgctgccactcagctgacatccctggttcacacagtacaaccccaccaccaccacccccaacctctttagagaatagtcctgagttctgactctcagccaagttgagcctcgttctccactagtctcctttctccttgcctcattctcaacttagaaatgaccgtgaagctgggcgtgatggcgcacacctttaatccctgcacttgggaagccgtgacaggaggatttctgagttcaaggccagcctggtctacagagtgagttccaggacagccagggctacacagagagaccctgtctcaaaaaaataaataaatgaaagaaagaaaggaaggaaggaaggaaggaaggaaggaaggaaggaaggaaggaagaaaggaagaaaggaagaaagaaagaaagaaagaaagaaagaaagaaagaaagaaagaaagaaagaaagaaagaaagaaagaaagaaagagagagaaagagagaaagaaatgaccatgaaccctaagaggctcttggcaccttggtggctgagaaatgaatctgtctctccaatccaacactacagaaccaacgctacaactcagtcagaagactgcctgcctcacatgcaggaggccctaaggtttgatccccccacagcacccccagaaacctgtaatcccagcattggaggggggtacctaggggatggaagcaagagaattagattttcaaggtcactctcagttgctcacagagttagaggccagcctgggatgcatatgatcctgctccagaaataaagtcaatgtgtaaatctagaagtaggctgtgcttccaggagggggctgctcctgagagtctctgtgtgagcggggctgttatggtgactcattgttccgcacacaaggatgacttagaatctaacttttctgccttgtacagtcccaagcactgtggttgcaggtgagggcttattttggcccaaggcactggccaccagtagagtgctgctacagtcaatactgtccttggagcagatcattcctgtcagcacctcagctcagataggccctattgttctcttttcctccaaagactcatcatgggagccttctgggtggtcctcatggtcctgaagtatgatgctgtcccagttgtgactggcctgttggtgtgattgtttctgccacaagctctacctaccaagcatctctctgcttctgtagcgacctcccctctctcttactctttcacattagacactggtgacaacgcacaaggcatccctaggaatcctgtcttagttgtgccccagattcacattcaactagcctctgaagtttaaagaccagacacttctcagtacacctgtctgcatcttcacaacttggtttgtttgttcaaaatacaagaaacacatgtacacctcccaccaaaggggagctagagcaaaagcaaaccccacccccagtggcaccacccaggcccctgaatggcgattgtcttcttcccaggacagatccttgccttagtcttcagcatctcaccgccgtcagcaagctctagggctgctgtttgtacagtgaatttcatggaatcgcatcagtacattaagaaccaaaatccaaatgccgtttgcttctcgtttaggaaaaactcacaggtaaactaaagcaggtcaacaggtctgtagcctgatcccgtaagcaagctcttcccctgcacagcactctccaggagacagctgttcctggctgtgtgctctgcctgcctgcctgcctgcctgcctgcctgcctgcctgcctgcctgcctgcctgcctgcctgcctgcctgcctgcctgcctgcctgccgagacctgtttcagagcttccccatggtgctggctaagcactcaccatgcatcagaggagacagataaagagtctccctctgccaaattgcggagggcttttagataaggagcatgctcagagctgcggtgtgtgtgtgggggggggggaggcagggggccccaaggttgagacgatgaatggggacaatttctagaggtccacacagaaatggcttcaaaagtgtggccgctgcattccctttgcttgctcagtaacacccactcttagcaaccacagcctatgggagaatcatgagcaaaagattctgcttcacttaggggacttggtggttgttgtagtagtggttgtgtatgtgtgtctatgtataggcgtgtgtgtctgtgtggggggtgtgtatgtgtgagtctatgtattagtgtctatgtgtgtacgtgtgtgtgtatgtctgagtgtgtgtggtttgtgtgtctatgttttgtgtgtgtgcatgcatctgtgtgtgtgtgagtgtgtgtgtgtgtgtgcactcttctgcatgtgtgaatgttggatggaggccagcgttcagtgctcgttctcaccttgccaccgtgtctgagacacgtccgttactgtgtaagtcaaccagctggcgctgaccttctagagagcctcctgtctctgtttcctacatgtgcctgctgtccagcttttacacgggttctgatgatccaaactcaggacatcgggctcaacgctttacttactgtgccaactccccagtccatgtaagacatttaaaagaagttattgaggaaaggatctaaattggaaggaaaattgttcgggagaagttatttttaacgttttgtagtgaaaagtatagccagcatgtttcccctctcttactcccc

SEQ ID NO: 3291 - DNA, 1376 bp, Mus musculus
ggccccggttggcgggcccctcggcgccacttccggcagggcgcgaccatggccggaggtcgggaccgcggggacttggcggccaggcagctagtgttcctacttccaggggaaggagccacatacttaattgatatgtgtcttcaacagctgtttgaaataaaagttttcaaggaaaaacaccattcttggtttataaatcaatcagttcaatcagggggccttctccactttgccacacccatggatccattgttcctgctccttcactatctcctaaaggctggcaaagaggggaagtatcagcccttggaccaagtcgtggtcgatgacacgtttccagattgcaccttgctgctgagatttcctgagcttgaaaagtcacttcggcatgtgacagaggaaaaagaagtgaacagcaagaagtactataagtacagctcagagaagacattgaagtggctggagaagaaggtcaaccaaactgtggtggcactaaaagctaataatgtcaatgttggagcccgggttcagtcatctgcatatttctctggtggtcaggtttccagggacaaggaagaggattatgttcgctatgcccatggtctgatctctgattacatccctaaagaactgagtgatgatttatccaagttcttgaaaaactaaagttatcagatgagcctgtagaagccaaagaagattacactaagtttaacactaaagacttgaagaccggcaagaaaaatagcaaaatgactgcagctcagaaggctttggctaaagttgacaaaagtggaatgaaaagtatcgatgccttttttggtgcaaaaaataaaaaaactggaaagatttgaagcatcgaaaataaaatccagtgaagcagaaacagaaacttgcctcttgcctattctgtcttgtctcttcttgccgctgccccgacctcccagaccctaagtcactacgctgagaatcaaggtactttcgcatcctgcagacacttgctgcgctgtgactttgtgtctgacaaacacaaccattgtgggaaagtgattgtgtgaactgctgtccggggactttgggacctttgccataatgaaaagccatcaagtgcatgggtcaccgagtcacagcttccccagggaggtgtgagcattgcccaggtgttccctgctctgtcctgcatggcttcagctgaaatgagctggacaacaaaaccacacattttggtaaattttataattagccatatcttcgtatgaattcatgttctttgtaaaaataaaaatcaataaaacaaaattgcaatcttgcccctttccattatgcaggtacaaccaggtaattttcttagaataaaaacattttcaagagct

SEQ ID NO: 3292 - protein, 204 aa, Mus musculus
MAGGRDRGDLAARQLVFLLPGEGATYLIDMCLQQLFEIKVFKEKHHSWFINQSVQSGGLLHFATPMDPLFLLLHYLLKAGKEGKYQPLDQVVVDDTFPDCTLLLRFPELEKSLRHVTEEKEVNSKKYYKYSSEKTLKWLEKKVNQTVVKANNVNVGARVQSSAYFSGGQVSRDKEEDYVRYAHGLISDYIPKELSDDLSKFLKN

SEQ ID NO: 3293 - DNA, 1495 bp, Mus musculus
ggccccggttggcgggcccctcggcgccacttccggcagggcgcgaccatggccggaggtcgggaccgcggggacttggcggccaggcagctagtgttcctacttccagaacatttaaaagatgcctcgaagaagaagaagaagagcagcctcctgttcgtaaagctggccaacccgcactcaggggaaggagccacatacttaattgatatgtgtcttcaacagctgtttgaaataaaagttttcaaggaaaaacaccattcttggtttataaatcaatcagttcaatcagggggccttctccactttgccacacccatggatccattgttcctgctccttcactatctcctaaaggctggcaaagaggggaagtatcagcccttggaccaagtcgtggtcgatgacacgtttccagattgcaccttgctgctgagatttcctgagcttgaaaagtcacttcggcatgtgacagaggaaaaagaagtgaacagcaagaagtactataagtacagctcagagaagacattgaagtggctggagaagaaggtcaaccaaactgtggtggcactaaaagctaataatgtcaatgttggagcccgggttcagtcatctgcatatttctctggtggtcaggtttccagggacaaggaagaggattatgttcgctatgcccatggtctgatctctgattacatccctaaagaactgagtgatgatttatccaagttcttgaagcttccagaacctccagcttcattgaccaaccctccatcaaagaaactaaagttatcagatgagcctgtagaagccaaagaagattacactaagtttaacactaaagacttgaagaccggcaagaaaaatagcaaaatgactgcagctcagaaggctttggctaaagttgacaaaagtggaatgaaaagtatcgatgccttttttggtgcaaaaaataaaaaaactggaaagatttgaagcatcgaaaataaaatccagtgaagcagaaacagaaacttgcctcttgcctattctgtcttgtctcttcttgccgctgccccgacctcccagaccctaagtcactacgctgagaatcaaggtactttcgcatcctgcagacacttgctgcgctgtgactttgtgtctgacaaacacaaccattgtgggaaagtgattgtgtgaactgctgtccggggactttgggacctttgccataatgaaaagccatcaagtgcatgggtcaccgagtcacagcttccccagggaggtgtgagcattgcccaggtgttccctgctctgtcctgcatggcttcagctgaaatgagctggacaacaaaaccacacattttggtaaattttataattagccatatcttcgtatgaattcatgttctttgtaaaaataaaaatcaataaaacaaaattgcaatcttgcccctttccattatgcaggtacaaccaggtaattttcttagaataaaaacattttcaagagctt

SEQ ID NO: 3294 - protein, 304 aa, Mus musculus
MAGGRDRGDLAARQLVFLLPEHLKDASKKKKKSSLLFVKLANPHSGEGATYLIDMCLQQLFEIKVFKEKHHSWFINQSVQSGGLLHFATPMDPLFLLLHYLLKAGKEGKYQPLDQVVVDDTFPDCTLLLRFPELEKSLRHVTEEKEVNSKKYYKYSSEKTLKWLEKKVNQTVVKANNVNVGARVQSSAYFSGGQVSRDKEEDYVRYAHGLISDYIPKELSDDLSKFLKLPEPPASLTNPPSKKLKLSDEPVEAKEDYTKFNTKDLKTGKKNSKMTAAQKAKVDKSGMKSIDAFFGAKNKKTGKI

SEQ ID NO: 3295 - DNA, 80782 bp, Homo sapiens
aaaaataaatatatctaaagattggtctggagataatgaacaaaaatctattagtaaatttactaattagggtcatgtctatgtgtttatgaaaacattaaacatttgtttatttgaagtaaaatcactttagccaactaccataaatattggctgcctgtcagaaatgatgtacccgaatttcacgtttttcatttcctcatggtaacccagcccacacaatatttttatataatgacagctgtcaggaaagcagaatatcttatatatacattgtattttgattaatgagctaatgatggttctctgtttaaagtaattagcccccaatgtggtttttagccaaagtgtgctcagagttgacaatgatgtgattatgttatccagttagggtatagccaaaatgatcacattgcctatagcaatgctttttgaagtgccattactaggttataaaatcaacttaatatattttattagggttgaataaagaaaagaaacctaatagattagaatataccaaagatattagcataccttgagtacaacatgtgtaggtttatgaaacctttgttttaataatgtgtgtatcttttgtgtgactgcaaagtcatcctataaaatgtatttctgaccgtggattacagtaaaaacatttttagaaaccctaggcttctttcaggtttttattgcaactgaagttgttctagctttggcccttggctgtgtaatgattgaagtcattcccttatacacacttatgctttcttaccaccccttggccagccctttggtggagcccatttcatccctgccaatggcatgtgaggtcctcacttctccagctttacctcttactgccctttccctcttgttcagtccatagccttctttgctgtccttgaacgtgccgtgcaggctgcagctgcagtgcctttccactgtctgttccctctgcctggaacactcttcactctggtattcacacgcctacctccttttcttccttcaagtctttgctcaaatgttagctcctttatgaagcccactgtgaccacgttatttaaaatagcaaccctcctcttttttctcacagacctcctttttctgctatatttctttcctccacagcaccagccaccttctatcacattgtagaatgtatttattatgtgtattgtttgtctgtctccctctactagacataaagtccaggagggtaggtattttagtatgttttatttatggatttaattcaagcaactagaacagtgtctggcacaaagtaggtatcaataaatattgatgagctaattcagattggtccagatcatgagagagagagaaaaagagagtggccaagcatcagatacaaatttacaggagattctagtgcattcttttttttttttttttttttttttttgagacggagtctcgctctgtcgcccaggctggagtgcagtggcgggatctcggctcactgcaagctccgcctcccgggttcacgccattctcctgcctcagcctcccaagtagctgggactacaggcgcccgccactacgcccggctaattttttgtatttttagtagagacggggtttcaccgttttagccgggatggtctcgatctcctgacctcgtgattcgcccgcctcggcctcccaaagtgctgggattacaggcgtgagccaccgcgcccggcctctagtgcattcttaagttatgtcctgtcttttatgagaaacttctaactctcctttgaagtagctattctttttacattttctccttatagggcccattcccatctggctctacaagatattagagcaacagcttctactaacttctaggaattcatccagaagagtgtattgaaagtcaaaaaaaaaaaggagtctctgtttacaatttatagtcttaatataactaatctaggcaaaatcatcaaaacatgtgcttctgctgaacttatttatccaacatggaaaataaaatagtaaaaaaaggtcagaaaataaatcttggggatagttggtttacaacataaaactaaggaagaaaagtaacaggatcagtgcaatgggcccagtttcccccgcccctgctggagttaccacatttagtgaataaactaaactgtggagttggctctgctgctgaggcaggagtgttatgtacttgggccatctcattcatttcccgcctgaaaatttccaacatagccagaaagacaggctgctacttgcacctaatgaagtcaacaatgcctttgtgtactgactccaaaaatgatagcttgatctggacattgttatatgaagcatatgtaaagtagcttctgttttgcaagagttagattattattaaataaatcatttctggaaaaaatggtagaaagtcacttctgagttgtacatggttaccacaggaatgtcatttggatgtttgctcactgaagacacacctgatgttagaaataagaaacggaggcaacttcaaatacattgacatcataaaatagcaagcaagcaaacaaaaaatgcacaaaagctcagcaaggggtgtctaaagatttggccactccttttaatcattgtcctaacctctgttatttatttaaaatactgttcagattatgtaaaaagcaaaaaaagtattttttttcttctatccccaaatttttaccttctttgtcccaatctatacttatggtctgagcaatgtgaacatcaattcagctataaagctccttttaactcagtgtttaactctgaaaccagaaatgttgcaccatagcttgttcatacttcttaatcttttaaatcttaatccacattttaagtagatagcaatatgtctggagagtgcccatccacaagaaggtgacagagtctatttcgttataggcgtgccacttttttgtcaatttagtcacaatttaatcaattactgccattactatggaaattactacagaatgaatattgtagtctttaagtacagagcaatccttttacattttaactcaatattaaatcctttttaaatctctagtttcttcccaaatccagaacaaaggatgcttgctttgttacaatcttcacctctagtataatcttaataagaaatacaaaagactcatttactctgcctaaaagttttgataaaggtattttttggaatgtgctgcatgtttatgctaaaaatagagaaattataagcacttttaaaggataatctgtttattaattgaattatattatcaaagaattagagatatttagtgaacaaatgaagaagactaagttttcagaaatgttgcttttgcatgatcaatataattgcaaaagtcaacatgaaattgacattattctgtggaagttacaacactttctctttaaatactcagtcaatattacctatttttgctcttaagcaaaacattgggtgaaatgctcacattaccagaaaaatttgttaatctttggcaagcaacaaaccatgtttagtacttgcatttcctgttttacagatgttttgttagactgaattaataaaatatcttattactatttgaagagtattttacttatagtgagaaagcagcagatatgaacagctttgattttagtaatgtgtctccttaagcctcttaattgtagagactgttggtaaaagtaattaagatttaccaaaagagaatcaggatatcattgtttaggcacctaagaggaagaacagggtaaaatgaagccagaaattaatagtatttccaccatcaaattaaaaatactaaaaattttagaaaatatatcacagttgaagtgattcaagtgcaactatggttagactttagtaaccacccttttattcttattattctttttaactgtgatcatattttctataaaagtttatatcctgcttcaaaaaacaattttttaaaattttggtttccccatttattatcatgttaaaaaatgcatagcttgaaaaaaatctcaaacacactgcattgtagaaaatattaatagcatatgtaaaagcaaattaggtgatgataactaggacatcaagttattaagattatatgaattgtgtgatggttgctagggtgccaggcagcaaaatgtgtaattatctgattatctgatttatttaattctggcagtctatctctacagatacttcagccagaaaagtatactttggagcttgaattacctgaatttctagctaccttgattttatataaatatatgtaacacttataactatatacacacacatacacatatggaaatgtgtaaacatagcaccaatactcttcagccaaggaagccaggaagtcacctgtagttgaacaagtttggttcattacttgttgcagcaaggaagaacacacatcacggaaatcatgggtgtttcagtaagagggtgttagaaaggaccttataggatttgggctttgattgagtgatttgaggtagagtctaaggcagcggggattccctctagattggatgctgttagaaagtggagcacttctgtaatgggagatctcacttactcttataggaaggggaaactatagtgagaataaagttgtcattggtaaagaaggagcactcattttggccaagagataggatgtttggtacttcatgggtggcaaagtgacttgcttttgtctgtgctcacacaaaattatgaatggtcttatttaatcatggtctcaaagtagcccggtcagaggctggttttctgtgagatggttcatgtctaatgggagaatcgcagggtctgcctatgagagccaggccagcttctgggtgtcaggtgctgccctttttccttcctcaatagcttcagtcattcttatgctacgatgggcagatctcacaagtttatgtgtgcctttttttcacactgccaagtacagttcagttttaggttgggttggttacgagagaacagaaagggaatattcttcccagaaagaatgattcagtgctactcatactcactggtcccctttctacatagttgatgctctcgagagcggacttttctcccaatctgatgcttcaggatgatggtgctttctctattgtcactcaatgagcatttgatggcaggaaaatttggtagaagagaacaactttttctcctgagaaaaatgatgataaacatggattttaattttaattttgttttgaaagaagcaatcttacagatttttaataatatagaggagaaaatattcttccactacctttaatacaatgtctgtctgctctaattaccactaagcattgctgaaggttatttggcactgaattcttctcccgtgccccacccagttttttttttcttttttctctttttactaaaaaccaaacatctattgtttccagcatttagaagagtctcaaattttctactcaagaggtgttaagttgctgctcccttcttattctttgtacagaactagtacagactagtactgcaagtaattcacagactgttttatgatatactagatgtaatcaatttgttttgatttataaaattgggaataccacaagccacgacagcttagctatccgcataaatatttactcaaaaaatatttgctgagcacatgctatgtttccatattattttgtcccaggcatggggacaccagggagggaaggaaggtgaagagcccagtctctggagtcctaaggcctgggttggaattcctgctcagccacttgctagtcatgtcatcataggcaggtacttgatctctctcgactctacattcttcctctgtaaaatgtgggtgactaaataatacttacccttaatgctgtgggagggctgaaagaggtcattcgagttaactgcttagtgcagtgctcagcatagttaatactcagtgaagccattgttattttttgacaagatagtggtgaattactagatgctattcttccctcaaggaactgactggttcctctcactggtgaaattggaggcatctcacttattcttgggaagagtattaggaggcaggaagagaaggcacttagtaagacctgatggatgagtgagagttgtcctggcagtggtaaagggtaagggagaagggaaggaatgatgcttgtggagaacaggatggtctcagcattggggacacaataccaagtgctagatgtgacagagaagagaaccacaggcagttccttgtggccacactgtggactgggtggagagcgacataggtggtgggaactgtagctggggagtccagccaggaccggatctcaagggccatgtgttcaaagcttagcaccttagactttaccttgaagacaacagggatctggagtcagcctatcagtaatggtatccttttcaaaaaggtacttacataattttttttaatgataaaggaaattatttacagaaagggcagagttcattgttttctcattcacagagtatagcaaccgttacccgtacgagcctgggcctctcatttaatttctcctgcccctcattccttacccatgctttctcccattcctctccatattaaagacacccatattttatttaagtcccagagtatatgtgcaggatgtgcaggtttgttccataggtaaacgtgtgccatggcagtttgcttcacctatcaccccatcacctaagcattaaactcagtatgcattagctcttttctctaatgatctcctccccgaccaccctccgcttacaggccccagtgtgtgttgttcccctccctgtgtccatgtgttctcattgttcagctcccacttataagttagaacatgcggtgtttggttttctgcgtctgcattcgtttgctgaggataatgacctccagcttcatccatgtctctgcaaagtacatgatctcattcctttttatggctgcatggtattctgtggtgtatgtgtacattttctttatccagtctatcatcgatgggcatttgggttgattccatgtctttgctattgtgaatagtgctgcaatgaacatacacatgcatgtatctttataataaaatgatttatattcctttaggtatatacccagtaatgggatcgctgagtcaaatggtatttccagctctaaatctttgaggaatcaccacactgtcttccacaatggttgaactaatttacattcccaccaacagtgtaaaagagttcctatttctccccagtcttgccagtatctgttgtttccttttttttttttttttttttgagacggagttttgctctcgttgcccaggctggagtgcaatagcgcgatcttggctcactgcaacctctgcctcccaggttcaagcaattctcctgcctcagcctcccgagtagctgggattacagacacgcaccaacacgcctggctaatattttttgtatttttagtagagatggggtttctccatgttggtcaggctggtcttgaactcctgacctcaggtgatccgcccacctcggcctcccaaagtgctgggattacaggcgtgatccaccgtgcccggcctcatctgttgtttcttgactttttaataaccaccattttgactgccatgagatggtatatcattgtggttttgatttccatttctctaatgatcagtgatgttgaacttttttcatatgtttgttggccacatgtatgtaaagacacccatttctttatgtgcttgacatggccttaaatatgcatgtatccttgtaaattacatcgtgttgttctttgtgccttttaaatttacctacatggtattctgctaaaaataatttcctgcatctaaatttttttctttagatacaaagcatctgtttgtatatgtacaccaatcactgtgtcaaactgctgtatacatagcccatatacaatacacatggtagcattatttataataacagtttgaaataacctaaatactgcacactagggaatggataactaaccctagtacaccagctgtgttaaatatcatgccttcattaacaatgatacttctcgatatgaaggggcacatgcttatgacaatgttaagtgagaaaagcagacaaaacagtctaaattgtgacaacaaccacaaaaatatacattaatacagccaagggctagaaaggatcagagaaaaatgaaacaggtatgtatgtctgagcaagggaatcatgggtaacatttctcatgtacagtagctccccctattcgaagtttcgctttccaaggtgtcagttacccccagtcgaacttggtccaaaaatattacacgaaaaattccagaaacaattcgtaagttttaaattgtacagtgttctgagtggtgtgaagaaatcttgcaccatccagcttcgtcctgcaaaggacctgaattctacctttgtccagcggatccacactgcagaaggtcccctccttatgagtcacttagtagctgcaagagtagtgatgctggcatactgtgagaattgttctattttattattattgttgttcatctcttactgggcctaattttcaaattaaactttatcacagatatacatgcaaaggaaaaaacagtatattagggtttggtactatttgcggttttaggccttcactgggggttttggatcccatcctacaggaataatggggtgctcctgtagctgttagtaagacgatggtgtgcctggggatttgtgctatacaccacagcatcttctacagtcgttttgggggagagggaagatcagagcagtaccaatctgctgctccttgccccaaaactggcaagaggcgcctttcctcagccagaaaggcctcttctccaccagctgtgtcctgcaatcaactgcagctgtattggtctcaccccatgggaaacaggtttgaagttaaaaaccttttcagagggccgagataaatttagtgctgctaaatttaactatcttcaagattaaacatgaaaagcaaagtgcatgagttatgtatattattctttcaattgtgcaaaaataagacattaacttgtttttgcatggaaaaattctgcaagaatagagaagaaatgttaacagttacccctgggatctgggataaaagagatacatcatgcttttctttaaaaaaaaaaaaaataggtttttgtggatttttttgtttttgttttttttgacagagtccagctctgtagcccaggccagagtgcagtggtgggatctcggttcactgcaacctccatctcctgggttcaagtgattcttgtgcctcagcctccgtagtagctgggattacagatgtgcaccaccacacccagctaatttttgtattttcagtagagacggagtttcaccttgttggtcaggctggtctccagctcctgacctcaggcgatccgcccgcctcggcctcccaaagtgctgggattacaggcctgagccactgcgcctggcccgtgcttttctctaaagtatgaaaggaatatgtactttcttcttaaaaaccatgtaccaaacaacacttttcaattaaaatgttatttttaaaagtttaaatccccaaatttcatggctctaactttttaaacatcactttttaaataaatgtctaagtttttaactcagtatacagcgttctccaaaacaacaaattcatattctgagcccaaaactgtgcacctcttttagtgatgaggacggagtccaaattgaggacatcccttgtagctcacaatgcacacatattctcacatcaatagcaacacagaatgcaactgatgaccaatatatattcacaaataattgaggaccatggctaagagttgcattcggattccgatgtgactgctattgtccttaacacggactagctccaggtgagtcccccggccccgggggtgtggcgggcgtcacccgttgtccgggcacacaccccgcagacccaatcctagcccgctggctagaccatggagggccgctgggtgcagccacagagcgcggggccccggcgaccccgccccgctccgcgtcactcggcgccctgcggcgcgcgatgagcacctaccactagcggagccgcgagggagaggccgcggccccttcccgttgcctgcggccaccggccggcattcagagcccctcgcctggcgctaaatttaaaaacgtaacacgagcagcaggctggtctcggaaacgaaacgaaattcggtccctgggcctcctcccgggcgctgccggtccctcagcgcgccgcgccacccggaacagacccttctcccgccattttcggcggggctgggagactgaggcccgcggcgctgagcctgcggcgccccggaagaggcgggcggcatggccgctggcgtggactgcggggacggggttggcgcccggcagcacgtgttcctggtttcaggtaaacacgcgcgcccgggcggcggggtcggcccaagaactggcggagcggcccgcgaccccgggcgcgccgccccccaccccggtggctcccactacccggcccggcgcgggatgggattctctctgggacagctggccccgcattttggtcacacgtcatagcaagtcgcggttttcaaacccggaagcgccgaaaaggaccgagcgtgtttcccgggccctgatccccggtggctcgggtgggagggtggaagccgactcagcctgaggggagccacgcgggttcgcggtcaccggtgcgctgcgggccccggaggtttctgcccttggtgtcccctacctggcagctggccctgcttctgtgatcctactgggttggaaccagggatccagtaggctcgaagtggcctcagacggtgcgcagttttaagaaagcaaagggacaggcctgcagtggcgaggcaggagggaagcgggatgggagtcgcggttaggccaagggtagttcaaagcgattcagcaggatgatgaccacaggagtgctggagccgggcctttcagcccccgtgtggatgatgaccggccatccaggacatgcgagggcttgggacagtggacagccagtgccacacaaggaaggaccgattaaatgacacagttaaaggaatttggcctagggagtgcaagccagaaaggtttggtctttttatatatgtaacattggaaaaaaggaacatctcctgttccctgtattaagttttgactttagctcagcaaatgcagtgtttgtggcagtaaatatactctgataacaatattctttcccaggaatttagagttttatgatggttattgaaaatgtttacatgacaggctgtcaataatattttttgcctctaaaaataaaacatacataaagtgtacggattttaagtatgcaactcactgaacttttcatacgtatacaccaccctagtaaccatcccccagttcaagatgtagactgtttccaataacgcctcatgcctgttcctagatagccccaggaacctctatgctgacctctgtcaccagagattagttttgcctgtttgaataagagtgtaccctttgtgtctggcttctttcactctgaaagattcatccttgttgtgaaattcattcatgttgtagcagttgtttggttggttggttagttttttcattgctgcttctgtttaattgtatgagtatccatactatgtatctctactgtggatggacatttgggttgtttccagtttgcaactattacaagttacacttctcagagcattcctttaggcggcttttggtagacatgggcactcatatctctagggtgtataccctggagtggaatggctggttctagtacttgtgtgtagagctgtagttgacaatgttaaatggttttccaaagtggttatactgatttatattcccacaagcagtgtatgagagttcccattgctgcacatcctcggtaaaaacgtttgggtggtaaaacagctaatgcaaaattcagggttttgacagaatctcgcaaagggctacccgtatacatgcttttcattagaaaaatcatcctttcttctcacttcgtcacatcaagacaattagattttcagagtaggaactctaatcattctttcagaatcaagtgcattattgttatttcagatatacacaatagctgatgataatttgagcttcttattttgttgttctgtttaatcagtattgacatcgtcattttatacgtgtgtttgtgtccttgtattaaacacaaaaccctcaaaagaattaaatattgattgtatccctgaaaattgtaggttttaatatatctactgctgggttgtgggaagagtttcagttgagtttctgttcagagctgagatctactgtgaccttttaaggcattgggggaggctgagcagctgttggaactgctagaaagagctgtgtggtcaggggggcaggaactcttaacagttaaaaacttgagctaccagctcctgcaattcttccttctggcctttagcgccacctgcaggctctgagggtacaacaaggtttgacagcgactgcagtgcaacactagttctcaaacttgagggcatcatttacctggggagctgggcctcagttcccagaggtgctggttcagtaggtcctgggctggggccagagaatgtgcattggtaacaagttcccaagagatactgatgctgctggtccggaaaccactgcccccaccccaggaaccactgcagtaaagactttgggaactagattgggatataagaatgacaagcctcatgtttggccctctttgtggtgggccagaatttatatggtcaaggaagtgcatgtaagtgcagagtgtgaggctcatcttcccagatgtagttgtcgtcttttccagaagatgagaaatcagcctgcttagttacccattcgggagttggaaacgatatgcccttggctgagggagcaccatactccagtaaagctgggcccttaataaagaaaacaaagattattaaacatttttcaaaagtatttggcggaggcggcttgtattcggttttagaaaacttgggatctgaagaacttactttgtgtactgaaaagtgagcacatgaacccacaggccaacagaactttaaagggatttatccgtgagacaagggtaaagatgcctaaccttgcaatgatacttttttccaacatttaattcatgctgttcatcgagttgcctgccacagcactgtgttatatcttgaaggatatatttaaatgtttgatttaggtatctttgcctctagttttcagtttgtttggagaagctggctatctcagataaacaaatctggaacttggaagagatactgtgagatatgcagacttgggacgttggttttcataggctggtgaagacagaaccatttcccatttcagcaaggcaagcatttcttttagtttgggatggtcttaaatgtttctgtaaaatggcctgggaatactagcctgtttgcagttttaatttctataagaggccattactttactttttggaaagtagtataagtttccatccctctttttctgccctaaaagtaaatgtttgagtcatatttttaatgtttttcttaagtccatttttcttgttaatgctactaagttgggatgtacccaggtgtgagaggtcacctgattcattgcgtttagaagactgcatttattgctgttgggggctgaacaattaattgggttcatctccaaggaaatgttaattgggaaaccctaacattgtgtattgaaaaaaaaaaaaagaagaaaaatcatttcaggcctgttaaaacaaaactcatttgggttcacttaggctgattaaaatattccttaatcagccccctgattaaacagtcctgaggtgaaactgcacctcaactcgaattttcagttagagacaagttttgcaataaagttatccccctttatttcatgaatatacatgttaaaaagtattttaggaaagattgcacttattatttatttctccacagaaagcagtttcatggaggtagaggatgggttgctttttgggagataagaatccctgtctaccttagacatttcaaatacaataacagctttttatgtgaggcatcgtgataatcacaaatgattataccagagctatctttccaattggaatgcaaaaatagatgtggaaggattgtataaattcatgcattagaactatgttctaattaaaggatttaaaaaataaatttaaaaggaaaaactaattttcttatttaatgatggagaaaatttatattaatgttatttctgattacagtcttgaagatttttttttttttttttggtccaccaactggcataattgtagctttttataagtccaaagaaatgcctcttgttttgggggaggaaaaaaagtaaaggtttaaagtgtatggcaaaggaagaactactatagatttaactgacttttcagtgacactaaaaaacactcttttcccttctttacctaatggctcatggttaatctcagaagaaaaagttaagcaggatttttgttctttgtcaaaacggtatgtatgtatatgtttgtgtttagaaatatacgtgagggccgaaagcttccttattttcagaagagatgaacttcacttggcacatgatagagaacctggccaattcaagtgctgattttagacaacctcggaataattaagctcagctttttggaagatgtgtcatttaccgaatagtctactgcaggcagtcagcagtgtaggagtctcagagttttccagcatagagcgtgtttaacattttccacatgaatctcagtctggctttgtttttgcaaaatgtttttcggtgggacccgactgacctttctcagatggccactggatctgctccccttgctatctatctgagcacgttctgaagtggatggacttcagttgccagttggtgtaatcaggctgtttccagagtctgatcttgtccctttagtaactgttccaaaatacttgggacatttataagtaagaactcatgactcccacatatttatcctccaggtcagaaaaaaattcataaaaggaaagcaagcagtgttcatgattttttatttgagtaacagaatagggactgcatggattctcccacatcctctgagactgtgattttaaaaaacaaacaactcagtcagtgtgctccaaagcctggctataataacacagacttaaaagctagatttatgctatttattagctctgtgtcattgggtggtttacttcctcactataaagcctcacttttgtcatctccacagtggggagaagagtaccagtctcatggggttgttatctgtggtttgagttactcataagctttcttacacctcaagcttttagccctgggcctgggacagagtagatatttcaataaatatttactgaacgaataaaagtctcacattccatttcttcctgcaatgtctttgcttattctgctttttcctccccttctacttctatccaaattctaccctttcctcaaggttccattcaactttattttccacaaagctaagccatttgctccagctcagcttctccgtcttgactttgtgtctgcctggaatcctgcctgctcttcactttatctacctggcaaattcctacttatcctttaaacccagctcaagtatcacctctaccaggaagccttcccatgggtctctcctcttgttactgcccaggttcgtggtacctctttgaccacctacacatttcatcatgattattcatttaagtgccatttttatataaatatgtattgaacacctaatacatgccaggagctagagagagtccaagtgtgttttccctgagtggccatttcgcttctcagtgtgggcacctcagccttctgcttcagagcacaacctccaaacagtagagcatgtcacgtaggatttccaggcctttattcagagctacctttatgacttccttgtctaaggatgactgtttgctaaagcagaatgggccaccccgtggcaaggggatgtaagggatttggggctgcatgttctagtccctgtttcattatctgtccccgaaacagctaagctggaggctggcttactcctccgagggcctaggtctcaacatttggtaaggctctcctgcatgattggctacctttgcctgattgtttttaaagattttttgttattgttgttgccttttaaccttcttttgaccagttaactctacatttacacgtttttctcacagtggtttttttttttgataactttaaataattagaataataatatttacccagtatagaaattctagtaatatggggaaaaaaataaagaataaaataatttgtccatcatcctcacccaaaataaaaattttggagatatttctttccagttttttcatgttgtttacattacaaaatgaattccaatcttcttaaatttttttttcttatttttctatttttgcctttatttcattgtttacccttactacttatttaatgtaacactaaaacactcagggagattggggttacataaaagtttatatggtgctgttctacataaaattggagaaagttcagttgatttaatagaggtaggggctgtttttttcctcttaattttgataaggacagaaactcacacagtgatatgaaacaagttgacaaagagaatttgtattttaggctttgaacattgaagaggtgtaatacttattgcttcagacagtagacagtacatatttggaatgggttatctttgaaagtggataaagattgaaaatacaaataggtgcaaaagaggtaaagatacatttacagagctgtattggacccaatggcaaactaggatgtttcaaaagccattcaaagcaggttacatttttgaggacaaccatagcctcctgcaaacatcccttggtgtgctttcctgaaaccggatactggtttgaatagcctgtgagtctgccttagtatggaaattgccattttttaatgtggggtcagtgcacctgggttgtgtgttacaaaatcaaacatgaacttctttgggagttccttagcaggttcacatcctcccaggaaggagcaggggtggtggagagcataggacatctggccctagggtgttgcagcagcaggagtccagggtttctgcctctctgagtgttaacttcctcttctcaaactaacttcctgcatttagtgaaaaactggtttcacgtgattcccaagctgcagatccccccagtgtctgctgggaggggtctctcctcttagttccagtttgaaacctttcaaaacagccttctgactggtcctgctgtggtcacatgcagtcccaccctccaccacctattgtagccagggaggggcaggctgtaagcacaaggtgggagaggaggaggacaaagtgggcacttgaggctaaagagtgcttttctggaagaaggaaagggtacaggatagacagcagaggaactagctaccacgtcgtttcaccagtgggactctgagctctggccagaaacctcagccactcatgagctgtcttgcctatggccaacattaggggtttctcagttgctggtagtctgtttgactggcttgtatataggtatagcagaggtttatttgtatggagaattgggttctagttgtaacttgtacttgccttcatttagtcaaagtttgtataatttttaggaagcccagcttctaggcctgcaacttctagctgttataactttgcaaaacactttcatataattgtatttgaccctcttgatgaccttgggaagcagttaaggcaggctttattatcaccattttgcatatcaggaaaccaagactcagagaagtcaagtaatctgtcaacatacaatagaaatccagtggcagagactgtcagctctctcaagtccttttccaggactcctgcatgtgccagaggccactctgctgactgaataatgatgcctcaccactgtgggagaggccagaggaccaggaaaggctggtctcaaactgctctcagtttgatgactagggaccagacatacctccttccctggaaccaaacctggttgctctcagtcaccccaatcaggtctgtcttttctagcactccacaatttttcctgcttcccacatagttcatgctccatccatgctccatctcagtatgtttgctggtctttgtggctctgagttggctgtgaacctgaatatttttactagcttcttcaccagtgcacaggctgttcctagaaacatggttgttgatagggacagccctgaaagaatggagattttgtcttctatggtcctgctgaaggctagtttctaatttttatatttatttatttatttatttagagacagagtctcactctgtcgcccaggctggagtgcagtggcacgatctcggctcactgcaagctccgcctcccaggttcacgccattctcctgcctcagcctcccgagtagctgggactacaggcacccgccaccatgcccagctaattttttgtatttttagtagacacggggtttcactgtgttaaccaggatggtctcgatctcctgacgtcgtgatccgcccgcctcggcctcccaaagtgttgggattacaggcgtgagccactgcgcccggcctctaatttttatttttttctccaaagcttcaaaagaaagttacacttagaggaatctattacttcagtaatcacataattttcctggtgcatgtctctcttgctttcttggtttgcctcttgtagtctttgaagaaacaaagagcttcaaagccaggaaaatgacccagatctctttgacagcagtgctaatgttttgggaagtgaaggcatatagttattactgaaattagtgttcctggaagctgcaagttacttgaaaattatgctgatttgtcttgcatgcattgtatttgtgtcctaccaaagtgtttccaaggaagtatctggcaaacaggcaggagggtgccggggcagtgggacggggagggtctgaatatattctgatggctgaagtctaaagaaaatgaactggaacctatttaggacatcgtattgcataagcatgagagtgataatctcatctctctttttcttttttctattggatcttcttaagaaacctgaatagccttgatatgatatctaaaaataaagtaaatggtgctttgatgtctgtactttctcctccatgtaacagtgggtgtatgtttctcagagtttatctcctgtgtgccaaaaatcagagaggctcaggaacaagtgtccattgcttccaagtcataagaacaattggcaaaaatcacttgtcttgtgtctttgaactttaaatgcagtgaaaaaacttgtcttaaccaagagagggataagaaagagctgccaagtttgaaaaacctgctgataaataacttcataccaactgtacaacaacctgtactatatagtctgtagatgaaaaatcatgtaccattttggcttgtacaatactttgtggctaactttaaaaaatacggaatggttaagtctgtgcattaatacgtgctgtgtaacctaacttctcagcattataatgtcacagatatctgggggtggtggggagaagtatatgcagctatgtatagaatatacacagctctccctcctttctcttccttctgccccctggctgtgtggtctactggctggattgcaatagctggattgcagctggttagatgactctgctggtttttgaggatgaggaggacaggacaagagagggaaaattttaaatgtttatatcataggagaatagtcatgtcagaatcattgtgtttccaagctgcagtttgtgctttttaagttaagaggtatgggacttcagattaagagtttctttacagtattatagtttaaaacattggctctggataatagttgactgagtttaaatcctggctctatagttgacttgcactctgaccttcaggcaggtttttcatccaaaaaagtggaaattaacatagcacttattatgtgaccaatatagaggacttaaacagtgcctggtagaccgtaaatggccaatacatattagctgttatttttgattttacattcattagacacaattgtctctttgtcactggtatgttttctttaaagtacagatgtcaggaaagtagcaatcagagattccttgtttgttgagggtgttttgttttgttttgttttgttttgttttgttttgttttgttttgacagagtcttgctctgtcgcccaggctggagtgcagtggcgtgatctcggctcactctaactgcctcctgggttcaagtgattcttatcaagcgattctcatgcctcagcctcccaagtagctgggattacaggcatgtgccaccacacccggctaatttttgtatttttagtagagacagggtttcaccatgttggccgggctggtctctaactcctggcctcaagtgatctgcctgcctcagcctgatttcacaatactgggattacaagtgtgagccaccgtgcctagcctgtggaagcccagcagatggaagatttgctgccagagttaatggtgaccggtgggatatacaattgaatctttacagagaatatagagaccatgagataactactctggaatcagttagttttaaggaaccacaggggcagagcttgagataattgggaagtttaacatattattaaacctaaaatggccagcaagactgatagctgcttctcagttgtctgagttttttctttttttgtgaaaatacttttttagccagcatgacttatgtcatctcttagatgagagaaaagagtaaaaaagacaaagtgtatagctactcttttaaaaatagtgttggaagcatagttttggaagaaggtgtctcacatgagtcaattttctagacaagtgaaatttggctcttttagtatcaaaacttgcttttataattttttattgagttttttctaaacttgaacaattcatttatgttatgtttattgagtatatctcatgtgccagaaacactactgggtactttacattgccttgatttttacatataaaatgcattgtgttctggcttttaaacaagatacactggttttaatttaatattttcttggaagactaattgttaagccgttatgtaactctgtgcttagatttcgtgactttcatattttgatcttattattccctacgtgttctcgactttttccacgtagttgagggaagggttactgattgttaattgattatttattatgtgttctaggcactttcacatacatttcatttcaatctaacagaaacatgtaaaattattattatacccattttatagatgacacaatgaaccacagagaggttgagtatcttgcacagagtcacactgctgagtgaggagaggagctgagattggagtatggacccttctgattctgggtccaatgttctttctatgctgacatcattgaagaaatagacataagttaaaagtaggtttatagatcatgacccttcctcacactccctctttcttttctaattctttcccattgctgtaaaagcagggttttcttctctaattaatttagctattcttcacctgtgctagatgcaagtaaaagacagcagaagttagaaaaagggtggagcctccaaacctgttgggtgagaggctggtccatgaaatgacccaggattttctcagagtaaatggaaaatctttaactttgatagagttaatttatagttacaagtaattttgtgtgcctaataccaggtatagactaaggaatttatcagaaatattatagtaaatgagccctttttctcataccaagtcttcaaagttcagtgagggtaaatccaccctcccataaaagcaatgaaaacactagcaaagatagcaaaaagcaactttttcagaacccctgagattagccaaaggcttccaatagtttgagaagtgtttattcaagaaaatcttctgaatcttattaggaacagcagggtttgtgggattgtaactgaactactcccatttcctctcctcagctctgcaatagccttgaaaaccagcagtcttgcaaaacttgtaaaaacggtacttgtaaaaaccaacagccttcaaccattggctaggataggcctggatggaagatcctcaagaagtcccattcccagagcattgtccctatttgacttttctcacagctccttggaaaagtctcatttgcagggcatagttgttatttgacctaccttggagctcagagcttgctctgttcccacagagccctatcttcagggtatttgtcaaaaacaatcagtgacaattgtttaacgtcgtagcttctgaggggtcaataccagttgcgcaaataaaaacctggccaaaaacttacgggtaagatgtgaggaataagatgtccataagaggcttttaaaaaactcttttgacatattcctagaggattagaaggctacacacatatgcagggctatgtgcatgctcagaaggacctgagagggcctcagtgtctcacctctgactgagtatgaggtccggagaaggcaataaatacaagctaaggcagaagattaaagtgcccaactgttgaaggtatgccttaacacacacacacaggacccttcagcaaagattggatcacttattggttcacagcatcagctaaccactaagctaactaaacagagacatcagtggctgcacaccacaagaaatacagactttacagaattagtccagaaaagtcactaaacaaacaaacagcaacaactgcaataactacaaaaaacagcaataacaaatcctggggagttgggagaggagagtctgatttccagaattgccacatttgttattatctgaagtgctcagttttgttttgttttttaacaaaaagcatgagacatacatacacaaacaagacagtatgacccatacacaatagggaaagtagtcaatagaaactgtctctgaaggggctgagatgttggatttattctacaaagattttattcagctactatcaacatagtcaaagaactaaagaacatcatgtctaaagaatgaaaggaaagtatgacaatgaagtttcaccagatagagaatatcaatagagaaattgtaaaaggatctaaagtctggatttgaaaagtataataacaaatgaaaaattcacttgtgagctcagcagcagatttgagctggcagaggaaagaattagaaaactcaaagacaggccaattgagattatccagggtgaggaacataaagaaaaagaataaagaaaactgaacctgaacctagtcccagagacctgtaggacaccatcaagcctactattatatgcattatgggaatcccagatgagaagagaagggtggaagaggaatatttgaagaaataatagccaaatacttcccaaatttgatttaaaaaaatacttgtctgcacaactaatgagtgcaggaaactctaaataggataaactcaaggagatccatacctgtgtgtgtgtcgtagtcaaactgtgaaaagacaaagagaatcttgaaagcagtaaaagaaaaatgactcatcaaataaaagggatcctcaataaaattaacagctgacttctcattagaagctatggtggctggaagtgagtgggatgacatatttaaggtgctgaaataaagagagtctcaacaaagaattctatatctgttaaaattacctttcaaaaattaggaaggaaccaagacattctcagataaaggaaaaaagaatgtgtcactagcagacctgtcccacaaaaattatgaagggagtccttcagattgaaaggataaggcactagatgataacttgaatccacaaggagaataaagagcactagtaaagataaacacagaaataaacataaaagcacaaatatatttttgtaactcatttgggtgatagataactacatagagcaataattatgaactgtgttaacaggcttataatatgtaaagatgtaatttgtatgacagtagcacaaaggagaggagaggaaaaggaatatgtgcagaaaacttactactcttgaaactcagttaatattaatctgaactacattgtgagttaagatactaattgtaattcccaggataaccactaagaaaataactcctttaaataaaagaaacaacaaggtatcaaaaatggtaccctagaaaacatctatttaactcaaaataagacagtaataggggaatccaaaggaatatgacatacagaaaacagagctaaatggcagatgtaaatcctaccttatcctaccttatccataattatattaaatataaatgcactaagcacttctattaaaaggcagagattggcagaatggagggaggaaaactcctgacccaattatatcctatctactagacacacttacacacactttaaatttaacaacaaaaatagtttgaaaataaatgaatgggaaaagatatacaatacaaacagtaactgaaggagagctggagtggcaatactaatatcacatgaaatcaactttatgataaaaattattactagacacataacagtctattgggaagatatcataattataacatacatgcacccaatgacagagccccaaattacatgaaccaaaaactgacagaactgaagggagatatagacaattgaacaataacagtgttttttttagagaaagagtctcagtctgtcacccaggctggagtacagtggtgcagtcacagctcactgcagctttaacttcctgggctcaagtgatcctcccaccttagcctcccgagtagctgggactacgggcacatgccaccacatgtgtattttttgtagagacagggtttcaccccgttgcccaggcttgtcttgaactcctgggctcaagcaatctgtccaccttggcctcccaaagtgctggagtacaggcatgcaccaccatgcccagccaagattttcttttaattactgatttcaaagtattattgtgatgtatagttttattcctgtttcttatgctttgagttcattgagcttcttggatttgtagttttcatcaaatttggaacatttcagacttactttcttcaagttttttttttgttccctcttctccttttggaaactccagttatacatatattaaaatgcataaagttgtcccgtagtttactaatactcttttttcttcaatttttttctctgtgttcccattttagatagtttctattactgtgtcttcaagttcattaatcttttcttcagctattaattttatccagtgtatttttcatctttagaaattcaatttaggtattttttttttgcaatcttctatgtctctaattaactcgtctatgaggattgttgtttttaaagcctttgtctatcaattctattatcttgtatattaatacccctctttcagtaattgattttgtttactcattatgggccatatttttctgcttctttgaatgcctcatagtatttgattagatggcagacattgcgaattttgtctttttgggtgatgagtattttgtatttctataaaatacccttgaacttcattcttggacacagttactttgaaagaattggatacttttaggtcttgcttttataattagtttggtaggaccagtccagcaaatagttagggctgactcttccctactactaaggacccttttgagtactatgcctaaagctccatgaattgtgaggttttacagtctgtctgggagtaggcacaattcaagaccctgaggaagtatgaggtactgctccctcgaatctgtttagatgggttttctcctggcttttgggtagtttcatcacatgcatgcactgatcctacttaagtaggaccctctgcagatctctggggtcttgtttctttttagccctctcctttcctgtgtgctgacctgtgaaccctaaccaccttggtgtctctggaattcttagcatcatctcttcaattcagtgagtcagctaggctttactgggttctccctttctgcactgtggcctggaagctcttttaaagcagtaagctgggcaatcatagggctcatctcatttgtttaccatctctcagggactacggtcctgcatggcttgtgtgcagtgccttgagaatagttgtttcatatattttgtctggtgttttgtgggtttttgttgttgttgttgtttcagagggttaattgaattcctgttattccatcttggtggaaagtagaaatctcaattttttttttctgtagatacttaatgtcactattagtttaagaaaaaatggtcgtattttaaccattcatgggtaagccaacttgtaaaatatgtctgctctatttaagcttatgaagatctgaagtagagtaaagggagtgggggccatagaaaaataaaagagagtaaaatctcccttctttcattctttctcttttgctcttttggtaaattgttgctatgcccccttactaatcagagccccattgttctttttggtaataggaacattttaagagttctgtgaatatgccactcaaaatatatgaagagtgttaccaataaaattgtcatggtctttatgttttaatctatgtgataaaaacttgatggttttggtacaactggttaacttctcgaaaaaaatatttaaattggatttcctcttaatatcttatacccagatatagtccagataggttaaaaatataatttctaaatattaaatgaaaatataggcaattcacagaatcttaagaaaaggtctttctaagtgtgatacaaaggatacaaccataatgaaaaagatcaatatgattacatgaagattttatgtcttttatatggcaaaaatcattataagcaggattaaaaacatagtcgatatccttagtatataaagatacctcacaaagtagtaaaaaaaaagccaaatatcccactgggaaattaggcaaaggatagttgtgtaaaaaatataggtttcaggtaaatatgtttacaatgctgtacttcataatagtaacaattacaaattataatactcataataatagctatcatttatttcatgtttctatttgcttgattacgttaatgttttcagtagattggctaatttgatactttgaaaaacaagtatactattattgtcagtttataaatggcatttgagacaggagattaagacccttgcccagggtgacaaagctatccaagtggctaagccaagattatcacccaggccttctgattctagacccctgcttctcatcattcctcatagcaatacatttaaactacctgaaattcaactgcaacttgcagagaaattggtaatttgctcaagatcacaacatttgtaagtgataaattgagttaaaaatcttacaaaagtcatataagtagaagaaaggaaaacagggtaaagtaaggtgagcaacaaaacagctgtgtgttttaattttagatattcacggtttattttcagaatatttaaaagatgcttcaaagaagatgaaaaatgggctaatgtttgtaaaactggttaacccctgttcaggtaagttctcttctcataacttgaatgttcttaaatgttgtggctaatgagtatatacacttttatgtctttgtgtccttgctctttctgaatagcttttaaagttaagatggcaccgtgaggagaagaaaacaaggtgatgacattactagtcttcccagataattcatttgacttaaacattttaaaaatttcttctcataattttaattcacagaactgttcagccatcagaaatacgggcaaaacaaaaaagtagcatgtttgagttctctttaaaaacagattaattttctttggcttccttaagccaacttttcttagttattcaacattagcctccatttatatccattttatcttataaagtaaaataaacaaccagaatttaaaaaaacaaaaacagaaggcttttacttgacatgccaagattttgattaggttcagttttagctatacttccctattttcttctgaccaaaaagtagtactttttttctccgtcaggggacttttttttttttaaatgataagcattgtttattgaagggattcatatcttattggaaaaattttattttaactttatattcagtgcattttcagttttgtcttcacattttttaggcaaaaatattaaagtgtattctaaatattgagtaatatgggtgatagtgtttatctctgtgtgtaattgtttttccattaatttataaggttttgtgtagacacctgatacttgccatattagaggtttctcctggtgacagtaatacggaatagtaaaagtatgggagggccactgagtagtgccttgttgttatagagacatgtaaatagaagcaacaagagaagaaacacattcctgactttctccagtgttcttttcttcaaaatgaaattgactgtaattggtcagctatatttagaaatcttagttatatatcagactaagttgacgtgagaaatatttcttcaagagaagttttaggtagcagtaaaggttctaaagcatttaagaaaagtacaggtacagaagaaagccagccctcttttaaaatttctgttttatctaaatgctcatagacaacagaggaacaaatgtttttatttgctacattggcagtgggaaagtaaaggctaacatttgctgagttcttactatgtgccaagtattggtttaggaaatttacatgtgttcttttttttaattcttataaaaacccttgaggaggttcagtattgtctccattttacagatgtggaaacagccacaggaaggtttatgtaacttctccaagggcacgtgcccagcatatggtggagatagagttaaagtcagcatccttgtctccagagattgtgctgtggttaaaaaaaaaatttttttttcattagttgaagtgataaaacatgcagatgtgcacagtcttcaccctcttgtgcctcctcccttttttttttttttttttttttttggttaagaaaggaaaggaaaaaaaattcattcagttgaataaagctttactcactccctatggcttcaagcatgtctgtctttctcacttagggttggcctgtggcttggtccctgtcagaccctgtgtggggagagccacacactgcccagaggcagggacccacgtgccagctcatgtcatatggctgaactgttgtgttttgatagtttaggaatggatattccctcttgatctgatggaggatttaaggacaggctttgtattagttaagataaatgacttgcactttctaattttttggtttaagtccagtgaggattatggagctggaaaactaccatctatgtataatagctgtaagctttccttggaatcagttttttagaatagacctgtgtatgtttatgttcatattaggaacattcgtcagagatactggatagtcttttggggtgtgtgtgtgtttgtgtgtgtgtgtgaaaacttacaaataaaagacagatttgtcttaacaggagaaggagccatttacttgttcaatatgtgtctacagcagctgtttgaagtaaaagttttcaaggaaaaacaccattcttggtttataaatcaatcagttcaatcaggtaggtgactagtgtaagcatttccaataactaaacacatactccagcttttccattcttcacacgtggggttgtgggtctgtcaccgggtttggagtctggtcactggtttagccttccttggcatgagagcaggtttaatcaaggagaaaggaaagatcatttgagcactaaggttaagtcatctcctgtgtgtcttagacggtaggaagttttaaactagcaactctgatttgtctcctaaaacagtgacacatcctgagttagaagttagatttgtacatggggcacatattgtgttgattagaaactcttttgaggatctttgtgtttttaacatgttatttccttgaaactggatactgatatggcttctaacataggctagagcataacaaagtttctttaaaatgctttgtcatatacctgcctgcccacctgctcccccacccccatacacacatacaccccccagcaccaaagttctgtttcttgtggtgttcccttaatttgggggcagtgctgactaaaggaagagtaggccaacggaactgttctgcctcatgttctggggtgggggcagtcagtggctattcaaagaatcctacatccccctgcccacagaccacggaagggactgtgtatagagagaatggcactgctttcccatggctttgtcctcaaaagcacaggaaattacattttactgcagctttatagatagactgacgatacaggttccctaacattgccgtcttctcattctgtctgtgcttcctcctaacccctcgtttttcagggggttgggaggctgtgttaaaaatgatttctaaagaagaaatggaaagttaaagatcaatttcagggtcttggttctcctctccacacagggatttgaagctctttggagtaaaatctcatagagcacattctgccttttgagagaatcacatagactctgaggcctgtataagaagagatttgaatttggaatttcacatatatttttcaacactgtttttcactttgagattaaggtgaaatagccacattgtctttccaagacgtttaattcccttcatcctttttgtaatctgcaggaggtcttctccattttgccacacctgtggatcctctatttctgcttctccactacctcataaaggctgataaggaggtgagtttccagctcggagcatccacagtgaggaaacagaatcaactatttttgtttgatctcctctctctccttttaatgatccaaaggtggattctaccttcagatctattatagtgactagagaaaacatgaatcatatgggccagtgcaggacagagcactactgcacaggccagagaagcagcaccttactcttgatccagtctgaccctggcttgcttgtgacctctgacttgcctgactcactgtgctgtgcaccttactgcttgacaaagcctgacagctaacactcctttatcattaagtattccttacacttgaaatacaaaacaggtatttaaaaattgaccacatgtcttaaagagtctcttctttagtgagagactgtggaataggtaaactggagcgggtccaatagaagctcattaatggtgatgtgctagttgagacttaaggaatcccagatggataaaatttacctttggaatagaaataaagacacagcttactaatagtaataattttagccagaagttctgtaatattttggtctcaggatacatttacaattaaaattattaagggttccaaagagcttatgtttctgtgggttctagcaatactcttagaaattaaaactgagagatttaaaaattatttatttaaaagttaaaaataataaggccattacatgttaacataaataacacatttttattgaaacaaacaaccaaatttaatgaggcgtgtggcattgttttacatttttgcaaatctctttagtgtttggcttaactagaagacaactggattcttatatctgattctgcattcagtctgtttccatatgttattttggtaggattatatgaaaaatatgcggccccatacatctttgtagttagaaaaggaagaaataatgttacagcctttttagattattgtggatattcttctttaatactgcctaaaaaatcaacaagtagttttttaaagtttagttgcaatgtgaaatgtgaaactttgtcagttaactttctatgctctgttacattaaaatgcattggtctatcttgcacttaaaatggatctttttaccagtgtatgattttgtaacatcatgctttggtcatttggaaaatattgatttgctgagttatgcatatcttccaaatgttgacacatctcattttacacacacacacacacacacacacacactcccttttgttaatattaccactgatctcatcagaaagctctttaggtattgagaagctgtcatagtggcagatagaaattttctacaattctaatttttgcttgaaagctcaaattttattattggccgcaaatattgtcaatctttcccgtgaaatgacaggctcacttcgttcatattctgcctaataccggggtctgaatcaccgtaattcatagtgggtttttcaaataaaaatgatatccatgaaaaagcagctggttctgcttgcaactcagccagccccaggagaacatgctcttcctggtaatcagcttatctttggttaagcagccaaaggcctttagccatacctcactttcatcacagataatttacaagacttgtgttcaagggccaagatttaagtaaaattaattgcttttactacttgctcaaggatattcttaagtgaaactggcattttttaaactgcacataaatggcggtgaggatccaaatgatgactaggacagtctggtgccaccaccagactcgtgctaaagagccagcagttttacccaccattgcatttgaatcatctgtgcagatgtccacacagtgaaaatgcagatagcgtcttagcagtattaggaaaatagctttgagcttaggtacttcatgacccagggatccatcaaccatagttggaaaatcttttaattaataactttgagtgataagtgtcactcaaacagcttagaagaatctggtttttttggactctcatgtttgcataaagtttgaacacttataaatttcttacttaatccttagatcaaattcctgaaacctccatttggtaggtaaattaatttaagttgctgtaaatactgaaagtcataaagtatcaatgcatgttttctcttgatgcagcttagcctcttttagcctcctccttccctgccctccgcccttcactgtgaattagtgaagttttatcccttcgtttaatcatgtgtcccattatctggaagctactgtgatggccggtataacgagggcacacaagctgtgaggctggtaagcctcgtgtctttaaggaacagaaatggtcctaatcaccaccaggaacgccctggggaatattcagggaggaatttgtaaacctcagtggctcacctatgtggtgttttctaggataaattaatgagcagaaagacaccaaccagcctcagcaaatgtattgatctgcacttaaggctccccctcccctttttgatagcatttctccatctcccattaggaccatgactctgggggattaaccctgtcttggcactctgggcacctccagggtgctatggcgagctcacgttgacaagtgcagaatgaagcagaaatgctgttcagggtggcctttggctttcattttaaaccgtcgtacttcccaaacacgtcttcccaagtgccaaaaatgccctttaaagtaacatttgagatgtttaggtatttccttctctacattttagacatgatcatttcctatttagttaaaaattattgatacacacttttgaaatgtgacctgttcttttaaactttattttaacatcagtaaaaataactttttttctaggtatcccactgctactagctttatagtcaaggcaggttgcttattgcatttccttcaatgtatatatggtaaataaaaataagaatgaaacactagttaattacaaaattattttatatcatgattgtatggtagtccattacatataaatattgttttagagtagtcaaatatttaagatattgattgatcatggaagactatagatttaaggtagaaatctaaagacagtaagacttgggaaaaatctgtgcattattcttactatttgaaggaaaaagaacatttaaattgagatagttcatggcactagttaacctaagagaaagtatggcaagctatcacgtgttcttaaatgattgagaagattttacccttaaaacccaagaaagctgcatttgcagaaattgatcagatgcagtttttgtgtcttcaggaggagttgtcagtacacgagaggtagagcgagctagaagtgggtcatgggcaaggccatacatctggtacagtctggtgtccccaaatcagggggctaataccttaatttagacaaacttcacctctacttgctactagtacagttacgaaaaactagacctaattccaaagaatgatgttgtgaatccatatggtctgcacttctggcccactggcaaccaggccatataaacttctgtggctgagcctgatttagcctgtctgcagcttcccatgacttctccctctggctgtcttttcttttattctggtctaaatttggaagcattgtgaggcagctttgacaggggtagattcacttttgtattttctttttgtggcgggtgcttctttcatcatccctagagtgatgatggggaggcagatgtatgtctgggcctggtctgggcttgttccaatgtgacagtcaggactcttgctctgtgaccacagctggttcttcaaattgaatgggttggaccatccccaggcagtctccaccatctttgcaagcttctgtggcttccagtgcttttgtagattgattttcttccccatttcatttggggactgtacacccaaggtagatggtgtgctgtgtgggactccagtgctcacaggagcttcctgaagggagctggggtccgtcctagagcctgtcccattgtagggattccttagatggaataggtggcttctgcactaagtttaaaggcccagccatgagttaatgtgtctttttctctttttttctgaatgtctttgttgaatgaaatgcttgctttccaactaactgttttttcaggggaagtttcagccccttgatcaagttgtggtggataacgtgtttccaaattgcatcttgttgctgaaacttcctggacttgagaagttacttcatcatgtgacagaggaaaaaggtatggtataacttaaaggcttatggctggtagaaaggatggaccttgcctaagaacgtggctgcttacagacacactgaatgtaaggcttattctgtgtccaccatagggaaaactatcattcagatttgctaacactgccagcactgttcctctattgctttggagtgtttagtctttggaactacaaccatggcagtctagggcctacgtccacagggcaggaatcacaaggtgtggcttcagtctcacttcttctttgaactagttctgtgacatcaggcaagtcactcagctgccttctgcctcagatgtctcattgtaaaattacgtaaaacctgtaccttaatagatggaagcatttatcgagcaccttccaaaaagcatatgttgcacattagtgctaagctctagatacttatgaataagacattgtccttttcttcactttgcgcccagtctgatgggggtcaatgacaagctgagcagtgaccgcacagtgtaacggaagtgaactctgaatttactggggatgcacaggacaggtttctaatctggcggggttgggtggggaatgtaggtgggtagatgttgtgttgctttcctgggggaaatgacctctttatggagtcctgaaggatagtcagagaagcagtgtaacagaggctcagatgtatggaaaagtttgtcaggttcaggaagttccaaggagttcaaagtataggattctggggaaggatgtaggttggtaaggaatgaggcgggaatgctgggcatgggtccagatggtaaagggccctgtgtgtgtttggactttgcttaatggtagtggagtgtctgtgaagttttaagcatggcagtctgcagtgtggagagtatattggagaagccaggtccaccaaggctgttgcagtgatccagacaggagataatggtggccttgatcttaggagatagaacaagaagaaagtagccatttagagatggacccaactgcatctggttgttgggtggtggtcaaggagaaggaggagtcaagagtgacttctcggtttgtgcctgacccaaaggatgtgtagtggtgggatcctggacacagggaacatgggctggaggagcaggatagggtaatgaagagatgcgttttcactatcattcatttaatttttcagagggaaaagtaaggcagtgtgtgtgaatgtgttttgacaggttagaaatagtataaaaacttggctttggtgtcttaaaaaatcatccaagtagtttcagggttaatatggaaacaaagtgtgggaaccagagcatcaggctgataagttgtggctgtttgggtcatagatggtttggccaactatgacagttcttctgggaccaagaaagtggtgattccaagaagtgtaagcttacagtgggaaagagaagaaccttattgattgcattttatgtttaaggggtccagtaaattcatacttggccacacttggagctccagtttggaactgaggggtatatggtgccagggttttatcaaagcagttccattaaagacattccctgatgctgagtttggcagaagacagcagtctttttgtgggtgacctgaattagcccataaccacttttaaaagataaagtaatgaagaataatttaattaagccatgttaatttttgtcaacttaatgcaagctgaaaatgcagttaactcattgtccagaattctgctattagctgtataagaacaatcatcttaaaacccagaaatccagatttagaaacaatgttagtgcctcagcatttgtttccttacagtctgcagccgagagcaagaggctctctctgtgtcatcccttccctcttgtacaccgaactcctgaccatttattgcatcattatctgaacttgtcttagtctcctttgcttctcaatattgcctaacttttggaagttctgtacttccattttcaaagtagctatattattagcctttatatttgccagatttcaaaaaccctaggcctcaatttttttctttatttttaagtgatgggcaaaacataaaatactttagaataaatttcacacagtaaaagatgtattcaatctctagaggtttggcagtttctttttatcaaattcttcccttaataagctgcagcctgtgaatctcaaaataatggaagttttaaaaacagaaagaaaaagatttttatttttatttttttatttttatttttttaagacaaggtcttgctctgttgcccaggatggaatgcagtggcacaatcacggctcactgcagcctcaatctctggggctcaagcaatcttcctacctcagcctcctgagtagctaagaccacaggcacaagccaccacacctggctaattttttcattttttttggagagatgagggggtctctctatgttacccaagctggtcttgaactcctgggctcaagggaacctcccgcctcagcctcctaaagtgccgagattataggtgtgagtcaccatgcccattctcaaaaagatttttaaatggggggaaaaatacgtaagattctcaaatgcctcatccttaagaagatattggaaaatcaaatatctaaaaattaaatatataaaacctaagcgggctttattgcaagaattcataattggttgagcatttaccataatttaccatatttatgcattacaaaattgtatgattatctcaaaagacacagaaaaggtatttgataaaattcagtcatgatatatattatcagcaaatgaagaataaaagggaacttccaagggcatctatggcaaacttaaacagctaacatcatcttcattgtaaaagactgaacacaatcttcccccaagactggatacaagagaaggatgcctgctcttaccacttctattcaccatgtggtggatgtcctagcatgtgcaataagacaagaaaaagacatacagattggaaagtcagtagtacaactgtctttattcatagacaatattgtcatgtatgaaaaaatccaaaagaatctacaaaagaagttactagaattgataagcaaagtttcaggatacaagttcaatatacaaatattagttgtgtttctatatactgacattgaacaattggataatggaataaaaacataccatttatactaccattaaaaataacattctagtgctaaatgtaacacaatatgttcaagaccaatatgctgaacattacaaaatattgctgagagaaattaaagaaaaattaaataaatggagaaataggccatgtttgtggattggaagactcaatatttttaaggtatctattttccccaaattacactataattacactatataattacattatagattcagtgtaatacttagccagctccatttttttttctttttttttggtaggtattgataaactgattctagaatttatatgactatgtaaagcagcagaagcagcagtctccaacctaattttggcagcaggaactggttttgaggaagacaatttttccatggatggggcagggagggggatggctttggggtgaaactgttccacctcagatcatcaggcattcgattctcataaggagcacacaacctagatccctcgcatgtgcagttgacaatagggttcgcactcctatgagaatctaatgccatcactgttctgacaggaggcagagctcagccagtaatgctcacttgcctgacactcattcctgctgtgtggcccagttcctcacaggccatggattggtaccagtacatggcttagggactggggagccctgatgtaaaggacctataatattcaaaacaattttgaaaaagaagaatttggagaacttacacaaactgaattaaagacttactataatcaagaaaatgtggagatcaggcacaatgactcatgcctgtaatcctagcggtttgggaggccgaagcaggaggattgcttgaggctgagagttcgagaacagcctgagctaagtagcaaaaccccatttctacagaaagtttaaaaattaggcagctgtgggccaggcacggtggctcacgcctgtaatcccagcactttgggaggccagcgcaggtggatcatgacgtcaggagatcgaaaccatcctggctaacacggtgaaaccctgtctctactaaaaaatacaaagaacattagccaggtgtggtggtgggcacctgtagtcccagctactcgggaggctgaagcaggagaatggcatgaacccaggaggcagagcttgcagtgagccaagatcgcgccactgccctccagcctgggtgacagagcgagactctgtttcaaaaaaaaaagaaaaaaaaattagccagctgtggtggtatgtgcctatagttccaactatttgggaggctgaggaggaaagatcacttgagcccaggaggtcggggttacagtgaactgtgatcacacaattgcactccaatttgggtaacagagtgagaccctgtccctaaatttaaaaaataaataaaaataaaataaatttggtgttggtataaggataaatatatagataaatggaatagaatagagaatctagaaataaacccacacttatatggtcaattgattttttttttccaaaagtgtgaagataattcagtgggaaaaaggatagtctttacaacaaatgttgatggaagaatttggtatacatatgaaaaataacgttgattcttacctcatacagaaaaattaattcaaaatggatcactatgttaaattcaaaaatgaaaattattgagcttctagaagaaagcataggataaaatccttgttgtcttgggaggcaaagatttcttaggacacaaaacccactaactgtaaaaaaattataaattgtattttatcaaaagtattctcttttgtttttgaaaaatgccattaagaaaaaaggagattgtgagttgtgggacagttggaacttacctacctggctgtccacggcttaaaatgatatagccacttgacaatttcttacaactcaggaattctactactccctggtacaaagtaaggaactactgctagctgcaacaaaatggatgaatctcacagaaataatgttgagcaaaagaaattggacacaaaaagtatatactgtatcatttcatttctatggtgttccagaataaagcaagaattgccctataatgatggatgagtggtgacctgtgatctgggtagccatgggagaattgactacataagggttccagggaactttgggggatgatgcttacatgactgcatacatttttccaaactcctcgatttgtacatttaaaatgggtgtgtccattgtgtgaacatgaacattgcgtgaacacctaaataaaattcatttttaaaacaatatttactgatccagcactagaagctaagcctcctgatttctaacacagtatttatttttacttgcccctttcccccaaaataatattggctccttttctctctatacttcctacctcccatgggatggagagatggaatgtgggaggcaaggccagtgtgagcactggctctgaggtttaggcctcgatattcaggagagtggtgtaggaggaagatgaaccactgggttttagacacatggaggcttagttcagggctttgggcctcccggttagtttgtttagtcttgttgatctaggaggagatcacaccagatgaaaggatacagttgactttggaggagggtgaagcagagctgggaaaagaatcagataagtcattagagacataaaaaaatagaaagcaattttatatatgccatggaggagaggttgttaggaggtactgaggaaagtgcagacctagtgatcttggtaaagtgaacatcagatccacagctttgatgtcagcatggttgggagttgggtgctcttgcctacttcctcagtgacttaggagagtttacttcatgtcactcagagccagtcttcgaagatggggacaaatcatggtttattaattgattctgagattcattctgatcattcaataagaaaatgtataaaatgtgcctagcacagacctgaataaacattagtttcttatgttttattaacaaatcatatttttcatcacaatatcttagctaatattatgtatttgctaagtggcaggtgttgtgctctaggatttgtatggattatcacatttcatgctcagaatagcccagtgagaaaaaaacctctctttacacatgggggaacaggctttgagcacaaggcggcttcccaaggagacagcatgtgctggggtatgcatgagccctggtagcatggctcagtctgtgctctctgccccttcttagagaataattcccagaggtagaggagaagcctcctagtggggctcagggagtgggagacaggaaggaaaacagcagcagatggtagacattctttgagaaaatttggaggtagaggcaagaaagaagtgagatgccagatcagggtaggattttcaggagaaccttgagcagtgagcttcttttggagtttttttttcctcaggcaatgaacataacttctaaaagccattcagcgtcatatatttatttagtgattgctgtatgctcttaaaattcccctggtttgtacatcggttgggacatgggctccagggaaattgagtccggtctcattggctttggcttacagtaggctgtttgcccaggtagtcctggctccaaaacagcagacattgcaccttggaattctgacactcctgacaatgcttttgcacctgtccctcttttttgttactgtagtgacatgtcctgagaagatggctgcagatgtccagcccccaatccatcctgcctcatcttgcctgcagcattgacaaccataggctgaaacagagaggaaattcacaggaactaaggccagggacctcccaacctctctcccatacagtttaacagactgcagaaaatgaaccctgaatgggcagttttcatttcccatcaaaaggtgggagggagaaagagcctcattctatataactcagaggtggtaaattcacatcaggcccaagggttgctagtggtcataaagataaatcctgcatggacagaggaggctggaatagaagtgctgcccttgctaattgcacagacagaagaaatcccatgaatgaaaagggttgcagaggaaatcatggtttaatgtcatggtatataaggctgggtggattgtggggaagttaagtgtaatttataagaggtgaaacttttatctccataaagggccagattgagcctaccataaatctaaatcttctcaaatagctatgattatgttggtaatatgttaaaagatagatagatctttttttaatgctcccccaatccccaataccaggccactactgagtagttaacaagatttttttcctgaatgtatgtagtgaacttcatagatacctgcatttcgtttcaattttctttattgggattttcatttttattttaagaaaaaaagtggttcattgaaaacattgaggtgagcttaaaattattcagaacagttaagactgcttagtatgctaatgtgaacacaaaatatctgagacaggtctcagtcaatttaggaaagtttattttaccaaagttaaagatgcacccatgacacagcctcaggaagtcctgagacatgtgccccacggtggttgggggtacagtttgcttttatgtatttcagggagacatgagacatcaatcaatatgtgtaagatgtacattggtttagtccagtaaggcagcaacaactcaaagtgggggtttccacgttagacatagataggagacaaaaggtggcattcttttgatcagccttccactgaatacacaatgtagtctggcttgagtgtggagccattgctagggaccggccctcttctgcccagaatttccctgcctcctgtccctatcaacaagattattttcctttcacattagtttgctgaggttttaaaattaccttttctacagagttgtttgtataatttgaaggttttcttaaattcttactcatttagtggttgatgactcctgaggtagccacattactactaacatttaaaaaaacatttcaagtatgttctcaggtttgtaaattaagcttttcaagaatttaaacttacaaaatattctttaaatggttaacttgtatatgatacaaccttaggagtttattttttttttaattcattgtgctgagtcttttttttcttttaaggtaatccagaaatagacaacaagaaatattacaagtacagcaaagagaagacattaaagtggctggaaaaaaaggtatagttcctctctagtgccttgtggtaaaagtaaaaattcagttctctaagaaattttcagagaaggcagtaagtctgaatccagagaccatcttgtatattcagtgaaaagaggaaaattgtgtagagataccaagtatgagaagaaggctttgactttttaatcctccctaacttctgtatctctgaagttagctttatgttttcttgtgacctgcattctcgtttctccctgctcctactacggaatgaaataatttgttggtgtagatttgagtcttccaagtaagaggataccaggcttggcacttgttggccactgtcagtcctgcaggtgtctccaagggtgatgcttacacacagccaggcaaagggacccagggacacagccaggcaaaggtgttcaggtttagaggaagtatgtcctgctctcagggtctggacactgatgaggggtcatcttacaggcaaaccctgtatcttagtgattctaagaatcttgacctaatggatggactggggcagtgaatttcaaatcaatttagtaggtaacaaccagtatttctcttggaatgaaacagattgtgatgggatgggacgggacaggacgggatgggatgggacgggacggacgggacgtgatgggacgggacgggatgggatgggacgggatgggatgggatgggttaaaatatagcagaggaagggcaggtattaagtatggctctgtgaaatgtatttatatgtgtttaagtattgggttgctgtatatttcttactatgggttgtgataaaaaaaaaactttgaaagccactggtctaaggataatatgtactttcacattgattaagaatctcgctaaaccatatagaataatgataaagtttttgcaagatcagtggataccagtagttgtagtactgtttcctaagattctcttccatcttttgtgtgaaaagtcatgtttgtctgcatgttctctctcataagtgggagttgaacagtaagaacacatgaacacagggaggggaacatcacacaccggggctgtttcgggggttaggggcaagaggagggagagcattaggacaaatatgtaatacatgtggggcttaaaacctagatgatgggttgatgggtgcagcaaaccactgtggtacatgtatacctgtatgacaaacctgcatgttctgcacatgtatcccagaacttaaagtataataaataaaaataaataataataaataataaataaattgtgtttatttgtcataccatgttaccaggctcattgaaagcctgggaagctggaaatgagtccagtagaataatcagtctcctaatgtgcaaagtagtggaaagatttagagtgccatgtttcattttttatttgtgatatagtagtagtagtattccatgtaggcgaagaatgagaataaatgcggagcagaatccttgatgtttacttttgctcttagccaaggaaaatgacatgaatagcgaagaggagtttatacttactgattatatttcctaggaagtgggaaatttatattattctatttaggaagttattacatataaattttgtgccaggttctattgtaagggctttatttacatatattacctcatttaattttcacagtagtcttatgaggtgaatgctatttttttcccccatttcacagatagagccacagaaaggttaagtaactagccgtggttacagagccaagcccagcagcctgactccagagtcagctctcagttatcacaatatgttgccttctcatattgtgtaggccatggaagtccatgtattgagatcatccagatattgctgccactcagcctttcttcaaatgggcaaccatttctcatcttctggtgtctggtgaagatacttctaggttctcaaatacttctttgcagatctcttaaatggtctgaaggccacctatgaattcatagatttctaaagttaagttgaaaataccctgcctttcccctcttggttgcttcataggttaatcaaactgtggcagcattaaaaaccaataatgtgaatgtcagttcccgggtacagtcaactgcatttttctctggtgaccaagcttccactgacaaggaaggtaagtaaagcattttatcagaaaagatttttgtctggagtaagttgcttatgtgtaaatgcctatcttaggatttaaaaatcttaatatcacagaagcctcatattcctaccaatgcctcatacacattgtggcaggtgtgcatcttatttcagaagcgaagaatatttctaccataggttacttctgtcattcattgatacttaagttatttattcagcaaatatttcttttacattgatagtagtaacaaccctggctatcatttattgagggtgtattgtgtgccaggccctttgctaagttgccactatacaaacatgatctcatccaaccctcccagtaaatttcataatgagcatcttgaggccctgtgcaaagtctcacaactagtaaatgccaaagctgagctacttatggagcttgtctctgaagcccacacttgtaatctttttgtgatactgttcctgtggcacagttgtactgttccagtggctgcatctgtttgcattttcttctcaagatgcatgtttcctgatacagggatcaatatattttgattttagatgaaaattgatttacttggcaatttttcttttaggttattcttttataatctaaaaaaggtatattattttcttttccaagtagagtcctcttatttttatatgtatagttgaataagaacagctatataatgcagttaacaatctcaaatggtgagacagaaattattctgacgttaaactccaattcattgttcccttattcagggtatacatatggctttagtcattacataaataaaaactaggaatagtggcctgtttgtgattgatagtaattcaggcaatctgatttgcaggaatctaccttgcatgtataggtagttggctactgccattctgggagtggtggacagcacctttgccatactgagttaccagctgtcagtgtctttaattggctttaacaatagaagatgagggattgagatagatgattaatggatagataggtgggtggatagatgcatccatggatggatggatggaaccatagattttgttttaaaagtaggagaagggatgttagaggttatttagacagatcatctcattttttaaatggagaggtaggtaacttatcctcaagatcttctgttctaagtctagtgcttttaccagtactctacatattaaggttctgggcttggctatattgccatttagtgtcctgaccataaagtaaactttacatattttacattatttcattttttagatatttaggttggtttggtaccagaagcagcaaatgaactatatgttgactttcttaaaatagttttcttggtctagtcatgactcattggataatgactatcccagatccatgagcaattttaagaagggtcaaatgataactttcagttctccattgacaatgaaaatctcttactgaagactttttgacatcaggtggtccccagacggcagtcattttctatgtaatactgaggcaaattgttactttgacttgagagcagaggagaatggaaaaaaggaagtgagtgaatatcccagcagcaaacctggggtctgcttttggtgctttatatccccacgtggttatcccatcttatgattaagtttgattatctgcttgtattctacataaaatactgaattcaggaacagagttttgaaacattttattgtcttcttatgtaactgtatttctaattgctgccagagctgcattttagtactgagaatccaaatgctttagaattaatgatgataaattctgctgagttagttgtttaagtttaagtattttattagtttgggagtgtgtgtgtgtgtgtgtgtgtgtgtgtgtgtgtgtgtatgtagaactatgtatatagaacaatatgtatgtatagaactatatatatatatttcagggttcttataaagcaaatacctagtagtagagacatggtattttatttctcttaaatgagtacactcattactgttgaataattagatttattctttattgaagcaggcttagaaaagattacccttttaaaaaagacatgactatttcatattgttgtagatgatttttaaactttatttgtattcagtggtttcaaataagaaagcaaccctgagtttttgtttttaatgtcatttagggagcatctactgtattatacttgttttatcttatatctttggtatcatcacatgtcatatctcatccctcatatcttcccactagtctgaccgatagatattactatccccattttacaaatgagaaaactgaggctagagcttaagtgagttccctttatccagatagggtcagaatttgaattcaggtcaatttgactataaaaccaccataattactattttttttttttgctttcactcctccttctgtttctttcagaggattatattcgttatgcccatggtctgatatctgactacatccctaaagaattaagtgatgacttatctaaatacttaaagtgagtattgattatcttcagtcataatgaagtaccatttgcttcttggtttccccagcagtggggtttccttatggcttatcatatcactgtttatgatacaagattattcttcagctatgtcatatactttgtgctttggggatgatttttaatggatgattggaatgaactgatttgatggatacggattgcaggaactagtgaatgtcaagattggaattatggcttggtctgattttagaggattaactatgttaaaattttatcctcaattatacttaactaatttggttctttgtgatcgttttaagaggaagaaaggagggatggaaagagtagatggaatatagacttttttttaatttacaaaatattgatatcattttcactattatcactagatgttcactaaagggactttatgcccaagacttggaagtcaaagtaatatgaaacacaatctgtgtctttgaggggcagaagaagggttttaagaatggtttaatgtatgttcctttctttataaagagcttatacatttagactttaagttgaaaaagaagtgttagaagtgtttattttctagatttttgcaaaatcgttacttaattttgttgttaagattttatgtgtgtgatgatttaatagcttttcctgatccttataaatcctttttatcctctgagtcatgaagataaaatgactttttaatagatacagttgttggttttagcaaattccagaggtcctactttaaaaaacaatgattggaaactggtttctataatagttaaagtgtgctgaaagcctgcttcaaattgataatcatatccttctgcttaatatatccccagatttctatgctgcttgtcttgttagagacctcatgtctttgtactccattgtttgtatagattcctttctttccactaacatttttaagttttggttgaagagttcagaagaaaggtatgccaattaaactgctttctaatggaagaaaagttgaaatttatgtggctttttgtgaacagttaaaatgattttcacctttaaatatatgttagcatcttcactatgaagaaaaaatactccaacaccgaaacacaaatttatagaggctaaagaaaaggaactctgttccaacagatgggttctaattttattttttagttcagacaacaccaaaacaaggacttacatatcaaaataaagactcatttattgagaaaactttcattctttacactgagttgattgaacaggaagatatatggaggtaaagctgtaagttgaaaagtaggacttactaagtcttaagttggccctgtctttctgtttgtttgtctatgaaaaacgatgactttgattgttatttttaactttcttaggcttccagaaccttcagcctcattgccaaatcctccatcaaaggtaagaagctgtgactaagatatctttgggggacttagaaaaatattacactcttaccacatgagtttagttggttctaatatattttaaggtgtactaaatccattttgcatggagtgatgccatgtggaataaagattgtactgggctctccatcactattttttatttttgtggattccacctgaatggtaaataaagtgccatgaaaacccaagaagagttggttttagcaaggtacccctgtgaaaatattaaagacatatagttaaaattaaatcttcctgcattagttagatcacttaattaaatttagtaatcactaagcatactctatatataactaaaactcattttgccaaatctaattgtcactggcacaaaggtgaacagaaaacaatttccataatacaaagaatcctttgagcaaagatgatcactttttttctgaatttgaaatgattgatgaatttacgtgtaatctttgttagtggaaaatcttttcctcattcattctcaggctgctacccacagctcctctgcagctggtatgtttatctcctagatccagagaatggagaagccaatcataaaccacacctgactgcaaattgcagcgttccttcagcccaggccagatctcagatgagttaaactctgctccaagacagggaaataaacatgtgcaccagcttgtcagtgaggtcatttcttcagccagcaaagtaacggatgccttgagaatgtaaaatggacatattgtggatgttacaaactttccttctcccttgcattgttttcttggccttcaaggtagctaaaatgctcataattttttatgtcattccctgtataaaggtggtggtggctccaaagacattgtccttagaaaaggacagaaaattgaaagtacagcagtgtttgtttgggcctatgttcagcatgttgtcaaaaaaaaatgcatgttttactctcttggagaatagcactgggcagaagtctgttgctgtaagatctaaggactgctctaggccagacccatgcgtctttcattccggtagttaatctctgacagtagctctagaggacctagagaggcacagttgtcttgctgaaactaagagggtaggttctcagcgtgcttcttatttttcttcatccaaaaatgaagcagatttttttctcccaaatatctatcttccttagtaacttagagatcattcatgaattgatctaaacctattcttgaaagctttaaccttggataccttttggagtaatatgtttcataactttattcttctctgctcctgatttctgttttcttattttaattttcagaatttaagttgtttgtgacttcatcatttatgatttagatcagagatcagcaaaccttttcttctaaagccagacagtaaatattttaggctccatgaagcagatggactctattgcagctactcaactctgctgttgtattgtgaaaacagccacagataatacataaacgaatgagcatggctgtgttccagtaaaacttcatttataaaagcaggcagccagctggatttggcccctgggccatcatttgccaagccctgattttgattttggcatcttgctcttcctaaaccccagccttgtcttctatattatttgagttgcttttcgaggtcttctactctgtgtctttctggggttccagtgtacacatgacaaactatactagacgatgtaccatcgtttaaacaagcgtagaacatatcttctgctagctttcctgtctgtatccaggatttgattgatttttacagtaatatagttgactgtttccaggaaatatattccagtagtcattaggtatctttgtatctatgttgtaatcgatagcgtggagcctgtcatctttaatatgttttatattattttcctttactatcatatgtctgcctttgttgaaactcagcttccaaccctcacttgctccagtcttttcaatttgtcactgtcagcaagcagagttgaatgcaaccagtgggtttggagatgttcccgagttccttcttgcaaatcatttgtaagaaggcctaacattatccctgtggtactctgcagtttgttctctttccagaactgtatccatttagtcatagcctttgttactgtctttctgagccacttctctgctgaaacaatctcccaaatccatagggatttggtcttttaaataacaaaaattttagtaaatgcttcaatcatctttttttccaatatattcaacagtgcactgggaataacatacaaactagttatatgtagaggctaccacaatcattttctttttttaaacacttgtaactggtatcttgttttgttgtgagctattaaaacacctgaacaagtcatttctccaattaaacattttatgtccatacaaaagtacctttcatcttaagttcttgtaatgaacactttttatttgaattatcaatgaaaagtgaacctcatcagttcagtggcacacacttgtagtcttagctactcaggaggctaaggcagaaggtcgcttgagcccaggagttcaaggctgtagtatatgatgatcgcaactatgaatagccaccgcactccagcctgggcaacacagtgaaaccctgtctctaaagaaaaaaagggaataatgtctaagtgtttataatgacatctgtgttaggaacattttgccatagagaaggaacacaagcatcctcataacttcaagctttttgtgttttgaaaatattttggccttcagcattattagctgtgagtttcaccctcctagctgaagatacctttctagtaaaaaatgtgcatcacctaaacaccctttgctgtcttaatttaaatagaaacatgtatttttttttttgagacagagtcttgccgtgtcatctaggctggagtgcagtggcacaatctcagcttactgcagtctctgcttctcaggttcaagcaattcttgtgcctcagtctccggagtagctgggactacaggcacatgccaccatgcgcagctaatttttatatttttattagagatggggttttgccatgttggccaggctgatctccaactcctggcctcaagtgaccgcccacctcggcctcccaaagtgctgggattacaggcatgagtcactgcaccaagctgaaacatatattcttaacaaagttgcaaatatacattcacttggtgctgataggtggttcatttgtgatggattagtctttttcttttaatgattcatttgctagaggttgctgtgtggccaagaggttttcctatagtgtgtggtatattcccaggatgagcctctgtttttttacagcaaacaattttaagacatggtgttttatcctcttgggttatgggataaaacaccatgggctgtggaatcttttagcaccaactctacccgttctttgtttagcaaagcaggggcatgaagaatgaagctgggaagaagtctgtttcctaggttagatccatgttgggtctggtcaacctggtgtctccataaacagcctgaaaattataaaaatctgggttgtgatcaccatgcagtcaattctccatgttcaacagcaagacttgtcttccctgcttttgtaccttttacataataagtgtggcatgatttcttctatattgtgatcattaaggccttgacaagattctcacattcactggtgtaaaatgttcatgtgaaaggagaaaatattaagtaaaggtctgacttagttgcattgggcctaatggaaagaacactgtatcagaattgaaatcttggccaaagtcctctacttggtgaccttaagctattcatttagcctctctgtgcttccctctcttactggctgcttgcttgtgcaaggttgttcttgcatggataaagtaagataaatattgtcccttcattcataagtggacattaaactggcccaggaggtaaatgaaatagggattctggctggacacctggcccccttcaagagactattctcattttgacttctgtgccttgcattcatctggtaattagcaatcccctcatgcccaccacacctggcacctacaaagcctgtgtttgctggaccagctaaggggctcagccatgtacttacccaatcatatccaccatcaccaaggctgcttcttaggagtgatgtgtggctcaattccctagatgattggcaaaatgtaaaggagcctgtaaaaagtaagccctttgctgggtctgctgtcccattcgcctctgtagaggtctaaattatacatgttgggtttttttttaatggattgatgttgtgtcaaagtgacatttgacaccacttcactgctctaatgttgcagaaaataaagttatcagatgagcctgtagaagcaaaagaagattacactaagtttaatactaaagatttgaagactgaaaaggtatgtgggttcaggtgtagtggtgtttcgttcatactcagtgcgtgatgtgcatgaatacatgaggaacagttgcacgcttgattgtgattacagttttgaccaggaagaattattaacttgcatttctgtgacttaataattaagaattgcatatgacaatgaaaatgttaagcaactaagacttattattagtcagagaaaaacaatatactacttatcaagagtgtgcctaaattttgctatgtattcatagagtgatagggtgggaaaggagggaggaagctctacaggtaattttttgtcaaccctgctgcccagaagcagaaattatgatgataaaaattaataatttcaccattcagcattcaccctggcaaatggcattttggtaacagtccttacttagttttatacatgcattataaatacatatgtggcctttaacattggcattataatactcagttctgggctttttatttaacattaaattgtgaaaatgttcacatatcattaaacattctttgaaaaaatattcatgtttttatgatattcagtcatgggtgtttgtttcaccatatggaatgtaatttaatcatttccctatatttggacatataggttacttctgatttttttattttttgtttttattgaagtgatagacattcttatttacagtctgtatctccaatcatttcattagacacaattttgaactaagactaagagcttggagaacatgaattctttcataattgaaatatatatagctaaagtgcttttcaaaaatggagaaagttgtgcttccaaacattattgccaatgagtatttatcttgcatttttgacgacattgagtattgcttttattcttgaacattgttgcctgtcaaattaggctacatttctttaactagaaaggttctttttccaaatgcttatggcccatttgcatttttgcaaattgttggttcctgtcgcttgcctgtttttatgttgagatagtaatgtttctctgttgctttgtatgagctcattctaaattaaggctattaacacttttcatgaaatataggatacaaacttgttttaactttttcatttgattttttaacagtgttaaatttttctgagtgttaagtacagaaattgtttccctttatgatttttccattgtttttatgcttaggaaggccttgcccatctcaagataagttaactttcacttagattttaaaaatactaactgccctttgagtttaatgttttttagaactgttattcttgaatcaatatgtaatttatttgggcatatgatactgaggatagttcgatttaagatctgcccaaatagcgagttatctcgatgctgtgtcaacagggacattgtcagtttctctgagagaaatctttgtgccccgcccttctgtgggagtgccacttattgtatccacttgggcacagcatggagaatgtcttaaatgcaccagataagtctgaaacagactgttgctttgcaccattgagtcaaaaataagcctactaaattataagtgacagaatgtgaaaagcagaattgtgggaatcatatactgtgcctctaaaaaatactttatcaatgactttgtcttacagttcccagggagacaggtgatttttttgttttctgattcccatcatttatgcttcttctgaacaatttgtggtgcatctgcatcaaagttaaatcagctgctatttaccttctgcaagtgctttatataagacatggaagaaaaaaattcagtgaccagagagagatagaaatgtacagggcagaattatttggagtcagctttttggaaagtattgctttgttggaggaaaaataaggcagctatcctgctggtctgggatgctttgcaacacaagtcatcttttgaatatcatagggttgtccttggtttcccatggagcaaatgaataaaatcagatggtaaattggtgtgaattattcatcatgtggtaatacaaggctgtaattcctacctctgacaattgcggcctgtgtcagttccattgtttgtgttattgtactttatgcaccctccagaattatctaccccctccccagtgtaaaccattggttggaacattctgcttcttagaaggcagcagttttgtcttctgcctcttttaacatattctgtctcttaggtctgaattctgaatagaaatcagaactttttcactcccttatgaagcatgttagtgggggatgcttaccttccttaatgaaacttgagacatgcagtcttctttgatttccatatatgattaataaatgttacattcataacaatttttctctcttattttcattaacagaaaaatagcaaaatgactgcagctcagaaggctttggctaaagttgacaagagtggaatgaaaagtattgataccttttttggggtaaaaaataaaaaaaaaattggaaaggtttgaaactttgaaaataaaatctagcaaaaatatttgctttttacatgtttcagtttgtccttcctgactgttaatgactacctttggttgggggaaggaagaggccaatttcatgttctcttaaacatttctttgcatttggtttttgtgttcctgaacaaaatatgggaaagtgtctaacttcatggctatggccttttggagtctcatctgacataatgaaaagtaatcacttgaagagaattaacatatagcatcatgattttctcaataaactgatgtgtgacaatgttagagtgtatgactgctttttaatgcaactttgcattcagtaggtttagtaataatattttcaatatactgagagaaactggattacaaaactgtgaggtaaattgttactttaaaaaggctttagtttttggtaaattttttttttttttttttgacacggagtctcgctgtcacccaggctggagtgcagtggcgcgatctcggctcactttttagaaaatagagaaaataataagaacttcaatctcccatttcttcattacccagagataatgtattgtcttataataatttttagaaaggaattacagttactttgtaaccttttttttttttcaacttttattttagactcagggggtacatatgcaggtttgttacagaaggatactgtgtgatgctgaggtttgggatgtaattgaacctgtcacccaggtagtgagcatagtacccaatgggtaatttttcaagccttgctctcccactcttcctccccttgaagtccccagtgtctattattgccatctttaagtccatttgtacccaatgtttagctcttacttataagtgagaacatgtggtatttggttttctggtttttttgcattaattcgctcaggataatggcctccagctgcatccattttgctgcaaaggacatgatttcattctcttttatggctgtgtagtattccatggtgtatatatgccatgttttctttatccattccactgttgatgggctcctgggttgatcccatatctttgctattgtaaggagtgctgtgatgaacatacaggtgcatgtatctttttggtagaataatttattttcctttgagtacatagccaatagtggccaatagtgggatttctggatcgaatggtagttctgtttttagttctttgagaattcttcaaactgctttccatagtggctgaactaatttacattctcaccaaaagtgttcccttttctctgcagccctgccaacatcatctgttatttttttacttttaaataatacctgctctgactggtaggagatggtatctcattgtggttttcatttgctttgctctgatgattagtgatgatgggcgttttttaatatgtttgtgatcacttgtatgtcttcttttgagaagtgtctgtttatgtcttttgcctaccttttaatggggttatttgtatcttattgatttgtgtaagttccttatagattctggatgttagtcttttgtcagttgcatagtttctctcactctaggttgtctgtttactctgttgatactttattttgctgtgcagaagctctttagtttaataaggcccccacttgtcaatttttatttttgttgcaattgcttttgagcacttagtcataaattgtttgccaaggctgatgttgagaagggtatttcctaggttttcttctaggatttttatagcttgaggtcttacagttaattctttaatccatctttagttaatttttgtatatggtgataggtaggagtccagttttattcctctgcatatggctggtcagttatcccagcatcatttattgaacagggagtcctttccccattgcttatttttgttgactttgttggagatcagatagctataggtgtgtggctttatttctgggttctctattctctttctttggcctatgtgtctgtttttgtatcagtactatattgtcttgattactgtagccttgtagtatagtttgcagttgggtaatgtgatacctctggctttgttctttttgcttaggattgctttggctatccaagcttttttttggttccatatgaattttagaatagttattttctaattctgtgaaaaatcacagtagttacctttttataaacattattttgttactattttcccagactactaactgttcttcataaatatgttttttaatgacagtataatttttgattatttggatatttgattatttaataaccatgatcctgtttggacatttggattattcacaaatgttcactatttgaagaatcagattataagtaaatatttgtccacatattttattgtttccttataatggatttttggatgtgggcttattggattttcaaatatatatttatgggaatatatttcatggaaagtttataagcttttgcactctaggcttattttaatggtcttgcactctaacaaacagtgggtgtgaaagcttaatgccaccttgttagcattggttgttacctttggaaataagtgtaaaaacattttattgtggttttaattcatatttccctgattagtagtgattttgaacattttttcatacttactaatcaattgtcatcttatagagaattgtcttttatattctttgctaaattattagagtatcaatatttttcttattgactaaaagtattctataacttaaggacattaattatttctactgtgtttgttgtaaatttcctttcttggtttatactttgcctttaattttgcctatgatttttgacatgcaggtgtttttagtttttatgtagacatatatacataaacttttcctttacacagatattgtacttagaaagatatttcattttacaggaaatttaaccagacacttttattttcttctgatttttttaatagttatgtttttggttcttttttgttttttttttagatggagtttcgctcttgttgcccaggctggagtacaatggcgtgatctcagctcaccacaacctccgccttcagggttcaagtgattctcctgcctcagcctcccgagtagctgagattacaggcatgtgccaccacgcccagctaattttgtatttttagtagagacggggtttctccatgttggtcaggctagtcttgaactcccaacctcaggtgatccatccgccttggcctcccaaagtgctgggattacaggcgtgagccaccacgcctggcctatttttgttttatatttaattacttaaatcatctagagaatgtgtaattatgtttaaatatgctgtgaggtaaagctgtaatttaattattttctcaccagtttagtttttcatttaatctgtaggattattttgtcaagttctaagagtaagttccaatgggatttttactgagattttgttagatgcataacttactttgggaaaacaaacatctttacaaacttaaatattcttatttgggaatatagtatttctttttagttactcaagtcttaagaatacctttcactaatgttcggttcttcatcttcaataggttctagacatatctttgtatgagtatgtgtagatattttcattgctattaatgaaatctgtttttttccagctaggtctaccaactggtcattttgtggtaaagttttatatttttatatatttatcttttaaataaccagtttactaaactattaatggaaaaattttccattttatttattttgggttttagtacataatatagtatgtaatttagtttttaaaaattgcatgcaattctttctaatagttacacctcttttattatatattttacattatattacatgggctagaatatccagaacagtattaaagagtaataatagccgtctttgtctaattggtgattttattgatgtgctttaccattaattctgacactagctgttgctaatatgataaagactatccatccttttatacttagtttccttaaggtttaaattaataattggtgttggttgttatcagaaagctttttggcatctattgaggtgtctataaagtttttactacttactatcaaactgtacccaaatgtctaataaactcaccctggcagtagataaaggatcaatagcataatggatacatcctatctttcttaacctttgtcaaatatagttttcaattagactttctacacttttattaaggaattttgcagacatattcataagcaatgctgctgttaggctttagcgttagaattaggctagctttccattttttccaatgttctggaaggattcattttgcattattatattctattgctggaaaatgtttaagaatcttagaggtaaaactatctagcactggagcctttttgttgttatagttttctttaatctgcaagagtttctcatctgttctttgtcttacttgacatttttgagtacagggtaaatatttgctggaatatttcttattctaatatttctttttgattaaattcaagtcatactcttagggcacctccaggagtaatatgtctttctcagtacaccatggcaggaatcacagtctatcccaatatcagtgttgttgactttgatcacttgattaaggtgctgcctacagttttcattgtgaattattgttgattatttttataattaataagtaatttgtgggtaagtattctgggactttgtaagtatcctatttcttatcggatgtttgcccactatttttaggatctgatgattttctaactttcatttcttctatatttatcagttggcattcttctgtaaggaagaactttcccttttccttgcttcttccctcatttatgaattcttaacagtatggatttatagatttttattttatccagtgggctatattgcattattattattaattttaatgctcatgttgtttcagaagagctagtgggagacccttcaagctgacttgtgtatcttttgggtatgtttctatcattctttaatacattcctgcttctgcgactggagtttcagcctcttgtcctgtgcaagccctgaatccacctttttttcaaagaaccctggttcctttcagtgaagaatggtatttagaaaccaagatctaggcagtaggtatgctcattgctattggtatgtcattgcttaggagccaaagctaggaaatgtgtgtgtgtgtacaacatgtacacacacatatatacactatatactcgtatcaacatttctaaatctatccatgtatctatcagtatttatctatgtgtgtggttttttgtagattccctttatcaggctgagaaagtttccttctgttcctagttcactgagagtttttatcatatataggtatttatcatatgtggatattgtcaaataatttgtatctactgagatgatcaagtagttttctttttaatagaggaatgtcttttaatatatgaattataatgattgatttttgaatgttaaactaattttgcattcttgagataatccctacttggtcacagtatattattctttttatatgtagtatggggtttttttcctaatattttgttaagtacttttttgtatctctgttcatgagggatattggtctgtggttttctttacttgtaatgattttgtctgattttgatgtcagagtaaaactgggcttataaaatgagttgggaagtattctttcatcacttattttctgaaagagtttgtgtgaggttggtgttgttgcttccttatatgtcggacacaattcaccagtgaagccatttggacctggaattttctttgggggaaacttttaaattactaattcaatttctataatagatgaagagctattctaattttctttttttttcttgtgccagttttggtaatttatgtctttcaagaaatgtatccatttgatctaggttgtcaaatttattggcataagttgttcatcacatttttattatccttttaatgtctgtggatctgtagtgatattccctttttcatacctgatgttggtcatctgtgtcttctttttgctttctctgttagtatagctaaaggtttgtcaatttcattgatcctttcaaagaatcattgtcttctggcttgcataatctctgatgagacatctatgatatttcttatatttcttctcctttacataatgtgtctcctcctcatgggttcttttaagattttcttctttattactagttttcagcaagttgactatgatgtgttgatgtggttttctttttgtttatctcatttgggagtgtattaagctccttgaacttttgagtttttaattttcatcaaatatggaaaatttctggccaatatttctttaaatacctttttccattctttcctcccttttctccctatcccctcagcttctggcctccaatttcatgtatgctggaacacttggtattgtcctccaggtcctatcactgagtttctgttttgttggttgtttgtttttttatgttccatttttagacagtttctaggtgtatcttcaagtttactttgatttatagcatttcatcttctgttaaccttagttatttaatttttactttaaatattgtaattttatttatttatttatttatttttgagatggagtttcgctcttgttgcccaggctggagtgcaatggcacaatctcagctcgctgcaacttccgcctcccgggttcaagtgattcacctgcctcagcctcccaagtagctgggattacagtcatgcgtcaccagacctggctaattttgtatttttagtagagatggggtttctccatgttggtcaggctggtcttgaactcccgacctcaggtgatccgcccacctcagcctcccaaagtgctgggattacaggcctgagccaccacgcccggccttaaatattgtaatttttagttctagacgttccatttggttcttctttatgtcttcccgtatctgttcttattatgcttgcagttttctttaaatacttcaatatagttaaaatagctacttaaatgtcctcatttgctagttctattatctttgttattttctatcttctaggtctatttttctcctctctcttttactttattttgaaataattttatacttttctagaaaagtcacaaaaatagtagagtttagatatgatgttcacccagcttccctcagtattagcatacatgaccatactacaaagatcaaaaccagaaaatttaccttattgtactttcacctatctttccactaatacttttttaatttcagaattcagtctgtgatggtacattgcatttagctgccacatctcttcagtgttttctaatttgtaagagtcccggccgggtgcgttggctcacgcctgtaatcccagcactttgggaggccagggcgggcagatcacctgaggtcaggagtttgagataagcctgaccaacatggagaaaccccatctctactaaaaatacaaaacattagccagacatggtggcacatgcctgtaatcccagctactcgggaggctgaggcaggagaatcacttgaacccaggaggtggaggttgcagtgagccgagatcacaccactgcactccagtctgggcagtaagaggaaactccatctcaaaataaaaaaaagagtccctcaatattcctttgtctttcaatgaccttgacacttttgagagtagtagccagtttttttataaatgccccttaatttttgagatactttgaaactatgttaatatcctatttcttttacgatcatttcactatactactaactaataatactgacaaacactgtatagcatttatgtgcttggcattgatctaagcactttacatataataactcatttaatccctacaaaaattataatcatagagtgccatacgagccagaatagtgacacccacccaaagctcaaaagatgagaggaggagctgcttaaacacttgcattattatccctgttgaaagttagcttcttcacaataggaactctgtaccattcaagcttgtgtcttgcacggtgccgagcacacagtatgcaattggtaaaggatgagtacatgatagtcagacaggttgaataatctcagcaatattctcactaattgagacttgattgttttttccagcaaagtcgagatctttatctacctttaaagtgcctaagctgttttctgggtttcttttgggtccttgaatatgccaagctgtttccacactggtgcctttgtatgactggtttgtctctatgtgcctttttctgaatcttcacaggactggctccatcttgttattatcacttatcttaatcacttttccagagacccaatccttgaccttcctcccctacccccacccagctcctactcagtactctccataccattttcctgccttactccctgcataggaccttgcctgactgcttcacatatagtcatgccccgcacagcaatggtttgattgatggcagactgcatatgcgatggtggtcccatgagactataacacagagctgaaaaattcctatcacctagtgagttgtagccatcataacgtaaggttgtagcacattgcattaccttttatatgtttaaataagtttagatatacaagtacttactattgttttacagttgcctacagtattcagtacactaacatgctatacaggtttgtaccccaggagcagtaggctgtaccatatagccaaggtgtgtagcagactacaccataggtctgtataagttgtataagtacactctgtgatgttcacacaacaacgaaattgcttagcaacacttttcccataacatatcccatcattaagcaacacatgactgtacatacacagcacctaacttggggttgcatacagtagaccttcaacagatgtttgttgcatgagagaattaaccaaccaaccaatccatcaatccatcctggacaccccagacaggtgttcagcaatacagtgttggagtccttgacagccttgtggctaaaccttgaacttcaagagtcgttctgagaatgagttttctgtgatgcattagtatttgaagtccaaggacttattcataaactcactcataaacttgtatgggccttaaatttgtgtgttaatgttgctggtaataaatgaaatagatacagtctttaatctctctggataaagggctgtgaattttcttctgtcagttgattgaactgcacttactggagtcattttacgtagcatttagagattatttatattaagcccgcaacctaaattattgcagtttgagaatatatgtggtttttataaactctttgtattcacagaggcttgaataggagctcatattatgatttagctacaaattatttgggaatttggtaaactggcaattttgttttcttgcctgtttcactttacctttgatgccaagttgaagatctcactggcaatgtacaacataactgagctgaataataattgaaaagtgaaaaacaaaaggtattacacataccaggtgccattttggggaataatattaggaataaatccatgtgggtttatagttatacataaaatgttcatatacacacataacacacataaacacacatatatacacataagtacacacaaacataaatgcatacccacatatggcacagatacagacttaaatctacatagcctgtcctttagaattctttaaggaatttcagactagagcctttttagactcttgtactaaacattaggatacgctagcctacttgaatcctttggccctttgcttctcttacttacatcatttttctctttgattaatgtgccaagtttgggaaagcttcacaacatttccacaaactgcaaaaccacttgggtacatagacaaaagcctccatctttttcatcaagccatatatttttttttttctgaaactgatcacaggttgccaacattcttttttatttctagtttatcttcaatttaaatttaccttgtagtctcagaccctgtcatctttcaaggtttgtgcttctcggttctgcactgccaaagagactctcctctgtaaggcttaaattggatgtcaagtggaattgtcttttgtttgttcgaatctgtttcatattgtgctgctgtccattcccaaaatcatatttctcttatttggggccttagcaagacacaaaggcaagctctaagtgagaacctaaagtgtacctgttttcttactaaatgtacagtgttgtttatattgtatgcaaacttctgacaacagtgaacaaatatcttaatctttaaaaatataaataaagtgaaaaaaggacttcacatcaaccatgtttcagtactaaacagactaattaatacaacatggcaggattgttcctggttgtagtctcagttccgccttaattctgtgagccatggaggaagtcattggcatctctggcccccagtcacttctcagcatgaaatgggactatatcatcaagattttttatgtctttccctccagccgctggtgcttggggagccatgtctcctttacacctgggaggaaagtgcttttagagttatctttcatgcagtgcttaccatgcactaggcactcccctaaactctttagatgaaccagctcatgtgttttgctggaagaaagtctggaagaaaatacaacaaaatgctcatactgggttttggggtgcccatgatatgtgtatatgtatatttcttttcttcatttttcaaagattatttcactttgccatagaaagaaatacaaagaacacaattgttggaaagtaataacaaagactggcaaagcgcattgtgatttttaaagcaactttgacatgaatttatgtgtttaatctttccaggagccatatggcacaaagggtattatttctcttgttttgcagttgaacaagggaaggtcagctcatttccccaacatcacacagctaatgagtaactgagccagaacttgaattcaggacctctcacatccagactctaccacatcaaattccctttccccagtggctctaactttgactctgttacatcctagaacatcacctctttaccagatatgaaagacaaccttttcacatagtttaggagttgactttctctgttcttaaagctgatctaacttgactagctgccttgtattacatattttctcccaaacacccctttctctaggacgaatccaaaatttggcaatcttgggagttagctatgtcatagtcagatctcttggaagacaaagagctccaggtctagagaagcaagtgggagggtgttttccaagtgtacttagaaaatgtttatgagctttgtcctcatctgaataatcagaagatatgatttgatttttacaccttggtatacacttggagattacacagtcctgaggtttatatattcctcagagccattagactgaccaaaagggttcgtccctgtgtttcatagtatttttacagttctcacagcaatcacttatcagtatttaaattgaccttagctgggcacagtcactcacttctgtaatcccagtactttgggaagctgaggccagaagtttaagtccagcctggacaacatagcaagactgtttctacaaaaaaaaaaataaaaaattagccaggtgtggtggcacacacctgtaattctagctacttgggaggctgaggagggagaattgcttgaggctaggaattcaaggttacagtggactatgattataacactccacttcagcttgggtgacagagcaagaccctgtctcttaaaaaagtaaaataaaataaattaatctttacaacaaccctccaaggtagaccagaaagaggtggtatccttattttattgatggtctgtgtgaggtcatacagacagtaggtggccaagcccagatgccaagcctaagcctcgttccttttgtttacccaaggttcctattcataccattatatgaccatttagccttaaataatctgttttaattgcaaattttattttaagaaaggaaaaaaatcacatttattctgctgcatcttcttgctttattcataatgaattctgcaggtcaatttatcctcaacgatggcaagccagaatttaagtaaagcttctacttagctggtacatttgcatgtcaaatctttaattcagctgtcagtgttttagcatttactgtactttcattaataaatgttattttgatggtctcaggctaatcaagactatttgaaatgggggacggcaccaaatgaaatttacagagaaatcagagcttcttcatggactttaaaataattgttactttacacgtgtttgaaatcagaatacttgtaaaattaaagttagacatgttgttcttgcataaacaagcaaaagaagctaaggaatcaacttagatttatttgttcctttaagagcatgtactgagcacctgctgtgtgctagacatgttgtagatagaggaaatgcggatatcaacatggcaggcaaaaataacctgccctcaagaatttccattctagagcgagtagacagatgatatctcagatagtgccagggcctatggaaaaagctgaccaggcagggcactgaattctggggagtgggtggtcagggaaggccttgcttccttctcatccacattctggcatagaagtttgatttccatgtacatgtttttttttgtaacatatagctccagaatacgttatttttaactttgcactcaataaaaaatcaacttgtagtaattaaacttgttcagtacattcttcacagggacattaggtgctactacttctatcagcaacaagtatatgcttatctattttttatacattggagtctacacaaggcttcctgctttttataaaaggaactgcctctacaaaaaaaaaaaaaaaagaaaaatggtttaagaattactcatctcagaacgttactttcgtgcatttcttgtattttattttttttcctataagatggtgcccatcctgtaagtttgggccaccccaacattatatttcactccctttgaacattcaaagaaaaacatacttcttggtgtgctctcgaggagcctgctatgaaccctagaatgagatctcggaggctggccacgatgggaaccccttcctgtgtctgaggtcatctcttagaagcgaaaatgctcagctgccctcaggactaaacccgccagccctgcgttctgttctaggagctgcagatggtgcttggggtttcaggtgactgtttctcctcaccaggacacaccacatgttttcctttcctctctagatggcagcacaaagacagaaaaggggcaagtgatggtggtggctccacgcaaggcttggcggttttccctgcaacttcagacactcccagaggactcggactttttcttctgcacttttttggaaaatcgccaggtgccaaaaggtgcattttaaagcgctgactgtaaatgctttatttctttgattagtaccactagtctatgtgggcagcggcattcctccctggagcactcagctaggcggttccgtccaggagcttgaaagcatcccagcggtgcacctgttcagtctgaggacctcaagcttgggtcaggccagcatgttttaggtatggatgtggtgacttaaagtacttgattgtcttgatttcaccctgaaagctttggcaaaccaagtttcaacccttactttaaaaatctgacactgctttactccatatcaatttggaagcttctaattcataaatatacctaaacgttggcattttatctctccaggagttattaaacatttcttcctttttagaagatttgtccagtatgtgtattattttatttttcagagtaaggacataggagatgacggaaggttggaagtagatgccaaaaagtgatttggtggggaatctggtgcgtagtgcatatgttttagcaggtagtgggaggttttgtgcaaaaatgtctgtggatttgagctggcttgtccacttgacatgcaagaggaatgtgtgggtgctgctcagctgatcttcccgcattcacacaggaccccaatctgcttcttcaggaaataattttgtttctgaatctctgactacaaggagtattaataattagatcctagttctgggaagtagtctgccacttttccacacctcccttcacatgtagaaatttttgttaacctcaaaggactttaaaaattcctgcccttctgtagtggaaaagtgaatcttccctctgcaaaaaccaaagccactagatattgataatgtccaagtttgtcactagaaaccctgctgtcttacctgtgccccaagtttctgttccaacactttaaattcaaacacctaacattacaagatttcattgggttgttttttttcttttcacaagtaattcatgatacattctcacaaaaagagaaggcagaagtgatccccacctcccactgccagcactactcaggctcccctgggtgactgcatccttgaccctgaatcaagcatgtttcttagttatccagtttcccacttccagtttctatcttttgccttgcagcccgagcagccctacagtcactgttcatgcaatccatttcatcgtttcatctaagaatccaatcctattgagctctccttcagaaatacctcatgggaaaattaaaattaagacaaatcaagaaatagaaaactccagcacttgaataagcccttttctctctttttttttttttttttttttttttttggagacagagtcttgctctgttgcccagattggagtacggtggtgcaatcttggctcactgcagcctctgcctccaggttcaagcgattcttctgcctcagcctcccaagtagctgggattacaggcacgcaccaccacgcctggctaatttttttaaaaattatttttagtagagacggggtttcaccatgttagccaggctggtctcgaactcctgaccgcaagtgatctacccacttcagtctcccaaagtgctgggattacaggcgtgagccaccgtgcccggctagccctttcttcttcatgcccactgccaccaagcataaggctgttctcttgagggcagagaccatatgggccatgtatcaaatagagacaaacccgcggtgctaagaacaccaagatagcactgagcatgccgcatgtatcccccactcagcgcatgagtcactgacacacaaggtgacatactccttccctatcaagttgtcaaggacttttagaaaacagccatgctcagagctagagaggaggtgggaagtgggccttgctggtaagaatagaaaatggtacaacttttggagaccaacttggaaataaatatgaaaagcctgaatttgttgcattttctttgtttcagcaatatccattgttagaaatacagccttaggaaataatcatgaatatgtgcaaagatttagctacaagaatattcactgtggttctgtttaaatagtaagtaattggaaaaaaactaaattagaaggctgaaattattttttaaacttttttactgggctgtgtgtggtggctcttgcctgtaattccagcactttgggaggccaaggtgagaggatcacatgtgcctaggagtttgagaccagcctgggcaacatagtgagacccccatctctagaaaaaataaaaattaaaagaaaaattagctggtcatggtggcatgtgcttatagtctcaggtacttgggaggttgaggtggaagaatggtttgagtctgggaggtcgaggctgcgatgagctattgatcacaccactgcactccagcctaggtaacagagcgagactctgcctcaaaaaaaaaaaaaaaaaaaaaaaaaaaacaacaacaaaaaacaaatttgtactgcaagtataagtaatatctctttttctctctctttccccacttccttctttccttcttttctctcctttttttcctttctccttgtctcccttttttagaaatttttctagataaacatgttactattatgctaatacaaaaataaaactactcagttggttattttataccattagtccctcataattttcctctccagattataatctcttttaaaatttttgtgtctcatttagtaagtttcttggaggaagaaccatactatatatgtttcgcagttttttgcttagcattcaagtagatcttagcaaatcctaccagtatcaaataattgcccttcttctatccccacacctttagagtttcaggtctctactatccgattccttgacttcccaacccagtcaaagatacatgatttgcttggaattgtgtgtttggggcatgtacacacatgctgaaattaattaattttgctttgaagatttcctaagagccctagaaataattgcaaatgctctgcagtatatcacaaccaggactgataattactgtttctgtctacaaaactaaggggagagagaaaaacatactactgaatgagcagaacacagaagccagtgaatgtttcacacttggtgacgtgcagtttttgctgtttttttgccctagcagattgtaaccaaattgctcaacttcacagaaataactgtagagactcaatttctgaatgctcgtaattggcttttcaaaagaactttatagggataaattaattgctactatacttttaatggttttaaagttacttaggccacttctagaaatatgtaaaattgtatgatcctaacttaatgtttcatttctccctcagtttttatgtgatttgataatataatgaagggaactataaaaatttgatattgttggggcctttttagaaaattgagatacatttttctttgtatcattgttgctaaaagaggttaaatattgctacttattacctaggagaaagaacagcattttgtggcaaaataagtaggttataccgaatttgacagacttctctcctgaccgattttggagcacatatcttcatgtgccttgtaaaactagagatgcattcagttttcaatgttcccagatatattttaccactctatttttcccatatagcatctcaataaactgctgtttcataaaactcctttggtacttttccttgcaccttctttagtcactttatagcaagaatgttatccacaatatttaacataaataaaatagcacagcacagaccgtagaacaatctagccagattgccagtcttgtagtactgatgccctcccctgcatatcacccaagctttaacctaaaaattaaggcaggaaagccttccagatgaatcctgttctggaatcctatccatctaggaacccttgggtgtgtgtttattgtttgggttttgtgttgttttacatttgtttgttcacttgttcatgcttacatcatttcgatccatcatgatacagctgttaagaacttaatatcaccagcctttggaaaacccagttctatttgattaaatgttatctatgaaggtattaaatattttttctagaaggttatccaggctgaataccaccttttcattactatttcaacgtctcaagactcaactactccacaaatgtagacctccatccagacttcccatctgagctccgtgcttgaatgtctagtggtcttttgacatcacagtcacacttgagtatcttaaggactatctcaactcatgatcttctccttgattgaaaaagaagaaggaataaagggaaggaaaaagaaaaaggagggagggacgtagggaggaaggaagggagggaaggagggagggaaggaaggaaaggaaagggagggaaggaaggaaggaaggaaagaaggaaggaaggaagaaaggaaggaaggaactaaggaaagaaggggaagaaaggaaaagaggaaaggaaggaaggagataagaaagaaaatagaaaaggaaataagagaaggaaagtgtttaaaaccaaacatggcggacagagtttttcctagctttacctgttgatacaagctgcaaatcttagagtcacccttgaccgcgtcgctattgtaaccttgataccccatgcatggtctttcagtttatcctgtaaaaatctcaccaagccagatgctttgctccattcctatcaccttcctgctggttcaaaccactgtcatctcccagagcacaactgtgtcctccctacctggaggaccagcatccaactctagaacccttctgtgcattctccatgcctttcaaacacaaagttcactatcatccctgcctctcccatgaccttgcacatacccagttccactctaaagttttcattgctctttggatgaagccccacatcatgacctgcaaggccttgcatgccacagctgaagcccttccctctgcagccacacttcctctgcagaccctcagtcgtgccatgcttactctggctatgtggcctttagctgtgctgtctcctcacctgaaatgatctgccagcttcctctggttacctaagtcctgatcttccctcagatctgatctaccatggtcagccacagggaagccttagaaaggctcccctgacccccagagcaggtcagatcttcccatcacagctgtcacgatgcccttgacctccccttcatggaactatcagagacaattttatatttgtaggcctaataatcacgttaatgtttatctcttggattacacagagcttcgtgaaggcagagaccatttaactaaccactaaccactcgtgcaaagagttaacacggcaagcctgagactgctatgcttagaacggcctgcttgcaaggttggcctttggctggcatctgggagcttgagtggtaaatggttccttacactagtatgagacgctgataggatcagaggggctggccgtgcctaaactgtgggtagaagcatgtgctttatgttgaacatgcaactttctttccgggggtcgggagtttcgtacacgccaagcagaggaagccacgtgaccagccccaacattagtcatggaatcggtaatggacttccctaggcagaattgttgcaagtgtggagctgcatttccatcgctgaggtgcaccccatgtgaccccacatgggagggagagagcataaggaatcctgtacgtggatttctgcagactctgcccatgtcttttttcctggcttggctgtgtatcctcaccacaccactgtcataagtcctagctgtgaacatggctatatgccaactcctgtgagtcttcattgcaaatactcaaacatgggggtgtcttggggactctcaactcaccatggtatccccagaatcttgctcagtatttgacatttaatgaattgcttaatacataattttttttaatgaaaatgaaaatgacctcagaggactaggactaagtctatcctgtggaaattctcaaaagaactaaggaattttatgatttatcaactatatcctaatgacccaaatagagaaggcacatctttccggaaaaggcagaataaaaaatgattcaggaaattttgcccggtcaaagcccatttgaattgttttctcatgaagatgaattttctgtatctgaagtggcagcagggcagagatgagccagcagctcctctcaggccctgatgttgttctgctggcttcaccatctctgccctctttactgtgtgtttagattgttggccagcctgtcacagagagtgacgcctcagcatcaggggagcaagagcttctcaatgttggctgcacattggaatcacctgggaagctttaagaactactgatgctgggccccactcctacagatgctgcaaataatcagtctgaggtatggtccaggcactgggattttaatttgcagcctcttctgacaccacactctcctttccttcctccccgacacatcccctttgacaatcagatttcacaaggtccatccttccaccaaagtgaattcttattttgtaaatgcttcttaaaatttctggtttctggttttcgaactcacagccaattagcaggcacactgataagaggaagaaataagaccttttgcctcaaccacatgagaagactggagcaactaagacaagcaagtggaactcgaaactatacaaatcaggactatggcggattgggtcactcctaaggacgtggctggggtgcagaacagagttcaggagatggtttttaataatgaccagtagtctacaccaccagttgcccactaagaaatacatgtgtcactttacatataagatgatgtgaattaactttattttgattatttgttaacagttcatcatcagtgatgaggaggtgtatgttatttcctatattgggaagctccttcctccactaaatgtaaatctatccatttgccattttttaaccgttctctagacaagacagcagaccatgagatgcaagagttgttaattggcagagctgtgatttatctttcctttgtaacacccagggagattgctcagggaatggaatctgtgtctagaagcagtgtgaggtaaggctattcatgtcttgaagtcagacagaggagtttggctttgaagggatggaaatgtaggttctcaaacagaataaagagccataaaaagggagctacagggttgccaggtgtagatgggaggctcttatggagaaggtggaactgagctggaatgaatgggattcaggcaggtgcagcccaaggcaaggcccaagggaaagaaaggaattgacaacaccttccctgtcttcagaatcagaagcagtgagaattcagcaaggaagtagtcttagctctttgggtttgaagaatctctttgggatataatttcactttttctctgcctggtgctagagtctaaagctggcagtggaaattccaagataagttgttcttagaaccataagggctggctaacaggccagtggggacacagcctagagggccagcagctatctgggggccctagggttggacaggcccaggcaaggtgagggcaaagtcaggtgacttcatttacccaggtgcaaagaaaggcgtcagccttcaaaggctttccattgttaacaagcagaccagaggcaactaatcactgaatggaaactgataattttgctgctcatttattttcccagttaatgcttttcttttttttttttttttttttttttgagacggagtctcgctctgtcgcccaggtcggactgcggactgcagtggcgcaatctcggctcactgcaagctccgcttcccgggttcacgccattctcctgcctcagcctcccgagtagctgggactacaggcgcccgccaccgcgcccggctaattttttgtatttttagtagagacggggtttcaccttgttagccaggatggtctcgatctcctgacctcatgatccacccgcctcggcctcccaaagtgctgggattacaggcgtgagccaccgcgcccggcccccagttaatgcttttcaacacaaccctttatatttccgaagaataaagacttgtaaaagagatgggggagttatggctgcagaaaactggcccttactttgctctgctgacagttttataaggccaaggaagttcaaaaagtaaaaagactttctaagcaattccacagaaattctaagcattttcaggaaacccatttttaactttaaaaaaatattaatacaagattagttgcagtgatttaattagtaaaccatgacagatggttaacatgcagcattttttttttaatgtgaacaaaatcaccagtttttttttcagtttgttttttcttattaatcttgggtaaagattccttgggtcttcaaagataactactcagtctactttttaaatggatagtttgtctgaataattttgttaaagctttagtaaatgaatgttgggagtgtaatttccagagtacaggctgaatgcaatgacccctaacacagcccagatctggtcaccatggactgatggcagagaggatccagatattttggttggattcatgattagagactaaatcagtatgatgcctatgaaaaggtctggtttttaaatatttgccatggagctagagtagaaggcagggtgacagaggcagcggtggctggagtgtaaccagcccatgaatctcaggcaggacaggcttgcatgcttctgtatatttctctaggagagaacactgggcttcaaggctagtctgttctgtcttcaggctctaggaatcttcttgtcaaaccccttcattggaaaaatggggcctagaaagattagatgactttcccaagtgataagctaagaaaataccccgaatgctttaaatccaccttgaggcttcaatgtctatgtgctctataaagtgaatcccatattgtttttctttaaaagattttcagaaatagctgccttttaccctttactcacactaaagttttgaaatactaatgtttctgatttgaagatggaggtgggaagttcatcctctatccccacctcccacccccaatctcttctttgaaatcatccaaagcaaaaggaaaataagaaatggaaaccaaaaaatcaattttcagcaaaactaggaggtattttaaactatgaacaacaaatagatggaaggactgcaaaaagcaggggagcttccaggagaaagaggaaggaagagttcatggctgtggaaatgagactgagtcagcaaaaatacatttgtaaacagagagggcagaggtgaggaataaagtctaagtcacatgtttatgacagaaggaaccagtatacacaccagaacagcaagaactctccaagacccaatttagttgtgaaatgaagaggtgatggagttaaaaaaaaaaaaatcacacatccacatcacatttgcaggaactatctatctcagtggcagagggaaagaagagagacgttgctttttaaaaatccccatagctacctgtctttattgatcagggagaaatagaactaaaacttgcatgcaaaaccctggtttataaagaaaattcctactaggctgggatgaggccctgtaaatatttggcccaaggaaaactcttgtgcctcaaagatgagaaaccaaaaagaacaaacccaagttatttcaaagatatgaaacataaaacaagaaaaaaaaagaccagaaaaagtaaatggcagataaagtgttgccaaagagcagataaaaatagtaaaaagcattttactacaaacataaaatacttaaacaattacctctatgaagtttgggcacaaagtagagagggaagaatcatggaagtcacagaaagacaagtgatgttgtttgagctggcgcactacagggtaggcatgggggaaaatgtaaaccatcaaagaaacaaagatgtgtttgaaggaagatagacaataataatagcacaagagctcagaggttaaaaataagaaaaccaagcaaaatgaaattgatttgggtacaggaaaggtttattaaacaggacaaaaaggtgagcaaaatactgattttttaaaacctggtgattgtagagttcaaaaaaacaagcttacttgtaaatattaatgcaaaaatattaaataaaatattaccaaatagactcaaacaattcattaaaagaataatacaatgtgacaaattggggtttattcataatataaagatggttcaatattaagaagtcttaccatattagttatctaagaaagaaataaggtattattaatctccttagatacttaaaagatacttggtagcacttcttcttgtcgccatg

SEQ ID NO: 3296 - DNA, 1663 bp, Homo sapiens
agaccatggagggccgctgggtgcagccacagagcgcggggccccggcgaccccgccccgctccgcgtcactcggcgccctgcggcgcgcgatgagcacctaccactagcggagccgcgagggagaggccgcggccccttcccgttgcctgcggccaccggccggcattcagagcccctcgcctggcgctaaatttaaaaacgtaacacgagcagcaggctggtctcggaaacgaaacgaaattcggtccctgggcctcctcccgggcgctgccggtccctcagcgcgccgcgccacccggaacagacccttctcccgccattttcggcggggctgggagactgaggcccgcggcgctgagcctgcggcgccccggaagaggcgggcggcatggccgctggcgtggactgcggggacggggttggcgcccggcagcacgtgttcctggtttcagaatatttaaaagatgcttcaaagaagatgaaaaatgggctaatgtttgtaaaactggttaacccctgttcaggagaaggagccatttacttgttcaatatgtgtctacagcagctgtttgaagtaaaagttttcaaggaaaaacaccattcttggtttataaatcaatcagttcaatcaggaggtcttctccattttgccacacctgtggatcctctatttctgcttctccactacctcataaaggctgataaggaggggaagtttcagccccttgatcaagttgtggtggataacgtgtttccaaattgcatcttgttgctgaaacttcctggacttgagaagttacttcatcatgtgacagaggaaaaaggtaatccagaaatagacaacaagaaatattacaagtacagcaaagagaagacattaaagtggctggaaaaaaaggttaatcaaactgtggcagcattaaaaaccaataatgtgaatgtcagttcccgggtacagtcaactgcatttttctctggtgaccaagcttccactgacaaggaagaggattatattcgttatgcccatggtctgatatctgactacatccctaaagaattaagtgatgacttatctaaatacttaaagcttccagaaccttcagcctcattgccaaatcctccatcaaagatggcagcacaaagacagaaaaggggcaagtgatggtggtggctccacgcaaggcttggcggttttccctgcaacttcagacactcccagaggactcggactttttcttctgcacttttttggaaaatcgccaggtgccaaaaggtgcattttaaagcgctgactgtaaatgctttatttctttgattagtaccactagtctatgtgggcagcggcattcctccctggagcactcagctaggcggttccgtccaggagcttgaaagcatcccagcggtgcacctgttcagtctgaggacctcaagcttgggtcaggccagcatgttttaggtatggatgtggtgacttaaagtacttgattgtcttgatttcaccctgaaagctttggcaaaccaagtttcaacccttactttaaaaatctgacactgctttactccatatcaatttggaagcttctaattcataaatatacctaaacgttggcattttatctctccaggagttattaaacatttcttcctttttagaagat

SEQ ID NO: 3297 - protein, 257 aa, Homo sapiens
MAAGVDCGDGVGARQHVFLVSEYLKDASKKMKNGLMFVKLVNPCSGEGAIYLFNMCLQQLFEVKVFKEKHHSWFINQSVQSGGLLHFATPVDPLFLLLHYLIKADKEGKFQPLDQVVVDNVFPNCILLLKLPGLEKLLHHVTEEKGNPEIDNKKYYKYSKEKTLKWLEKKVNQTVAALKTNNVNVSSRVQSTAFFSGDQASTDKEEDYIRYAHGLISDYIPKELSDDLSKYLKLPEPSASLPNPPSKMAAQRQKRGK

SEQ ID NO: 3298 - DNA, 1619 bp, Homo sapiens
agaccatggagggccgctgggtgcagccacagagcgcggggccccggcgaccccgccccgctccgcgtcactcggcgccctgcggcgcgcgatgagcacctaccactagcggagccgcgagggagaggccgcggccccttcccgttgcctgcggccaccggccggcattcagagcccctcgcctggcgctaaatttaaaaacgtaacacgagcagcaggctggtctcggaaacgaaacgaaattcggtccctgggcctcctcccgggcgctgccggtccctcagcgcgccgcgccacccggaacagacccttctcccgccattttcggcggggctgggagactgaggcccgcggcgctgagcctgcggcgccccggaagaggcgggcggcatggccgctggcgtggactgcggggacggggttggcgcccggcagcacgtgttcctggtttcagaatatttaaaagatgcttcaaagaagatgaaaaatgggctaatgtttgtaaaactggttaacccctgttcaggagaaggagccatttacttgttcaatatgtgtctacagcagctgtttgaagtaaaagttttcaaggaaaaacaccattcttggtttataaatcaatcagttcaatcaggaggtcttctccattttgccacacctgtggatcctctatttctgcttctccactacctcataaaggctgataaggaggggaagtttcagccccttgatcaagttgtggtggataacgtgtttccaaattgcatcttgttgctgaaacttcctggacttgagaagttacttcatcatgtgacagaggaaaaaggtaatccagaaatagacaacaagaaatattacaagtacagcaaagagaagacattaaagtggctggaaaaaaaggttaatcaaactgtggcagcattaaaaaccaataatgtgaatgtcagttcccgggtacagtcaactgcatttttctctggtgaccaagcttccactgacaaggaagaggattatattcgttatgcccatggtctgatatctgactacatccctaaagaattaagtgatgacttatctaaatacttaaagcttccagaaccttcagcctcattgccaaatcctccatcaaagaaaataaagttatcagatgagcctgtagaagcaaaagaagattacactaagtttaatactaaagatttgaagactgaaaagaaaaatagcaaaatgactgcagctcagaaggctttggctaaagttgacaagagtggaatgaaaagtattgataccttttttggggtaaaaaataaaaaaaaaattggaaaggtttgaaactttgaaaataaaatctagcaaaaatatttgctttttacatgtttcagtttgtccttcctgactgttaatgactacctttggttgggggaaggaagaggccaatttcatgttctcttaaacatttctttgcatttggtttttgtgttcctgaacaaaatatgggaaagtgtctaacttcatggctatggccttttggagtctcatctgacataatgaaaagtaatcacttgaagagaattaacatatagcatcatgattttctcaataaactgatgtgtgacaatgtt

SEQ ID NO: 3299 - protein, 310 aa, Homo sapiens
MAAGVDCGDGVGARQHVFLVSEYLKDASKKMKNGLMFVKLVNPCSGEGAIYLFNMCLQQLFEVKVFKEKHHSWFINQSVQSGGLLHFATPVDPLFLLLHYLIKADKEGKFQPLDQVVVDNVFPNCILLLKLPGLEKLLHHVTEEKGNPEIDNKKYYKYSKEKTLKWLEKKVNQTVAALKTNNVNVSSRVQSTAFFSGDQASTDKEEDYIRYAHGLISDYIPKELSDDLSKYLKLPEPSASLPNPPSKKIKLSDEPVEAKEDYTKFNTKDLKTEKKNSKMTAAQKAKVDKSGMKSIDTFFGVKNKKKIGKV
